United States Patent Application Publication US 2020/0377945 A1 - sequence listing, part 11

SEQ ID NO: 1982 - DNA, 67369 bp, Unknown
  gut microbiota DNA sequence
gctttgcccaacggggcaatcgaacgagaagcccccacttcaagcgtgagctaagtggtgggagtatgtcacaagacttctgcgtctaccgctccttcgatgatctcaccacgagcccgctgagtgccagcagtgcaaggacgttcgggatgaccatgagaccgttgaagaagtctgctaaggaccatacaagctccagcttcaggcaggatccgatcacaatgcagacaacaacaatcatggagtaaagctttgacgctttctcaccgaacaggtacttcacgttgacaagtccgaagaaatgccagcttaagatcgtggaaaatgcgaagaagaacaggcacaccgcgacgaagatgataccggcgctgccgaatcctttcatgaatgccgcctgtgtgagcgctgtgccgtcctttccgctgctcataacgcctgttgtgaggacggagaataccgtcaggttcaggacgataaatgtgtcgatgaacacgctgaccatcgcgcagagtccctggtgatgcggggattccgcttttgctctcgcatgtgcgtgcggggtggaacccataccggcctcgttggagaaaagaccgcgggcaacaccataacggatcgcctcgcgcaccgtgataccggctccggctcccagaactgcctcaggaacgaacgctccgcggaagatggatacgaaagctgccggaactgccgtgatgttcatgcagatcaggatcaggctgccgacaatgtagatgccggccatgatcggcacgaccttctcaacgactgttgccagactcttcgttcctccaaggaagatcactgccgcaatcaccgccacagcaatgccaacgatcaccggagagagattgatatggaacacctcgaaagcttccacaaacgccgccccgatcgagttggactggaccatgttccccataaatcccagagcaagaacaataaataccgcaaacagagctgcgagtccttttccgaacattcctttgaacgccgctttgatatagtagacaggacctcctgtcacctcgccgtttacctctgtcttatatgtctgtgccagaactgcctccgcatagatcgtcgccattccgaggaatgcgctgacccacatccagaagatcgcaccaggtccgcctccgatgagggctgtcgccgctcctgcgaggtttccggttcctacctgggcagcgatcgccgtggcgatggactggaacggggtcatctcgcctttctcatgcttttcgccgttcatgctgaaatgtccgaatacctggcggacgccttccccgaactttctgacctggatgaatcttaagcggatcgtgtagtaaagtcctgttccgcataagagaatgatcaggagaaagctccacagaaaatcatttccttttgttacaagctgcatcagtgtgtccatttttgttatcctcctctttcatgatcatagccgcggcccctgcaatcaattccccgggctcacgcgcaaaaaataagagctgataagatatcagctctccaaagagtagaacatttgcatacaacggggattttccccattgtggttatttgtatgccctgtccttttgcctgagagatcaaccggtaccatggacatgaaccggtcttacaccttcggcgctccattcggagactctccagagtgtccatgcggacgtttgtccgtctggactgcacttatgcataacatcctatcacaatttcttctatatatcaacgtatttttaagctaaactaatgaattttgtaatttttgtaaaaagtgatgcaatgatggcagaaatcaaaagtgatttcctgcaatctgacgattgtggatttcgcttcgcctcctcatctcctgagccgcccggattcaacatctctcagctgcacgatcccggatcagctgcgtttccttcagccggagaacgggattccaatcactcccggccggcctgcacactgatcaagttctcactcttccgtattttccttcttttcttcctgctgtctttctttctcaagctcctgctgcttcaaagtctccgaaaaatccacccggatctccgttccttttcctgcctcgctctccagggaaagcttcgcaccgtgctgtgccacgatatgtttgacgatcgcaaggccaagtcccgtaccgccggtcgccttcgagcgactcttatcgacacggtagaaacgctcaaagatccgctcctgatgctccggcgagatcccgatcccggtatccttcacggagaggaaggtatgtccgttctccgttcccgtcatcacggtcaccgatccgtccttcttgttatagcggatcgcattatcgcacaggttgtagatcagctcctccatgagctgccggtctgcaaagacaggtgcggccccgccgcggacgctgatcgtcacattctgctttttcgcgttcatctggagcatgtccacgcattcctttgcaagcgggaacagatccagatctttatactccacatcctttttcccgccatcgagctgggaaagctggatgatatcgttgatcagtgagagcagtctcgatgcattcttgtggatctccgcggcgaaccgctctgcgttgtccccggccatcccatgttcgatgagctccgcgtatccggagattgccgtgagcggcgtctttaattcatgggagacatttgccgtgaattcctggcgcacctgggaactttttaagatgtcctcatgctgctgccggatcttgttcataaacgggaccagctccttgtaggcagcctgcgttccgggttccgagagattctccgccatcttctcgatcggtgccaccagattcttcgtaaagtaattggacatcaggatacagaagaagaacaggagcacaaacacgccgacaactgtcagcatcatgttctgggtcagagcaaaaatattgtcgccttcccttgcgatccgcaggatccggccattgtccagacggatcgcgtaatagaacatgtttttatccagtgtggtcgagcggcgggtatctcttccttccccgttttccagcgccatatggatctccggacggtcctcatggttctccatcgcggtaaagtccgcattgctgtcaaagatcacatttccgctggcgttgatcaccgtgatgcgcagcgtatcgggattcagatcataggcatccgggtgcagatccgagatactgtcaaagatatgcatatttttcatgacaagcgcatccgccttcagatccccgatcacctgtttctgatagaccccgtaaaaaacgaataaaacacacagcagtgtcaacaagattgaaaacactgccgtggcaagaagttctatatggatttttcttttcattcgatcatgtaccccacatttctcactgttcggatcatggaacccgcctcgccgagtttctgtctgagcgtccggatatgcatatccagagttctcgactctccttcaaaatcaatgccccagacacgctccaggatgatctcacgcgtcacaacgatcccggcattgtggagcagcagctttaagagttcatattccttgaaggtcaggctgcatgggacatccttcacatacaccatgtgcttctcatcatccaggaagatatcccccagggtcaggaacttgtcctcctccatcgttcttctgagcaccgccttcactctcgcgataagctccatcacaccgaacggctttgtcagataatcatccgcgccgacatcgagtcccttcaccttgtcgatctcggtgctctttgccgtcaccatgatcaccggaagtttcttcgtctccgggcggcggcggagcttcgctacgatctccagtccgtcctcatccggcagcataatgtccaggaggacaagatccggctgcttctcttccagctttttataaaaatcatgagcgcactcaaagccctctacctgatatccgctgtttttcagtgcgaacatctcaatttccagaatatttttatcatcttccactgcatagatcagagccatgttcttctcctcctgtcttaatttctgtcattttccgtcatcggcctgattcagatcatgatttttatttcacgatccatagtgccgggcagctatgcgttcccacggcataccgcccttttctcctactatcttactacacattttcctagactggaagcgcgtatttatcacgatactgttccaccatcgccgcaaactgcggatctccgtctctctttaaattttccagatatccgtgggcatcaaaaccatcgcgctcgatctcgatcacgctgatcgcgatattggaacagtgatcagaaacacgctccagattcatagaaatgtcagagaggacaaagccctgctcgatcgtacattttcccttctggagtctcttgatgtgatttgccttcaccacggtattgatatcgtcgatgacttcctctaacggctccacctttgacgcctcatccgtattattcgtctcgaacgcatcgatggacatgtccaggatctccttgacggcatctaaaaagatttccagctctttgtctgccttgcttgaaaaatgcatctctttctcttgcatctccttcgcggaatcctttaaattcatgccatgatcggaaatacgctcaaaatcaccgatgcagtgaaggagcagggataccgtatggctgtcgtttctggacagattttttccgccgagctttaccatataggttccgagttcatcctcataacggtctacaaggttctccagcgcctccacgcgctctgccttttcttctgaaaattcctttaaaagttctactgatgtaaagaagcattccttcgccagctttgccatctggatcgttgtctgacggcactgctctactgcgaaaccaggagtgtcgaggaaacgcgggtccagaagacggaacgcactcttttcctgctctgcgacaggaacttccttcttctgctcatccgggatcgtgagacatgccagttttacaagtccgttgccaaacggaaggagcaggatcgtcgccgcaatgttgaagctgctgtggatcactgcaatccccatcgcatttgccgctgtatcgaggaacgaaaaatgaacgaccgcattgatcgtgtaaaagacgatcataaagatcacggtgccgataatattaaagtacaggtgaacaagcgctgcacgtctcgcatttttggaggcgccgataccggaaagcattgcagtcacacatgttccgatattctgtcccatgatgatcggaagagccgtgccgaagttgactgctcccgttgcacataacgcctgaagaattccgaccgatgcggaagagctctggatgatcgcggtaaggacagctccggcgatcattccaatgaccggattcgagaacatggtcaggatcccggtgaattccggtacattcgcaagcggttttacagcaccgctcatggtctccattccggtcatcaggatcgcgaagccgatcatgatcgttccggcgtctttcttcttctcctttttggagaacatgataaagcagacgccgatgagtgcaaggaccggcgagaacgatgtcggttttaaaagacgtacaaaaaagtttccgctctcaattcctgtaaggctcaggagccaggaagtaacagtcgttccgatgttggcgcccatgatgatgccgaccgcctgcgtcagcttcatgatgcccgagtttacaaaacctacgaccatgacggtagtcgcggaagatgactggatcaccgctgtgactccggcacctaaaaggaccgccttgatcggatttgatgtcagtttttcaagaattctttccagtctgccgccggaaagcttttcgagaccatttcccatggtctccattccgtaaaggaacagcgcgagcccgccaagcatcgtcaatactccaaaaaagtccataaaattctcctcttcaaaattttgatcattcattaactttttacatttctttcttaccatgtatcagaatatcaaggaaatgtaaaatgcttgacagggattatgtaaaatctgtgtaaaattgtgtatttaaacaggaacaaaatataattataaaatgagatgtttttatactggagtcgattgatagaatctgtagattatggtagaattttctcatggtgtcaccataacggtaggcggttggtccccgaattacatagaacctgtaaaggaatcttatggaaaggaggggatgccatgagcattattgatttcattgcggtcgtgagcttcggtcttgcttgtttcggactggggtatacgcttggaaaagatactgtaaatgcaaaaaaataaccgccccgacctgacaaatcgaacggttattttttcaacataaagttcaggatcaaccgtctatcggtgacacctctttacaggtaatataacacactcatgaaaacatttcaacatctattttccgatcattttttccacatttaacattccccatccctgctggtttctcggcaatccgatatccaccgaactttcccgcagtctcagtttcacatccttatttgacatgtccggaaaccgttccagtaaaagagcgacggctccggagacgatcggggtgctcatggaagttccgctcttgatcgtatacttgtcagctctgctggagcagctcacaacgctgcagcccggtgcaacgagatccggtttgcagatgcaggccgccgtggggccgcggccggaataatccaccatccggtttccaccgaccagtacctcccggtcatcgtccgaacagccgaccgtgatcaccttccggctgatccccggcgtcgtgatgctcatggtccgcggcccattgtttccggccgccaccacgaccacaagaccggcgtcccatgcccggttcacgcctttcacaagggcggaattctcactcatcccgcgtttcgagcaggcgcccaccgatatatttaagatccggatgccaagctgttcctttctctccaggacccaggagatccccgccagaacatccgaagaatagccatttccttttcggtccaggactttcaccatgataagattacaccccggtgcgatcccgctgtaccgcccgccggacattcgcccgctgccgccgatgatcccgcagatatgcgtcccatgtccgcagtcatcatacgcaaaattccgccggttcaccatatccgcaaaaccggtcacccggctgtcaaaatcccggtgaagaaagatcccggtatccagaacggccacgccgatccccttcccggaaagccccatccgatatgcgcgctcacaatggatctgatctttgatatgattcacatgcaggattcctccatgcattctctcttacttataaaatattctgtctgcctgttttgtgcgccctgccgctttccgatcagtccgaatccatcaccgaaactttcctgcctgtgcatatcttctgacagcattccctgtcttttttttgttttccacattcttcaaaattacggtcaaatcttaaagaaatcttaataattcattcaaagaatatacaatcattttccggtctggtgtgctatactttaaccataagaaatgcacgagatattttaaatcctttatcctaaacctttttgaaattgaaatcctaaatgatgaatccctgtacgagatgtacagggttttttcatgtctttttgttctggcagacctgacccccataagacaaggcatgattctctattgcccatgcggtcacctgaaaccggtcccaatttcgcgtaaacaacaagagacggtaccgttcaccaagaaccataccgcctcttttttctttttactgaccgcctgtcatttttcagatcctgcccgccggcatagatccggccgcacactatctcatatgatcaggcttttcttttttcccttacacgtttctgacattcttaagaatatcgcagaaatcaaatgtagcaaagtaatccttcggagtctctgcacggcggatcatctgaacgcttccgtcctccttgaggagaagctctgcgctctttaactttccgttgtagttgtaacccatcgcgaatccgtgtgcacccgcatcgtggatgaataaaaggtcacccatatcgatcttcgggagcatgcggtcgatcgcaaatttatcgttgttctcgcagagggaacctgtcacatcgtacttgtgatcacacggctcgttctccttgcccatcacagtgatgtggtggtaagcgccgtacattgccggacgcatcaggtttaccgcgcaggcatccacaccgatatactctttgtaagtgtgcttctcatggatcgctcttgtgacaagcgcaccgtacggagccagcatgaaacggccaagctctgtgaagatcgcaacatcgcccattcctgccggaacgagaacttcctcgtaaacttttcttacgccctcaccgataaccttgatatcgttcggctcctggtccggtctgtacgggattccgattccgccggagaggttgatgaacttgatgtcagcgccagtctctttctttaacttcacggcaagttcaaaaagaaccttcgcgagaagcggataatactcatttgtcacagtgttgcttgcaaggaacgcatggataccgaagttcttcgcgccctttgcctttaagatcttgtaagcctctgtgatctgggcctctgtcatgccgtacttcgcatcacccgggttatccatgatatcagttgttaccttgaataatccgcccggattgaaacggcagcagatcgtctccggaatcgttccgatcgtcttctccagacactcgatatgtgtgaaatcatccaggttgatgatcgcaccgaggtcgtaagccagtttgaactcttccggcggggtatcgttggaagagaacatgatgtcatggccggaaaaaccgcatgcatcggacatcagaagctctgtctttgaggaacagtcagttccgcatccaagctcctgaaggatttttaagatgaacgggttcggggttgcctttactgcaaaatactctctgaagcctttattccaggaaaatgcttcctttaatttcatcgcattctcacggattcccttttcatcataaagatagaaaggagtcggataggtctttgcgatctcttccagctgttccttcgttacaaacggtttcttctccatgtacgttctctccttatcagtcaatatattccgcaccctgaggcgctcgatcctgtgctgtatacaccacacaaatatacagtgcactacagacagctgcgcccggtgcaaagcccggcaggccggactctttcttttagtcgatatttactacacgcatgatattcgtggaagccgccggctcatgtcttctcgcataatccacaactcccgcagtcacgaccgcgatatcgcctgcttttacaataccattctcttttaaaatgtcaatactgttctcaattaaagtgtcagtggattccgctctctttgcctggaacggggtaactccccagtagagcatcatcttgcggactgcggagatactcggggacattccgacaagttttgtggacggatgccacttggaaagcattctcgctgtgtagccgctgatactcggcgcgatgatgacagccgcatcaagagactgtgcagtcgcaacggatgcgtagctcactgcattggaaatattgtggcggttatcgtcggatacggttctcttctcatagaagtcaccgttcatgtgggactcggtctcctcaacgatatgagccatcatctttaatgcctcgaccggatacttaccgtttgcagtctcaccggataacataacgacatctgttccgtcatatacagcgttcgcaacatcggaaacctccgcgcgggtcggtctcgggttgcggatcatggaatccagcatctgggtcgctgtgataacgaccttacatgcggcactgcactttttgatcatcattttctgaagatgcggaagcttctccggtgcgatctcaacacccaggtcaccgcgggctaccatgattccgtcgctggcctcgatgatctcgtcaaggttctcaagtccctcagcgttctcgatcttcgcgatgattcccattgaggaaccgccctcatccaacatctggcggatctcacggatcgcagctgcggaacggataaaagaagccgcgatatagtcgaacccaagctcaataccgaaacggatatcttccttatctttatctgttaatgccggaagcttgatctttacattcgggacgttgacgccctttctctctccaagctcgccgccgttcatgatcctgcagtagatctcggttccctcgacacgttcaacatggagctcgatcagaccatcatcgatcaggatcacgttgccctctgttacatcctcatttaaaccgttatagttgatgtggactctctttgcgtcaccgatgatgtcctctgttgtaaggatgatctcctcgcctgctgtcagtgttactttctttccgtcttttaatacgccggtacggatctccgggccctttgtatcaagaagagccgctaccggttttccaacctcttccgcaacctcgcggagctgtttgtagcgtgctctctgctcatcatgagtgccatgggagaagttgaaacgggcaacatccattccgtttaaaaggagctgcttcatgacctctctgtcatcactgttcggtcccatagtacagataatctttgttttcttcattattatgcctcctgattactgttagcctgtcttggatccatcccgccctttgtcacatgcttatgggtatacagatggtcctgacaatattcatagtcgccttcacacttggaacagtagcggaataccagattcggatcatcctcctccgtccgtccgcagacagcacagcgatggcgtccgattttcgctgctgtcttctgtgcctcgcgcatctgtgagtgaaaaacctgttttctccggatctccttcggattcagacggctccccctggacatgaagaggtatacgataaaattaagtaaagacataacgatcgcaattctctgcgacatgccgccgaaaaggaatccatagacgaagtaaagtccatcaaaaagtgccagatacttcgccttgatcggaagtacaaaaaacaggtaaaactgcatttccgggaatgtggccgcaaatgcaaaaaacagggaaaagttcagataatctgtggtgagaatatagacctgccctgtgatgatgtagatcagcagtgccgcaaggacatgaccggtcacacccataaaaaagtacatgttaaaccggaaggttccccaaacccgttccagagtcattcccagattgtagtaaaggtagatcgcgatcaggttgaaaaaaaggctcgtggacggcggccagatcataaatgtgatgatccgccagatctgtccatgaaggatcgctctcgcatccagcatcagatactgaatgtagaatgccggtgccatcatctggaccaagactccgaccgcatacaggatcacaatataatacatgagattcgggatcgcgtaccgtccgaatttccgttccaatttgttcatcagattcattctgtatttcctttcttctgcgaaaatgcgaatatcccgttcgctcttccattttcctacgccccgtattataattcccaacggtttcttttgtcaaatcatttatacacctcgtccccatcgccaacaacgccctagcattaaatctttacgcaatctttacagaaatttaactattttaggcccccacatccccattccgtcaattgtatttccttatttattgtgttatactatgcgtggaattttgtcgaaggcatgtttatgcccacattccggctggctgcctgcgtttcgcggacggctcgtttttttctgttgaaaaggaggtatggggagaactccccgctcgtatgaatcaatgttatcgtcttggaatcgatatcggttccactacagtaaaagttgccgtgatcgacgacaacaacaaaattttattcgcggattatgagcggcattacgccaatatccaggaaaccctggcctcgcttctgaaaaagtgtaagggagaactcggtgaactctctttacggcccaatattacaggttccggaggactcactctgtcgggttacttacatattccatttgtccaggaagtcgtagcggttgcaaccgcacttcaggactatgctccgcggacggatgtcgccatcgagctcggcggcgaggacgcgaagatcatctactttacaggcggaatcgaccagcgtatgaacgggatctgcgccggcggtaccggttcctttatcgaccagatggcttccttattacagacggatgccgccggtctgaatgaatatgcaaagaattataaggcgatctacccgatcgctgcccgctgcggcgtattcgcgaaatccgatatccagccgctgatcaacgatggggctacccgtgaggacctcgccgcctcgatcttccaggcggtcgtaaaccagaccatcagcggtctcgcctgcggcaagccgatccgcggaaacgtagcgttcctcggaggtccgctgcacttcttaccggaacttcggaacgcctttatccgcaccttaaatctgaccggagacgccattatcgctccggatcactcccacctctttgcagccacgggcgctgccatgaacgcaaaagatgatgcggagatcttctcccttgataagctgatctcggatctctccggcggcatcaagatgaaatttgaagtaaagagaatgcagcctttatttaaggatgaggcagattataaggaattcaccgaccgccatgaccagtacaaggtccgccgcggtgacctctccacctatgaaggaaacgtattcttagggatcgatgccggttccaccacaacgaaggtggcactcgtcggcgaggatggttccctgctctacagcttttacagcagcaacaacggaagcccgttggcgaccgcgatctcttccataaaggagattaagtccctgcttccggacagcgcgaagatcgcctactcctgctccaccggctacggcgaggccctcttaaaggcggccttcatgctggatgagggcgaggtcgagacgatctcccactactacgcggcggcattcttcgatccgtccgtagactgcatcctcgatatcggtggtcaggatatgaaatgtatccgcatcaaggacggcaccgtggacagtgtccagctcaacgaggcatgttcctccggctgcggttccttcatcgagaccttcgcaaaatccttaaactacagcgttcaggatttcgcgaaggcggcactttttgcccagaacccggtggatctcggaacgagatgtaccgtattcatgaactccaacgtaaaacaggcgcagaaagaaggcgcttctgttgcggatatctccgccggcctcgcctactctgtcatcaaaaatgccctgtttaaagtcatcaagatcacttccgccggcgacctcggaaagaatgtcgttgtccagggcggaaccttctacaacgacgcagtcctcagaagctttgaacggatctccggctgcgaagctgtccgcccggatatcgcaggtatcatgggtgccttcggagctgctcttatcgcccgtgagcgctatatgcaccgcccgcatgagacgacaatgctctcccttgatgacattatcaacttaacctatacgaccaccatgagccgctgccgcggatgcgtgaaccactgcgtcctgacgatcaaccgttttgagggcggccgtcagtacgtttccggaaaccgctgtgagcgcggactcggtgtggaaaaagcaaaacgcgatatcccgaacctgttcacctggaaataccacagaatcttcgactatgagccgctgactgccgacaaggcgacaagaggcattgtcgggatcccgcgtgtcctcaacatgtacgagaacttcccgtactgggcaactttctttaaggaactcggcttccgcgtgatgctgtccccgcagtccagccaccagatctatgagctgggcatcgagacgatcccgagtgagtccgaatgttacccggcaaaactcgcacacggccatatttcctggctgatcaagcgcgatgttccatttatcttctatccgtgtatcccgtatgagcggaaagaagttccgggtgccggaaaccactataactgcccgatggtaacctcctactcggagaacatcaagaacaacatggaagagctgaaggaaaagaatgtgaagttcttaaatccgttcatggcgttcacaagtgaggagatcctctcaaaaaagctgcaggaagtcttcaaacaggaatttgacattccggagtctgagacaaagaaagccgcaaagaaagcctgggatgaactgagccaggcaagacgcgatgtggagaagaaaggcgaggaagtcttacagtacttaaaagataccggaaaacacggaatcgttctcgccggacgtccataccacatcgatccggagatcaaccacggaatcgccgacatgatcacctcctacggctttgcagtcctgaccgaggactccgtctcccatttaggaaaagtggagcgcccgctcgtcgtcactgaccagtggatgtaccattctcgcctctatgaggccgcttccttcgtgaagacgcaggataatctggatctcgtccagttgaactccttcggctgcggtctcgacgccgtcaccaccgaccaggtcagtgatattctcacccggtccggcaagatctataccgttttaaagatcgatgaggtcaacaacctcggcgcggcaaggatccgtatccgttccctgatctccgccctccgtgtccgcgaggaacgccgctacacgagaacgatcgtgtccagcgcttacaaccgcgtgatgttcacgaaggacatgaagaagaactacacgctgctctgcccgcagatgtccccgatccacttcgaactcatcgaaccggcaatccgcagcttcggctacaaccttgtcgttctccagaacgatgacaagacagccgtcgataccggattaaaatatgtaaacaacgacgcctgctacccgtccctgatcgtcatcggacagatcatggacgccctgctatccggaaagtatgatctcgatcatacggctgtcctcatgagccagaccggcggcggctgccgtgcgtccaactatatcggctttatccgccgtgctctcgaaaaggccggcatggcacagatccctgtcatctccatcaacgcaaacggcatggagaccaatccgggattcaagtacacgccgtccatgctcgtgaaggccttacaggccgttgtatacggtgatgtattcatgcgtgttctctatgcgacaagaccttacgaggccgttcccggctccgcaaacgctctccacgagaagtggaagaagatctgtgtcaaagcactctccacaaagagcgccggaatgatgaccttcgtgaagaatatccgcggcatcatccacgacttcgataacttagagcgcacgaatgtccacaagccgaaggtcggcatcgtcggagagatcctcgtaaaattctcaccgaccgccaacaaccatatcgtggatctcttggagtctgagggtgctgaggcggtaatgccggatctcatggatttcctgctttactgcttctacaacagcaacttcaaggcagataaccttggcacaaagcgctccacggcgcacctgtgcaacatggcgatctcactcctcgagtacatgagaaaagccgcaagaattgctctcgaaaagagcacccactttactccgccgtcaaggatcaaggatctggcagtaatggcaaacgattttgtctcccttggaaaccagaccggtgaaggctggttcctgactggtgagatgttagagctcatcaagagcggtgtcaacaacatcgtctgcgttcagcctttcggctgcctgccgaaccacatcgtcggaaaaggtgttatcaaggaacttcgctacgcgaaccccaaggccaacatcattgccgtcgactatgacccgggcgcaagtgaggtaaaccagttaaaccgtatcaagctgatgctttccacagctcagaaaaacctcgaaaaagaggaatatgtggatccgaatctggcgaagacgttaaaaaaggtggaagaactttcttccaagcgagtcaataagtgccggttataatccaccttccataagcttctaaaagtaaaaccggaaatgaaggatactcctatcaatttcatgaaacgcaaagacagcggcaggtatctaaaacgatacctgccgctgtctgttatcttccgaccagcgctccgacacgatagccatctggcatgcatttcacggaaaccgatccgaaaaatacatgctgttcatttcatttaaatcttataggaaaacgcgattaagcctccggcttctcgtagctgcgatgcatagagaaggaatccatatcgtaattctttaagttctcccatactccgcggccgtctgccttcgcgatcacagcgtcacggtctttcttgaatgccatctcctgtttcaggttgctcggtccgcctacgcagccgccctggcacatcataccctcgatgaaatcttccggaagtcttccgaccttaagaagaagaagcgccttcttgacctcagccgcaccgctgcagcgcgcaaccttcacgtctgtgctttctcccttttcctttaagcactcgatcaccgcatttgtaacgccgccgccgttgccgaaacgcttaccgaagacactgccttcctgcttcgtctcctctgccggctcaagctcaacatctttaccgcgcatcatctcgatcgcctcaccgaaagtcagaacataatctgcattgttctcgatggacttgtccgcagcctcggacttctttgccatacacggtccgataaatacagtaactgtctccggatcgatcgcttttaacattctggataccgcgcacatcggggataccgttgtggacatattatcgatcagagtcggatagtgtttcttgatcatatttacgaatgccggacagcaggaggtcgtcatcttcttgccttccttaaatgcctctgcccattccattgcctcgtacgctgctgtcatatcagcaccggcggcaacctctaccatatcggcaaagccaaccttctttaatgcagtacgccagctctccattgtgatatcctggccgaactcaccttcagcagccggagcaaccatggcaacgaccttcttgccggccttgatcgcctcgatcacctgtacaacatataccttggaggaaattgcaccgaacgggcagcttcttacgcaggcaccgcactggatacatttcttttcatcgatctggcagattccggtctccggatccattgtgatcgcatctaccggacatgcacggcggcacggacggatcagctcagcgatcgcattgtacggacatgcctgagcacagcgtccgcactctttacagacactcggatcaatatgggcacggtcacggccgatcgagatcgcaccaaagttacatgcgttctggcaggctttacccatacatttctgacagttatcggttacaacgaatcttgtgatcggacactcctcacatgcagaagagatgacctgaatgatattgtcgctctgtttgtcactcggacattttccctccgcgagacggattctctgacggatgatctctctctccttgtatacgcagcagcggaactgtgccttcgggcccgggatcagtttgaacgggatattgtctctctcttcctccagctttccctcaaaagccagcttggaaactgtgcgcagcacgtcatacttgatcttaagcagtgcctcatcgttggttttcatacactttcctcctgttttttcacagccggtgatttcataagatccgatcatttttcatcgatctcttctgtcttctactcccctgagacaaaagaatctttaccgttgctccatgaaatctttccatatttcaattgccatatttatccgagtcatattatcgcatatcgcccttttcaaagcaagaagcaaattgtatattttttaacgcaatataaggaaaaaccttattttcttaaattgtattccagaaagtacagcccccgcaaatttcccgatttccccgtatttccatgtctttccatgaaggatttttgttcgtgtgcggcgatgatatcactcagatattttgataattatttaacatttagaacaattccactgcctcccccatccccctatgttaaaccccacaaaacattttttaccagataatcaccaaataaccaaaaccgccatctgtgcgcctgctgagcggcgagcatccgagcaggagtgcattgattcagggatctggcttcctcttagctcgcgggtgactgcgttggagaacaggggacacttgtctgagcgcagcgagttgtgtcccctgttctccgtccttagcagtctcccgggagcttagaggaaccttccctgaaccacctagcactcctgatcggatactcgccgcgtcccgccgattgacattctcctctccccatgctatattctacttaacttggtcgtgctaaccccaaaggtcatagaaaacatgtcctgacggcaaagacgaaaaggatccggcgcaaattgaatctatatatgaccttcccaggctatcttatcgcctttaaggtcatccccatgaattcaccccgcccggtatgctcttttcgtgtgcataccgggcttttattattcaactttcatggaggaaccaattatgagaaaaatgttatccgtaatgatggccgctgcgatcgcaggctctctcctcgcaggctgctcatcatccacaaccgaaacaactgctgccgcttcttccgcagaagagacaacaacagccgctgaagccaccgcagaagcttcctcagaagcagcttccgctgagacttccggcgatgaaaccgttgtccgcgtcggcggcttaaaaggaccgacaaccatgggactcgtaaaactcatggatgagtccgcaaacggtgaagcagaaaacaactacgaatttgcaatggtaaccgctgctgacgagatgaccgcaatggtcgcaggcggaaaagtcgatatcgccctgctcccggcaaacgttgcaagcgttctctacaataaaacaaacaaaaacatttccgtgatcgacatcaacacactcggcgttctctacttcgtttccgccgacaattccgtgacaacgatcgatcagttaaaaggaaaaactgtatatctcccgggcaaaggaaccacaccggaatacgcactccgctatgtgctctccgctgcagggctcggcgaaaacgacgtgactctcgagttcaaatcggaagcatccgaggttgcttccgtactcgcggaagacccgaacgcgatcggtcttctcccgcagccgttcgttacagcagctctcgcccagaacgaaaaactctccatcatcatggacctcacaaaagagtgggacaatgtccagagcgaagcttccggaagccaccttgtaacaggcgtcacgatcgtaaacaatgacttcttaaaagagcatgaagatctcgtcgacaccttcttacaggaacatgaggcgtccatccagttcacctccgaggacccggataccgctgctgagctcatcgcaaacgctgagatcgttgcaaaagccccgatcgccagaaaagcacttccgtactgcaacatcaccttcctctccggaactgagatgaaagaggcactctccggttatcttcaggctctgtatgaccagaacccggcatccgtcggcggcgagctcccggatgatggattctactatgtaaaataatcacatccggatcatgagcatggggtatggcagattagtcagccataccctatatttatgtctgtcagtgtcagctcctttgtttgttccagaagcgatcaacgttctggagataacacaaaatttatgcacctaattcatctttaaaataatggaaacacagtacatgtttttcaaatgtattaagtgctaaaaatatctgctataattatcttatccattcattctgcacattgaatgattgtatcgatacactttttcatttgatttctacttctcaaggaggcacctgccatgaataaacaactccccggcttcgcccgcagaatcctgatcatcctcttctggatcatcctctggcagttcgcggcctccctgatccggaaccatattttccttgtcggtcccatcgacacactgcgcgcgctctgtgaacaggccctgcttccggctttctggtccgccatcctgttttccttcgggcggatctgtctcggatttttccttgcctttttcctcgggctcttcactgggtccctggcgtaccgttttcccatcgtttccgaatttttagaaccgccggtgcagctcatgaaaacagtgcccatcgcctctttcgtgatcctggcactcatctggactggatcccggaatctctccgtgttcatttcctttctcgtcgtctatccgatgatccatgtgaacacgaaagccggtctcttatccacgaacccagagcttttagagatggcatctgttttccatatcccgcttattcgaagagtctggtatctctaccgcggcgcactctatccatacttaaaaagcgcctgccggaccgcgctcggcatgggcttcaagtccgggattgccgccgaagtcatcggagttccgggcggatcgatcggggaaggtctgtatctcgcaaagatctatctgagcactgcagagctcttcgcatggaccttcatgatcattgtggtcagcacactgtttgaaaaattatttttgtggaccttaaagaaatttgcaggaaagggggctcttatcgatgagtaaaaacacagctgacatcccggctctgtctctccgctccatctcaaaatcctacgatagtcatccggtcttcaccggtctttcgatggatttcttctcaggaaccgcctactgcctgatggcgccgtccggaagcggaaagacgacactcttccgcctgatcctcgggctggaatccccggatcggggcgaagttctatttaagggctcacttcgccgcccgcagatttctgcagttttccaggaagaccgcctcttagagggattttccgctgttgaaaacctgttttttgcgctcgggaaccggtattcaaaagaaacactcaccacttcacttctccgccttctccccgcagatgcgctcgaaaaaccggtctgcgaattctccggcggaatgaagcggcgtctttccgtcctccgcgcactcctctctccggccgaaattatcctcatggacgaaccattcaccggactggatcccgcgacaaagcagaccgtcatcgatctgatcaacgaactctgcagcggaaaacttctgattgcttccacgcacgcgaaggaagatgccgtgcttcttaataccaaaatcatcctcttatagcaaaatgcccaccaacacacgatgcagaactccgcatcatgcgctggtgggcattggtttttttatccctgattccccataaactgccgttccagccctttcatatgccggaaatagatcacaaacatcgatccacccgtaaacagccaggacgccacatacacattcatcagcatctcatagctcgtaaacatccggacacgatcaggtaatacatcggacgcctccaggatcacccgcgccaccagcattccgatcaccatgagcgaaattctgagaaccgccccgaatgtcaggatcgtgtggaccatgctgttgatctttccgcggtttttctgtccgatcaggttcgcaagcgccgcgttcggtcccaccgcgagtccaccgtttaacatatccatttcttttgacttttttcctgtctgctccacttcctgttgtcctttccgatcttttcttgtgtaaaaaatcagcaaaaagagatgccgacaactcaatatgagtcatcagcatctctttctctatttacgtattttaattattttgttatccggctattttagttcccgtcccccggaaatcccgcgatatttccgatcgcttccgtcgacggagtcgccgtcgtctcatcaccaggtccattcggagctgccgcagttgtagacgcggccgtcgtcggagctgcggttgtcgccgcctcagtcgctgcagttgttgctgctgcggttgtggatgccgctgtcgtctcactctgactgctctttgtctcagagccactcgtagacgccgctgttgttgccgccgcagagctctccggagcaacactctcacccggaacatatccgtccggcattccgtcgatcgctgccgatgtggactccgcaaccgtcgtctcactcgccgcaaccttcacagatccggtatttctgcggatcaccgccgcatgtcccttatatgtcttcgcatggtcttccgtcttttccacgactgtgccattcttcgatacgatcttgtaagtgatccagcggcttccgtttgttgccgccttctgggtcacttccgttccaggatccagagtcggatcttccacatacgtcggctccggcggcggaagctcatccgtcttctcagactccagactccatgtaattcctttttcgaggaccggaactccgtagaaggaaactgtcatcttccggttgctgtaattcgcacggatcccgatcgccgcctttgaggtattgataaaacggaaatccgggatatcccagctgatcgccgcatcctgccccggtgttacatagttcggctcaaatgtgtgggaacgacggtatgtgatctgcattccggactggaacgcaacacggtacatcgtagaagatacctggcagacaccgccgcccggctcctgaacgacctcaccaccgctgtatgcagctgcttcctggtagcctttttccgctgtacgaggaccaacaaccttgttaaaggagaattcctctcccggctgtacgatcgttccgttgatcgcctgcgccgccagcttgacattcgtatttcgcttctcgttcgcggtcgtctccgtcgtaaacgttgaaagtctctgatactgctctctcgcatcagcctcggaaagttccggtgccgtctcattgacctccgcctggatcaccgcatcataatttctactcgtcaccgcctcaacaagatccgccgcaagtttttcctgatccacggccttacccggcgttccgtctgtgaacaggaacttatcactcgctgcgtcatactcagagatcgagctgttcttcgccttcacatcccattttgccgctgcgtctgccgctgcctttgccgctgcggactgcagatcctcggaatcttccaccgagaatgtatattctccgccattcttgtcagcagaaatcccgtccaaaaaggcatccagctccgtgtcgatcatgttgtccgcgtccacgctctccccgttgtaagagatcttcacattccacggaaacttcgcctcgatggcagctttcgcctcgctctttgtcattccctttaaagaaatcccgttgacgctgatatcggatgcctggaatgtggattcctccgcgaccgtatccgttgtcttctcttttccatgcccgaacaagccggaaataagccggatcactccgatgatcaggatcaggcagatgatcgctccgccgatcatgatccgtctcctcaagatctgttttctcttccgcctctgcgcccggatccaggccggggaatgctgcctgtactcgtctctctggtctctctgggttctgggatctctctggtctctcggtccccttgatcccctctgatctctctctctgttcatgtctgtattttccttattttactttatcagaatttatcaggatgcaacgacagggtccgcaccgaaatggtgccgaaccctgatatatatcggttatgatcatgtaataccgttctaattacggtatttttacaaaatctcatctgtctgtatcagacaattattcattatatcggtaccggaatgccttgtcaagaacgtcggacaacaaaagttcacgctcttaaagttaacacccttagtccaaaaatggacctccggaagttttctctcccaaagatccattttttcaacttctttatctcttccggtcctctcctgctgccgttttttcgtgatccggccgcgcttttcaggctcagccaaggaatccaagatgctccagcaaaatcttgatccccatgaggaccaggatcagtccgccgacaaactctgccttcgacttgtacttcattccgaatacattaccgaccttcacgccgatcgccgacaggataaatgtcgtacatccgatgaaggtcactgcccagacgatgtttacatgtaaaaacgcaaatgtcacgccgactgccagcgcatcgatactggtcgccaccgccagggctaacatcgtcttcacgtcaaagctggcgttcagttcttcgtcctcatcctctctggattccttgatcatattgattccgatgatcccgagaagaacaaatgcgatccagtggtcgatctgtgtgatcatggactcaaactggcttccgagaaggtagccgatcgtcggcatcagagcctggaatccgccaaaatatgcaccgcagatcagcgcgtgcttcggttccatcttttttaccgacaagcccttacagacagacaccgcgaacgcatccatcgacagtcctacagcaaggataaaaagctctaaaagtcccataagtcatgttcctcctaaaaattgcttattttttctgatgaaaaaggtatcagctttcctgtgcgatccttccgcctcgcacattgcgcatctcaggcacgcagtacctttttgtttaacagaacgttccatcgggatttcctcttaaacaaaaaaagagacttcctctgtcattttcgacagataagtctcatcatttcaagtaaagccaggaacatttccagtatgttgaccttactgcgctttccggcgccgactactcccttattctggtaagtccgtaactgtattgtatcgtcacagttacatgagtatccttttgttctacagaagagtgcggatgaagggatttgaacccccacggttgcccgccagctcctaaggctggtgcgtctgccagttccgccacatccgcgcattctccgatagactctcattatagcgtgtttgaaaagaattgtcaattatggattttcttcgtctcctcatcgtagtcatccaggaaattgtaactccagtctcccttgtgatatccgatgaccgtcttcagattgatgttgtgaacactgttgaagatgttcatgtcgatcgtgtcacagcgctttctgagctccgcgatcagctccttcatctcgtcgcgcttcgatcccttttcgccgccgcatgtcgcgcagcgctccgtgaaacggcacgcacactggataaagtggaggtgattgtaatctctccacgccttgatatccgcctcgcggaccatgtacatcgggcggatcagctccatgccctcaaagttcttgctgtggagcttcggcatcatggtctcgacctttccgctatacagcattcccatcagcgttgtctcgatcacatcgtcaaaatgatgtccaagcgcgatcttgttgcagccgagctctttcgcgtgggaataaagatatccgcggcgcattctcgcgcagagataacacgggctcttatccacgtcggcaacgatattgaagatatcgctgtcaaacacctggatcgggattcccagaagcttcgcgttatttaagatgatattccagttgtcctcattatatcccggattcatcacgagaaatacaaggtcaaacttcacttttccatgaagtttcagctcctgtaagagctttgccatgagcatcgagtcttttccgccggagatgcagaccgcaatcttatctccttccttgatcagctcgtagtcatggactccctttgtaaaccgtctccagatcgatttgcggtattttgtgatgatgctgcgctcgatcgccttcgtgcgctccgcgacctcctcctcgttcatgaccatcatggacagggacaggcgcaggaaggagcggtatccgccttccacgcttccggcgtcaaatccggcatcgtccagaagttccgccacatacaggctcttgtttcccgtatggcagagcacccagaccggcttgtccttcgggatcgccgcgagaagttttccaacatttacgccctcttcccaggcctttccctctccgatcgttccggactccatgtccgcctcctccggattctccaggtattccaccagcttgtcctccgggatatttaacgcggcatccatggacccctttttatattcctccgccgggcggatgtcgatgatcgtccggtcaaacgttcttccattgatcagctctgcagctgtgatcgtcttaatcattctctttctattctccatttacggctgtcgccctgatccgggcgctgtctcctgctgtttttacttttctaagatattcttcaacatataaaccctgttgaacgggaatgaaaaataatatccgtccgcgaagtcctccaccagcttcatgacttccttcgcaagctggatgcccacggcctcgccttccttccggctggctttttcagggtatctcgcgacgatctcatccgtcacattgacgcccgcgatctcatttttcatgaacatcgcgttctttctgctgatgagcggcatgatcccgcagaggatccgcgccccggtctcatccttgatccggcgcagtctcgccgcgtcctcctccgtaaataccggctgggtcaggaaaaactccgctccctcttccatcttcttctttacacgtccgatctccacgtccaggttctttcttccctggttgatcgcaccaccgtagcagagcggattattcgcgaaaacatcctcattcatctccttcgcgatcttcataagccccgtggaatccgagttgaacaccgctttgaccgtctgtctcgccgtcgacgggatcggatctcccgtgatgatcaggaagttgtaaatatcattgatggcagctcccagaaacagggaccgcatcgcgatcgcattcctgtcacgacagcagatatgcggcatcacatttaatcccgtcgcctggcgcaccttgttcgccatgaggacggaatcgactctcgttcttccggacggggaatccgggaatgtgaggacatccacgcctgcattctttaaaagatgggcggattccaggagtttctcatcatccgcgtcaaacggcggcgccagctcgaccgcgataagcttcttctcttttctgtttccgttctcatcatagaggaatccctgtcttaccacatgttcactctgtccgctgctctccgcctctttttccggagcgcttttcttcaggattccgtcccgggcggacatttcacggataaattccggatctgttccacagcagccaccgagaatgtcagcaccgagctcctgaagctccttcatcttctccgcaaaatataccggagtgttgccaaactgaagtttatttctcgtcaaagtcggatatcccgcattcgggatcgccagcaggaatttatcccccggacgtcccgctttttccaggatttggcgcatatgagccggtcccacgccgcagtttaagcccaccgcatcgatctccggaacagccgccgcgtccgccaaaaggcgcttcgcgctgagtcctgacgcgctgtagccgaactggttcacggaaaaagagactgcgatgaacatgtcatactcggcacggatctttttgatcgccggaaggatcccgtcgaggtctgcaaacgtctcgaagtccaggactttgactcctgtctccgcaaacgtctttgcgatctgataatactcgtctgccgctgccgctgcgtcctccgtcccattcaccgggatcggaccgatatcgcctgcaatccagacgttcttcccgtccgccgcgctccttgcgatctccaccgccgcgcggatgttcttctcaacttccggaaagcgctcctgcagcgtctctgtgttcgccgcaaaagtattcgtccggataaaatttgctccggcattcagatattcctcgtggatcttctttactttctccgggtccgagagattcgcaagctccgggatctcctgcgtctggtattttgctgcaaagtaagtaccgaacgcgccgtcggtgatgaggttggtttctttcagatattcacgtaaattcatgctcgtcctcctggggtaaaaaaagaatgggccttggcacattctcgcgccgagcgcggtcgcttacgacgatcttcatcttcgcgcgagtgcgcatcttaggcacgcagtgcctttttgtttaacaggaaattccgacggaatttcctgttaaacaaaaaatcggacctctaaatccagaggtccgacgcttcaaaaagcgggtgatgggaatcgaacccacgtatccagcttggaaggctggtgttctaccattgaactacacccgcatataaacaatgagaggcagctgctgatatgaggaaaatttcgttgggagcttgctcacataagaaatttttctcatatcagcagctatcgccgttgcaaacggcgattatggagcgcagctccataatacctcggagccaccctaatcatcgtcccattcccttgaccttctcatctcttcaggtctttgctaccaaaatgggcggaggtggattcgaaccaccgaagcaagttgcagcagatttacagtctgtcccctttggccactcgggaatccgcccatatcattctgacaagtcaaaatgataccatacatcgattcaaaaatcaagcattttttatgaccaaatgcccttgaaaacactgcgtattacagtcccggcacacgcaccatgatcgccatctgctcgcctttactcccaataaagatcatcgccccattcgccgcgatctccacttccatcacaccgtccgtcaccggataccgcacagtgcccgcgttgtaccgctccgcatccgtcgccatcacgcggtccataaaatcgccgttcacttccgcttcccacaccggaatccggattctctgggaataatcctcactgttcacaacgacaactccctggccgtccgcatcaaaacgtccatacgcgatcacaccattctccgccagcagcggctttaacgccccgcgtcggaacgccggagtcctgttccggatccccgtgagataccggtgaaattccgtgagttccaggtcttcctttccccaggggaatgttctccggttatccgggtccgtccagccaaagacgccagcctcatcaccgtaatagatcgtcggtgcccccggccatgtcatctggatcaccgcgccggagcggaaggttccgtaattcacgccgatctccgctttctccgcgtcctccggcttataaagccgtcccacaacgcggttcgtcctcgtgaggaatcgcgaatggtcatggtttgaaagttcattcatcgccgcatagagagatcccgtctgcatccggctcatgttggagagcatggagcacatgaacgcctgactgttgtgcagaaggtggtcatccttctgctcgctgtgcttttccagaccggtcaggaaccaggataccggttccatgaacgcgtcataattcatcaccgtatcccactggtccccggaaagccatgacgtggcatccccgtaatgttccgccaggatcagcgcgtccggattcgcctcctttacgaccttccggaaatctctccagaaccggtggttcatctccggagaatgaccgagatccgccgccacatcgagacgccagccatcgatcgagtacggcggggaaagccaccgtttcgcgatatcgagcacatactgatacagcttttccgatccctcataatttaatttcggcagcgtgttatgtccccaccagccttcgtaggagtcattgtccggccagccgttcgcatccttaaacagaaagaaatcccggtacggactgtccgctgagaggtatgcacccggctcatacccgccgtccttctcatagatcttctcccggtccatccacttattgaaagacccgcagtgattaaaaactccgtccaggatgatccgcatgccccgcttgtggacttcctgcacaaaacgggcaaaaaacgcatcactcgccgccaggttctcccggtcggaggtccgcacggaataccgcttcgcattgcggttatccgacgcatccgccgccacaagttccccttcatccttcacgatcaccccgtaatgaggatcgatatgttcataatcctggcagtcatacttgtgattcgacggggacacaaacaccgggctcaggtagagcacttccaccttcaggctctgcaaatagtcgagtttgtcccagattccctggatgtcgccgccgtaaaaccggtccacatcaaggacggaaagccgctcattccatttttccaccttcgccaccggaaatccgatgtagacatattcgtctcccaggacatcgttcgtcggatccccgttattgaaccggtccacgaagatctggtacattagggcgcctttcgcccactccggtacatggaatccaggtgtgatcacaaacggagcgtccatccctcccggctccgacacaccgaggcggttatagtgacagacttcgtctccttttacaacctcaaaatcatatatcaacggggtctcccccagttggatcgttctctcataaaaatcaaatcttccggccgtctccgccttctcaagctccagccgcctgcactcattcctgtttccgccatcacggatcaccgcgtatacatggtccacgtccccggccccggtccggaatcttatcttaacattctccccgcactccggctcttccgggatgcggtactctctcgttccatcgctgaaaagtgccgccttcaacattttgaatggcctccttgttggtctgatgcagcctctcttgcgatatccgggctgcattttctgtatctgttctcactcatttctcacaaatgttattatacaggattatatccccatttgcacgttttttctgaaagttcactccggcgatcctcaaaaactgtttttgcagatgaaaaaatctgaagctcccgcacggcacagcaggatcctcagatttttctttaaaaatgggcagaaagaaagccagcggggggaacctctggctttcttccggaaaaggtattatgtctcttatggggtatagcaaaaactatataatgtattggggggttacgagtagtaatatagcataggagtccggataagtgtgcacaaacatttaaaaacatgaaaaatttttttgttcatattgccaccgccccggttttctttgtgcatttttgtcattgtaagtaaaaaatcgacgtttgcctgcatttcttttacacaaacgtcgatttacttaagtttctaaagttttctgttgtgagatcttctgccggggtgcaaatccgaaaccttactctaactccggcttctccgttccctctgcaaacaggctgtcaaactcttcctgcccgatcttttccttctcgatcagaagagcggcacacttatgaaggatgtcctcatgtgccaggatgatctccttcgccttcgcatagcactcatcgatgatcctcttgacctcgctgtcgatatcggaagcaacacgctcaccgtaagatctcgtatgcgccagatctcttccgatgaagacttcgtcatcgtcgctgccgtagttgatcattccgagcttctcagacattccgtactgggtcaccatcgcgcgggcgatcgcagatgcctgcttgatatcctgggatgcccccgtcgtcacgtctccgaagatgatctcctccgcgatccggccgccaagagaaaccataatggtctccagcatcttattctttgtgttgaacatctcgtccttctcaggaagcggcatcgtatatcctgccgcgcccattccggtcgggatgatggagatcgtgtggaccggtccgacatccgggagttcatggaacaggattgcatgacctgtctcatggtaagctgtgatcttcttttctttctcggagatcaccttgctcttcttctccgcgccgatcccgactttgacgaacgcctgctcgatatcagcctggagaatatagcggcgcgcctgctttgccgcaaggatcgcagcctcgtttaagaggttttccagatctgctccggtaaatccggccgtcgtctgtgctactttctctaagttcacatcgtctcccagcggtttttccttcgagtggacctttaagatctcctcgcgtccgcggatatccggttttccgactccgactttccggtcgaaacggcccggacgcaggatcgctggatccaggatgtccacgcggtttgtcgctgccatcacgataattccttcattgactccgaaaccatccatctcaacgaggagctggtttaacgtctgctcacgctcgtcatgtccgccgcccataccggtaccgcggcgtctcgcaacggcatcgatctcatcgataaagacgatacacggagcgtttttcttcgcatcctcaaaaagatcgcggacacgggaagcgccgacaccgacgaacatctcgacgaaatcagatccggagatcgaaaagaacggaactcccgcctcaccggcaaccgccttcgcgagaagtgtcttaccggttcccggaggtcctaccaagatcacgcccttcgggatcctggcaccgacatccgtatatttcttcggatttttcaggaaatcaacgatctcttccagttcttccttctcctcctcgagtcctgcgaccttggagaagttcacggaattcgtccggctcatcttcgcgcggctctttccaaaattcatcatcttggagtttccgccgccgcccccgccgactctcgcgttcatgaacataaacatgaacatgatcacaacggcgctcaaagcgaccgggataatgacagacatcaggtagttctcctgcgggacattctcaacgacgtagtcgatggaattgtcctggagaagtttttccgcgtccttgacatcggatactgcaaccgttgcccggtccccgctctttaagaggatatccagggtacctgtcggcggctgctggttctgattgatctccacggattcgatcgtcttattctcgacggccaccataaattcctggtgggtcatctcctggctgaataagctcccctggctcgtcaggctggacgcgaacatgatgagcgcgatcacaagcaggacaaggccaagtccgcggaactgctggttctgtttcaacttggggtgcctccttactgctgctccacaacgccgatgaacggaaggttgcggtatttctggtcataatcgaggccatagcctacaacgaactcatccgggatcgtaaagcaggtgtaatcaaccttcacctgtttcttgacacggcgctccggtttgtcgagcagtgtgcataaatggatggaattcggatttctcttgtgtaagatatcgatcaggtatgcgagagtccgtccggaatcgataatatcttcgacgatcaggacattctttccctctaacggctgatccaggtcttttacgatctttacaacgccggaagactgggttccgcttccgtagctggatacggacataaagtcaagcgttaccggaacggtcaggcgttttgcgagctcgcaggtaaagaatacgccgccctttaagatgcagatcaggtgaatttcttttccttcatagtccttattgatctggtccgcgatctctttgatccgcttgtctacttcttcttcacttaataatacacgaattttatcagccatggtcttctcctttgcaattccagatgcctgctctcccaccgccgtcttccgaccggtctcccccgtcaggcaggatcatctccgcctccaggacacgttcagtctcatctgttattttataataatcactgatccggtatccgatcacccataatatatggtctccgtccgccaggaccggaattcggtcccgctctttttccgggatcttttcatcgatcataaaccttccgagcttcttttttcctccgccggaaagtgtgaaataatccccgtttttcctgtatcgtatggataatccatcttttattttatcatagtcaaaccatttcgtatactggtttttcggaatttccagttcttttttccgttgggtgacatgaaggcggatcatggtcggaccgagctgcaggatctttctctctcccgcttccggatcgatcttctttttttctgtatccaaaagcgcttcgcaggataaagttttcagacctgccattttcacctctgtgcattccaggtcctctgcatttttcctgaatttataggccgaaatgtccccagtcttctctcttctttctttttctcccacctggcacactttccggatctccaatgtctcatacccgcggaccgcctgcagaccatacggaaggtccgcaatacagccgccgcccggaccggaaagatccatgaccagccgaatgtgacgctccgtgatgtctttcgccttcccggcggcatttaagatcattcggcggatgatgtaggtttttaagatttcgggctggggatcaaggatttcggtgcggatctctacagaatttccggttcggctcttttccttccgctcactttcccttaagacccgctccgcttccgcctcgaaatacgcatccgctttggcagcaaactccgacaccgccaggatatgttccgccgcccggctgttgatattctccgtcacccagggcaggagctcgttgcggatcttatttctcgtgtaatcattctccttatttgtggaatcttcacaccaggaatgttcccgtgatgtcaggtattcctcgatctctttccgggagacgcataataatgggcggatgatctcctctctcaccggccggattcccgagagcccgggaagtccgctcccgcggaagagatttaagagcaccgtctccgcatcatcgtcctcatgatgggcgacggcgatcttcgcacagccgtatttttccgccgtctccttcagatggcggtagcgcaggatccgcccggcttcctccgtcgacaacccgtgatccgcggcatatgatcctactttctcatgcaccacggtaagcggaacccccatccgcccgcagagtttctccacaaaccgctcatcccggtccgcctccgcgccgcggatcccgtggttcatatgaaacgcaaagacatggatcccaagttctgctgccagttcacacaaaagcagtaacaggcagacggaatccgcgccgcccgataccgccgccaggaccccgtctccccggtctgtcatatgattttttcgcataaaggcaagaaccttctgccggaaccggcctgtccccgcattcattttttcgttcatttttttctccgtttttcttttatcgcattgatcctatctcttcatcctcagctttcccggattttcaccattcatcacacgacggatccatcctgttccaacctggtctatgaagtttttcacctgcgcttttacgctcagatcagtaaacccgccttctgagggcagcttccatttccaaattcttcccgccgcgtatcacccgtagatcccgccgaccagcaccgtcatgtcatcacgcggctctccctcaaacgacaacgcaaacgtcaggatcatctccgccgtctcctgcacaccggcgtcgggcagcccgtcgaggaaatcccggaaagtctgctccttttccgcccccggcatcgcatcgagaacaccgtcgctcaccaggatgatcttatccccgtcccagagtttccgcgatatcatcaccggctccacgggattcaaaactcccgctggaaccgtctccgactccaggatctccgcctccccgccggatctccggtccggcaggagaaaggacgccgccgccccaagtttcatcatttccagaacgcccgtgtaaagattcacaagccccagatccagcgtcgccggccggtcgcccatcccgctcagcaaaagcaccgtattgatcagcttcagcgtcgatctcgcggagaatcccgtgtcgagaagctgttccgcgagctccatgacccgcccgctgtccgcccccgccgccggtccgctccccattccgtctgagaggctcaaagcaacctgccctggaagtgtgttccggaacatatagttgtcgccggagacctcttctccctctttcggggtcctcgcagctccaaacaacaaccggtaatttcctttctcgatcaggcgcaccgtggaagtttttcttgtgaccagcgtctttccgttccgcgatgggacaaactccgcgccggcagcctgtccgaacagcgccgccatgtccttcacagttacacagcgcccgtttgctgtccgcaccgtaaggaatgcttcccgtcttccgtccccatacttcaggaccagcatgtcctccaatgcgatcctgcgtttccggaatgcagaccggaccgccgggatcagcgtctccgtcacgtccgccgcctgctccatctgtccggaaaactccccgaggatccccgccatctcctcaaactgcagcataactgcatcccggctctcgaggaaccggttcttccaggcgaggttcatcgtggatcgtccaagactccggttcaattctctgagataatccgtctttttccggcaccggtccagaaactccctgggcatgtccgggtactccaacgcaccttttttttcgaatgcgcggagcaggtaatataggaaataatgttccccgtcctgttcatccaggcactcctgcttcatgccgcacctgtcgcagctcccgcagaccatggatgccgccgattccagcgccgcgatcccgtcctctctggaaagtcccggatcttcgccggaatttttcatgatctttgcgagctgccccagtgaatccgagatctccgcgagtctttccgccgcatatcccccggctccggacaactttctatgtatctcccgatctccaaacacaaaaattccctcctaacctgcgtaccctgtcacaaaagaccatccaggtctccatgaccagccaaacgacgcggaatacgccattttattatatgcaggcaggcgggaaatatttgtcggattcccgtattcagtttttaaaaatttacgacatcatctgcgctgatttgagccagacattcatccactgtcattttacagacgatgcggctcacaagtctttcagatgatccgccatgaacatcagttggattcatccgctttaaaaaggatctcatccttatttacaagtcccagtttttcttttgcgactttctcgatatactgtttcgtctggacatacacacggtactcttcgagttcggcggctcgcgcctcctccttcgccaacgtcttctcgagtgcctgttcccgcgcctggtattccagatcacgttctctcagggaagttccgccgatatggacaaccacagcaaggcttcctacgaccaccgtgatcccgatcagcgccatccggttacccagactgtttctcgatcttcttttgttccgtctgttccggttttctcccatgactcctcgcttccttcttgatcttgccttctatcctgatcaaccggtccattccgtttcctgtgcatgaacgctcacattcatgacaggcaatccattttcctgtggattttccacactcccacatgtttccgggaatgaccttttatttctacatttcagactgcctgtttcttctcttttctgaggcagtctttcttttaattttataccattttttcagctttttcaataggtggaacacattcctgctgatgattttatcataaaagatcatgccgaaaaacacgcaggcgatcacataggcacggacgatcccgctgttctcataaaacagcagaagaaaggtcatgacagccgcgcagatccagtaaaaaaagtcctcgattcccgtccagaccagcccgtgcggaacaaaaaagcggaaccatcttaacagatcatagcttgccatcagaatgcatcccagcacgaaactcatccagacaagtctcacttccatggcaagatatgtgctcactctgcgattcctccacaattaaaaatccattccgaatcggcttcgccgatgggatttttgccttccaccccatgttttattacggtcagcgcagcaagtctgcagacctcctgaatcgttactattatttaaacagtttcgcccagaagctccccccgctcttcgtgccgccgcccgccgagtacacaaggctgtccgtcctgccctcaatgtcgatctcgcccttttccaggctcagcctgttcacatggaggtctttccccttgatggtcagaagtcccatgtccgtgtccagcacgatggtattctcatcgaacgagatcacatccaggatccccgtgagattcccctgatcccggttattcaaaacgatcttatgcgccattcccggattctcttccataaagcacctcccgcatgtaaatctgccgcaagcgaccgcgcccgacgcaaaaatgcgccggcgtacattctcttttatatatatgatgggaataaaaatttatgcccacaggcagcaatctccgggatgcctttttcccggggcataaagaaaacctcacagacttatcgccgtgaggttccttattaaatatattcgaacatttccttcgtatcttccttgcggatcgtctcctgtacactcgtcacacgcaccttcacggcctttgttccgaatgcgacctcgatcacatccccgaccttcacttccgcgctggctctcgcgaccttgtcatttaacatgacacgaccgctgtcgcacgcctcgtttgccacggttctccgcttgatgatacgggatactttcagatatttgtctaaccgcataactgctccttttcgcggcgataccgccgccagaattcctgctgcccgccccgggcggacacgttttcccagaaacaataacccctccgcaacgcacgttcgcatcacagaggggattcacatgacccgtcgcgatcaggtcaaatttataagtcagttcattccgaaaacagaattaagcgtttaccatatcctttaaagccttaccagctttgaatttcgggttcttggaagctgcgattgtgatcttctcacctgtaagcgggtttcttccctctcttgcttctctctcggatacttcgaatgtaccgaaaccaactaactgtactttctcacctttaactaactctgctgcaataacatctgtgaaagccttcagtgccttctcagcatctttcttggaaagttctgcctgctcagcaactgctgcgattaattctgtcttgttcatttgttttatttcctcctaaaattcatttcaaaacctgcggacaaagcctgcccgaaggacctttgcattgcactcttacatttatatatgtttctgcattctttgtcaaggagttttgcccgattttaccgtgtttttcagcgtttttccgttcccgtacacacgtcttcccggacatgcacaggaaccgcattttgtcaatgctttccggcttttttcttcatttcccgctcctgttttttgatcgcttcccagagatctttctcatcttcgacctccgggatctcacctccgaagatcctcggatgacggcgaatcatcttctcgcagatcccatttaccacatcatccacggtgaaatttccgcactccgcctcgatctcactgtggaacatgacctggaacagtacatccccgagctcctcacagagattttccgtatccccgctatcgatcgcctccagcacctccgcgcattcctccacgagatgcttttttagcgtctcatgatcctgcgcccggtcccagggacagccatcctctgcacgcagcgtcttcatgatctgctttaaatcttcaaacgtatacatgatgatttcctcatttctttttcatttttgcgatgtataaattcaccctgtttccacatactacccataaggcacacaatatgggaaacatggtatgtgatatgcaggaggaataaacgttatgaaagctactggaattgtaagaagaatcgatgatctcggccgtgtagtcgttccaaaggaaatccggcggactctgcgtctccgggagggaactccgcttgagatctttaccgaccgtgagggagagatcattctgaaaaaatactcaccgatgatggaactgaacgcgttcgcaggtcagtacgcggacgcgatggcccagtcgaccgggcttctcgtatgcatcacggaccgggaccaggtagtcgcggcggcgggcggagcgaaaaaggactttttccagaaaccgatcagccgggcgctggagcatgtgatcgaggaacgcaccgtcatccaggcaggaaaagaggaccgaaacttcacgcctgtaaccgacgatgacggggacagcatcacagcccaggtgatcacaccgatcatctgcgaaggcgacgccatcggagccgtcattatcatgagccgggagccgcgcgcaaaattttcagatccggaactgcgcctggcggcaacagctgccggtttcctcgggcggcagatggaaagctaaggaagcgccgggatctcaaacgtcaggaatttcatcccctgataaagctttgaagcggttgtcgtgactgcgagaaccttttttcctctgcggacgaccgtatcccagaaaaaaagcggcattccggcaggaccatccccttctccggtcatcatggagacatcaatatctcccgtgagctccggctgaagatagatgtccacgcccgtcggcttctccgggaaattccggctgatatagtcatggatcaggctggtcgataattccgcacagtcgaaggtgtgtccgccgcatacagacagcgggatataagtaaaatccatctccgaagtcttcccgccatcactgatacagcggacgatctggtagacatagcttcccgcatcaagaccgagctttcggcagagaacgggatccacagagatgatcctgttctccaggagcgtgtgcggtttctgttccgctttttccggtgaagcaagccgtatcccgccgccgaaagcaatcgttctcgatgaggaagcggcggagccagcctgcgcggccgaaaaaccatccgtctcttccgaaatttccgggtcgtccctccttacaaaggtcccctttccctgtctgcggacgaggatcccgcgggcggtaagctctttgatcgcggtcgtgaccgtgatccggctcaccccgaacatccggacaagctccgcttccgatgggatccggtcacctgtcttcagacggccattccggatctcgcttataatatgatcttcgatctgtacatatttcggggtgtagagtttcttgtcatctgactccacttacttcgcctctttctttttcgagtttccataaatatacaccataatggaagcgatcgcaaccagggcgccgccaaggatcgaggtatgttttacaggttctccgagaaccactgctccgagaagaatgctgaacaggattccggaataattgtagatactgatctcggatgccggagcaaaacggtatgcgtatgtgataaatacctgtccgaaagagccgaagagactgatcagcatcaggagcaggaactggcgcagatccggcatgacaaagtttccgatcacgaacggcagggaaccgaacacgctgaatgtggaaaagtgcatgatgacggtaattccatcgacttttcctttaaaataccctaaaaacgtgtacgcaattcccgatgtgatcgcggaaaggagcgcaacgatcagcggaaacggatcagactggaagctcggacggaatacgatgaatgcgccgagcacggacaggaccagcgccgggatctggatcggggaaagcttctccttcatgaacacagctgcaagcagagtcacgaagatcggagagagcttatttaacactgtgacatcgccctgcgccgcatggctggatgcgtagaacagggtgatcagcccaaggaatccgaagaacgaacggccaaagagatacggctgatactttttcggaccataataagaaccatgtttcttccggataatgaagaaagaaacgatcaggatgaaaagattgcggacgcagatctgctccatcgtcggaatttcccggctcaagcggacaaccacctgcatggacgcaaaggaaagtgcggacaggatcataaagaggatgcccttttgtttttgtgtgatattcatgatgtcctcctgaaaatttaataaagaagttcgttccctgacacatgaaaatttttctcaattatcatgttgacatgtcaagttgtgcggcatatgcaagtatacacctgtctgtgtgatccgtcaattcctttcccctcgtggccacctgcagccggttcacgcttcttgggaatctgctttcggctgccggtttcatcgaaattcccttccgatctggaatgggaatacaaaatgagctgccgcacgttaatgcgacagccctttcacacgatcttactttttttattttacttccaccagctcgatcttaaagttcagctcttttcccgccatctcatggttcgcatcgagagtgatcatcttctcatcttttgcggtaaccgttaccgggaacggctggccgctctggtttgtaaggtataccttctggccgacttccaggtcctcagaacccgggagatttgcgatctcaagtgtgaggatcgcgttcggattcggcattccgtaagcttcctccggcatcagatggatctctttgatctcgccgacttccatatctgcgacggccgcatcaaatcctttgatcatctggcctgcaccgcatacgaactccagcggctctccacgatcgtaggaagagtcaaactgtgtaccgtcgttaaaagttcctctgtaatgggtctggcatgtctttccgacattgcgtcctgtcatcgtatccattttaagttcctccaatattctctgtgagtaactttccagcgccttcacgatttcccggcaaaactatcttccggattcgctgcatagatctgctgaatcattatctccatgatctttaatctcattcagtatacccggtaaagagaatattagcaaccggttttccgcgtcttctcacatcctgaaaattccgttctcacaaaatccatggctttgatccaggctgtcggatcttccagctgcagattaccgcccatcaagatccgttcagccctgtctgttctttttcttttccagttctttctccttctgccgctcctcttccagtcccggagaccacagcggctcctcattctcatcgaacacgatctccatcacatcctcaacgcggcagtccaggatcctgcacaaagtttctacggtatgagttgaaatatataaatttttccgcagtctgttcaactgaccgttgctgatcccgtatgtcttgatcaggcggtactggctgaccccttttctctgcattgtctcccataatctcgtatatttgaccatactgtttcctcctttgtatcattgagcaccgtcgttgtctgcaattcctgtcaacatccgaaagaatccggcttttttccttatattttcacaaatttccgacaatatcttctattctctactatagcggctctttcgccgcattatataaggaaaggaggcattcctcatgatcgattacagtccactctggaacaccttaagatcaaagcacatcagccagtatcgcctggtccgcagctatcatttcagctccggccagcttcagcggatccggaagaatgagcatatctccactcatactctggaaactctgtgcaggatcttaaactgcagtgtcgcagacatcgtacgcatctcattttgagcccggcgagaaagaagtttaaaaacggctggtctttatcggaatcattttccggtaaagatcagagtccgtgaacctgtttttcgctcttttcgtcctcgaaggaaacttccattacatcctcgatcctgcagtctaagatcctgcagagcgtctccagcgtatgtgtagagacatatgtattctttttcagacggctcatctgaccggagcttaagccaaactccttgatcagccggtactgactgatctttctcttttccatggtctcccacaggcgattgtaacttaccattctctcctccgcacacggcaatccggcacacgtttcagccgaacagatacaggccgaacaaacacttttcctgatatcatctatataccatacattgacactatttgtatattgtccataattggactatatatttaccacacttggacaagccagcattatcaaaacggccggccagccattcctgactgaccggcaaccatactcactgatcacataattgcaggcaccgcacctgccgctttttcattttccctgttattttaattgcccgcacaccggcagccaggctcaccttccgtccggctctccttttcggcttccttctccatctgaagcacctgacattccagctgcagtttctcccggttccagcggtagatcgtcgactgctccgccgaacagttccgctctcctctcaccgtctcgatgatcgcctcccgcgcatagtgcttatgcgggagcataatatcaggaagattcaggtggatgcgtccgcatatcttgcatttgtaccggcgcagaacaaacatctgtaccgtcccgtcggacaggatcagctttcttcttttactgtcccggaccgtcatagctccaccacaatgcgggcattctggagcgctcgatggaataatataatacattccattacgctcaattttcgtgtacttgtttgatacgatcatatgtattcctcctccattcgttgtctgtcaggaccccatcgcctttcgatttgatcaaaaacccgtatcccggtctcatggggtgttgagcccggaacagcgcccgcaaacttattgatcatgtcataagatcccgttatcccgcctcacgaaaagccgctgcccgacgccgttttccgcatatatccgacgccagctcccgcccttcccgacaggatccgttttctcttaacatgttccattaatataaacgtaagaaaatcgaaaatgtgacaggaaaaatgaaaaaagttgaattttttttgaccaggaagagattcttgcttacggggttgcattttgcaagaaacggtgtaatgtaattgttgagaagctgaacagataaactaaaaaaagtgccaagtcaaaagttatcctttacgactcgacactttttattttctttactccaccgtcacactcttcgccagattcctaggcttatccacatccagtccctttgcgacagatacatagtatcccagcagctgcagcgggatcaccgccagactcgccgcaaataacggctctgtcttcggaatatagatcacaaaatcagcactgtcctcgatgctgtagtttccatacgtcgtgagcgacatcaggtacgccccgcggctcttgcactcgaccatgttgctgaccgtcttctcatagagattctgctgcgtcagaacgccgatcacaagcgttcccggctcgatcaggctgatcgtcccgtgtttcagctccccggccgcatacgcctcagagtggatgtaactgatctccttcatctttaagctgccttccatgctgaccgcatagtcaagcccgcgcccgataaagaacatatcctgcgcattcatctgctttgcggcaaaccactggatccgctccttgtcctcgagaagcttttcgatcttctccgggattgtctgcagctctgcaagaagctctgccgtccggtcctcatcgatcacaccgcggacacgtgcaaactctgttgcaagaagatacgaggcgatcagctgtgtgctgtacgccttcgtcgtcgcaaccgcgatttccggacctgcaagtgtatagaagacatgatctgcctcacgcgcgatcgtggaaccgaccacgttgacgatcgccaacgtcttcacaccatgcgccttcgcctcacgcagcgccgcaagactgtccgccgtctccccggactggctcacgatgatcaccagggaattcggtgcaaacaagagtctccgataccggaattccgaagcgagctccacacggaccgggatctgcgccagctcctcgatcacatactgcgccgcaacgccgacatggtacgccgatccgcacgccacgatatagatctgtccgagtttcgcgatctcctcctctgaaagcccgactccgctcaagtcgatctttccgtccttcacaacagaattgatcgtatcacggatcgccttcggctgctcatggatctccttgatcatgaaatgctcatagccggctttctccgccgcctcggcatcccactggatctccaccagatctttttcgatctcgtccccgtcaaggttatagaaggtcactttccccttctggagacggcacatctccatatttccgatataataaacactttttgtatactttaagatcgccggaacatccgaagcgacaaacgactcgccgtccgccacaccgatgatcatcgggctgtcctttctcgccgcgtagatctcctccggataatccttgaacatgaccgccagcgcgtaggaaccgcggatccgcaccatcgcgtggttgatcgcatccaccggcgtatgctcatatttcttataatagtagtcgatcagcttgatcgcaacctctgtatccgtatcggaataaaacgtatatcccttattctgaagcttttcccggagttcctggtaattctcgataattccgttatgaacgccgacgacgttccggtcatcactgcaatgcgggtgcgcattcagctcactcggctccccgtgcgtcgcccagcgcgtatgaccgatcccgcaggttccctgcatcgctattccatcattcgtcttctctgcgagaacgcggagacggcctttcgccttgacgatctccacatccttctccccgtcacgtactgcgattcccgcagagtcatatccgcgatactctaatttcgcaagtccctcaagcaggatcggggccgcctgtctatgtcctgtaaatccaacaattccacacatatgtaaatcttcctgtctttcaaatttttattccctgtccgacgacagttatcctgattatatcattttccggcggtccgtacaatagcgtctgtagttcattttttggttccgcacacaatgaaacgccctccttgctatccctcccaatcaatgataaaataaaatcacttaacaacacaggattttatattgctgttcacaggtaagaattttcagttctgattcttccgtatcttgcagtagcatagcgaaaggagatgtaacatcattgacggaacacttaaaattaccaattggaatcgattcttttgagaaaatccggaaagaaaatttttactatatcgataaaacaaaactgatcgaacagcttctgcaaaactggagcaaagtaaatctttttaccagaccgcgccgttttggaaaaactttaaatatgagtatgatcaagagtttttttgaaatcggaacagacaaaagactgtttgacggtctttatatttccagcaaaaaagaattgtgcgaagaatatatgggaaagtatcccgtcatctttctttcactgaagggtgtagagggacttacctttgaagaagcaagagactctttgtgtgagctgattacaagtgaggtaaggcggttcaaacttttattaaatagtgccctgctggataacgatgaaaaaaatctatatcatgaattggtttctctccaggatagtctgaagtctgaacttggaacgaaattaaaattttcattaaaaaaattatcagagcttttgtatcagcattatgggaaaaaggttattattctgatcgatgagtatgatgtgccgctcgataaggcatttcaacatggctattacaaagaaatggtcccattgatccgaggactgtttggtgagacgcttaaaacgaatgagtttctgcagtttgcggttctgacaggatgccttcgggtgtcaaaagagagtatctttacaggactgaataattttaagatctatgcagtcgatgatgttcggtatgatgaagaatttggatttacaaaccaggaagtagcaaaactgttgtcggactatagcttacaagatcattttcaagaggcccgggaatggtatgatggatatcgtttcggaaatgtaggaatttactgcccgtgggatgtgatcaattatgtatttgatctgatcgataatcctaaggcacagccgaaatcctattggatcaacagcagtggaaatgatcttgtaaaacgttttattgataaagctgatgcaactaccagagatgaaattgaacagctgatcgcagaaaagacggtcgagaagagaatccgtctagatctgacttatgatgaaatcgataacagtattgacaatatatggagtgtactttttacaaccggatacctcacacaggttggatgtgtaggggatcatatatatcagttggtcattccgaataaagaagtccgtgaggtatttgtcctccagattagggaatggtttgactgtgtgattgaaagtaaccaggcatccacagagaagatcaatcgcggatttcttgaaggaaaaacagatgacatccaaaaagaattaacgctgttccttggtgaaacgatcagtattcttgatacaaaatcaagaaatgaggaaaaggaaattttctatcatggcatccttctcggcatcctgaaaaatcatgccgggtgggcagttaaatcgaacaaagaatccggcgatggattcgcggatatcttgatcaagcctaaagatccggacgccgggatcatcatagaattgaaatatgcccgcacatttgatgagcttgattgggcatgtgaacgggcgcttcaacagatccgggatcggagatatgatgaagagcttcgagcagatgggcggagagagattcttgcgtatgggattgcgttttgtaagaagaggtgccgggttgtggttgagtggcagtagattgcagaatcatttgaccggttcatgtgcctcatactggccgccgaatatatcccgatttttccaccaaatacggcacaggcatttatctgcaccaacttcgttttcgtgttgtttcaggtacgcaaacaaggcatccaccaacggtttgatggtcgcctgacgtcgggcaagtcgttcttcagagggcaggtcttttaatttcccttctttccggtagatcgcctgcgcgcatgggcccagcagccggcaatcgtcaggtcttcccgctctttttcaagagtgtggtaaacctggtagccatccgttacacagataccggacttccatggagcaggctctttagatgagccgcctttaccatatgtccgtctgatctgcggcatacacgccaatatgatgttctgttcatccacttcgactttgaccggaatgaaccgatatctgcgtgtgatggcatccggaagctgcttccatcgtaagcgcttaatttctgggtaacttttcactggctattttgtagtccataatgatgataggaaatagatttttactccattccgttgatgggagatagaaattcactacacatggaggtttcattatggctgacaaacgtgccccagggcgttccctggatgaatggatgaaactggtgactgagtgcaggcagagcggtctgacggatgcggcatggtgtactgagcactggatctctcccagttctttttacaatgcggttacgcgtcttcgtaaaagagcctgccagataccggatccagttggaaaagccaatacccttgactttacatttcataaacaggatgtggtccagatcgctatagaaccggagaattctctggaagaactgcttccccatgcaggaaccggttccatgtatcttgacaattcacatacgatcgaaattgaagcaaaagggctgctgatccgcatgaacaacaatgtccagccggttcttttaaaggtcctgatgaatgcactaaaggagtcgctatgttagcagatgtttccagtatcgatgcgatctatatcgtctgcgggcggactgatatgcgtaagtccatcgatggattgtgtgccatcatctaggaccagttttctatggagatcgatcatgcactgtttcttttctgtggtcgtaaatgcgacaggatcagagcaatcttaaaagaaccggacggcattgtcatgatctacaaaaggctgactgcccagggctcctaccgatggccgagaaataaatcagaggtacggaatcttacatggcgtgagttcgattggttgatgtcaggcattgatatcgaacagcccaaagccataaaaaccacatgatcttcaccaaaaaagatgcataaaaaagtccctgttttccttgcattttcagcaatgaaatcaccagaaataacaaagttgatcatgcagtagtttatggcgaattcctgaagcgctttcgagaatgtcagaatctctcctatttttgtcaaaggatatcacaaacaagcacattgaaaacgtcaaatctaaattccatctttcccggtcataggaatttgaatacgcggaaaaatgtttgccgttgtccgcatcccaaattcatgatattgtaatagcagaacttaatcaggcaggtgaaagaatggatctccctaaaaagcaaaatcgtcaaaaaaatagcattcgttttcaaatgccggatcttcctccggaaatgtggtgcgactttcgggtcgatcttgcagaaaagcatatgactttaacagaactggctgcaaaatacagctgcgatccacgaaccgtccgggcctgtatccaatgcaacaaatcaagttccgaacttgggaaacaatctgtcccaaccaaaattcagatttatgaaccacatattcggaatctcctgctcaatatgaaaacagttcctgatgatatatgcaccatatacagcttaagccgttatctatatccattattacagcagcagggctataccggaagtgaacgaactctgcgaaatcatctttcaagtcagccttatatcaaagcttttcttgaaaaaattcaagtcgaacgttcgtgagacttagcgcgtgattctggtcagcaaagctgacatattccatacagaatcactgcgcatcctcgcggagcgtttctctcagtcggagacctaactccctctgaggcaaatttgctatgactcaccacctaaagagatgagaatcttctcgactgagataaatattttgaacatggcacacaaaaaaatttctgtgtggaaaaggaggctctatgttacggatcaaagacaccaaaaatatgatcggcatcacaatacacggggattatgaggatctgaacgcgcttcacagtgcgctcagcgattaccttcgtttctacttcgcacatcaggatgatgtcgaatcctcttcctgttacgaaaatattctcgggctctgctacgatatccgccatgcctatcagggagatcgaaatattgaagccgtcgataataactacgaaaatatagggcagctggcatcctgcatcttttccgttgacagtcagtcccttcagaaagaacgcaataaatataagtccggaaacctctattttaatgtcgaagtcctctatccctgggctatcttttatctgtacactctgcagtcaatcgtcgaagaccattatcatgcctcctggtttgacgatgaagatttttataatgagtatctggccgagaaagatctggcgctgatcactcattttgtccagcttctttgggataaattgagaaatcatctccccgaggaggttatgaaggtagtctggacctacaccagaacctacaatcatatcgaatactatttcttctatcctgatctatatatggaatggctctgtacatactggatcaatggcgtaaaaacacgatcagaacggcaggaactgctttctctgctttgtctggagctttcctctatcctcgatgaagacccggatgaagcatgggagaccatacaaaaagcagatctgataaaagaaaaagcccccggcagagccaagggcatacagtcctctgggaaaacagatttcaacactccggaatcagcggacaaagcagcagccttcgaaaggaatatcctgacgttccaggcggatatcgccaatacgatcctcaccgggctggatcaatatgatacgtatgccaaaattttctacaatcgtcctgtcccatttcaaagtatggatgaatttctgaatattacttacgattatatcgatacgcatggaccgtttactgaagaaagctatgagaaatggctggacgcacagctcggagaagtggattgggatcggctggagtggtagtcgaaatgtacaaaaatctgaccgatagggcagaaagatcctgctttatcggtcaaattgccctcctcccctccgttaacacttattatttcttccatcaggcatttttcataatctctacatcaaatttcatactactcaaacgtaatctcttcctccgccttcgtatacacatcaacttgattctgcacatccagcctgcttactagccagtttctcgccatgcagagcttaataaaatcatcgatccggttaacaccattcatttccttcaatgtgacaacaacaccaaactgaagcggagtttttttcctatttactgtccgctcttttgtttttatgctgagtccccacaagcccgaatcatatgcttttcttggaactgcacgctctttgatttcttcgctgatatgcttgacgttgtcccacttacgatacatttttcttgcatcttcctcatacagtatgaccaggccgtcttccgactgtttattattatcaattgatttaatcattgcttttttactcttattgaccgtgatccttccgaaatgaatatccatctccgtgctggtataatcgacaccctgatttcgattgcactgtggaaaatagactaacgtagctttcgcataataaggatgcgcattattaataacagggaccggaagattatatgtataggtctcatattcttccgaggtacctgttataataaaccgtatctcatcatttgatgagtgcagaatatcgctgatatgtttcggtaccacgccatatcccattctatgagaaatatcatcctttcggtcccattttgcggccgagtcaatcagcagtgctttcgcaacctctctgtttaatcccatgatctgaattagatatgcaagctttctcgcgatccatggagccgcaaatgaggttcctttcacataagcagctccacaattatcatggcagactgctattttctcatcaatccgggttccatccccaccataatagctcaaatccggtttattaaaaaatgacaacaccggacccgttcttgtatacgatgcagatctttccttaaagtcaaccgcatttactacaagagaatttagagaatccgccggagaaccaatccgcatatcttttttgtccgagtctttcgggatatttgttcctgcgacaacaaagatcacatcatattcactttgaatccgatcaagttctgctgcctccggcgagataaagttcggattgatttctaattttgatcccagcgacagattccaaactttgatatcccggttgttcgcaacaatatctctcaacaatttcaataccgcaaacgagctgaatccactatgtgtcgctacgccaaagtgccgaaccctgaatcttccacatccatcttcaagctccggatttgcatgaggtccatctacaataatatagctgactgctgtaccatgtttataatcctcgtctgataatggaatattcctatccagcatattcttataatcgacccagtctttaaaatatactttctcattgaaatgggtatcaattactccaattaccggttcattcaacggcttcggaatcaattcctcttcctcatcccatttctcaatttcatctgtaatatcatcgcgattgatttccgcaaaatctgtcagactcattgcgacaagatacgacgcgttgttgtaaagaagttttgcctcatcgggtcttaaccggagtgttgtcccatcaataattctatcatccacgatttgtattccgaattttgacaataatttctttgtctcaaccccagtctggtaaatcgtaataattgaattctgtgttatatcattctcggcacggtcgatttcaaaagattccacataattgccatcaacgatcaccttcaaaaatgtggatttcgctattagcgtctctccataatactcgccactatccgcaattttttcacaggcttcgcttgtcaacgttccagcataaaattcgtcaacaactgctgctgtcttttgcagaagctcgattgatttcttaagtgtgtctaaccggacaaaatgagtaaatacatgcttttgaaccgtctttccactcgcatcctcgtcccacacaaatttcgcgccgcgaatcgattctgacggactcttgcttccctccgccagaatcaccttaagacggttgctcttcgctacaatatgtttataatgtacgctgactaacgccccgccaatatccgtgttgatctgccagtacatcaaaattctggtcagctgttccgccagttcaaccagatgcgacgattctacagctttgcctttcggaagtttcggcggtcccggcttggaattatttggtcgttgttcaaaccttccttttaattgaagaatattattcactcactgcctcctttaactctctcgccacactgctctttgattttccagaaagaatctcaatctcccttaccgtgaatttctgaacctgcaatttctttaggtcttccggtttctcattgcagacagcataatacagtcttctgaagtagtccattccatcctgtggattgctgaacgctacagctgttctgatcagatttttcagatcccctggatacattttttccggcataagcttcataatttttctgaaaagcctaatatccctgtttgccagtttcagcttatccagatatcggtcaagcatcctctccgcaatcaagagaagatcttcctctgtatatcgattaaaatctataactgaatcaaaccgccttaccaatgccttatcaaaatattcaaagagatttgttgtcgctaccaagacaatattctcattcagtctgtcaaatcccttcagaagtgccgaagtcgctcttcccatctcacgcaggtcattagagttcgttctgtccagcgccaaagcatcgatttcatcaaacaggacaatcacctttttcggctggacaaaactattgatctccttaaataatgccgccaggtttttctgtgtctgtcccaacttactgtcaataatagcagaaaaatccaccataaaaatttctctatccagaattctcgccagctgtttcaccgcctctgtctttcccgttcccggcattccctgaaaaagaaacttattgattccaatattgcggtcgattgcattgaccacccccaacagatcgttcgtaatcgcatctggcattaaaagcatatcttccttcgcgtctatgcgttcaaaaaaggaagaaacactctccgacacctgcggtacaaatgtgttcacattggagagcagtgacataatatactccgccagctgataatcaccagataagtcgaagtccttagcgatctcataagcctcattccgaaaaccagcatcatttttttccgcgtaatattttattaggttaattatatttttctttttcataatatcccacagcctttcatgtactgtcctaagtatcatggtaacatcatgggacacttttgtcaatattgggacaatatcactctttaatattttgtatggattgcttgccacacatgcaccacaattttcatgtccatcttgacttgtcgtatatattgtggtattctcatttcgccatatatatattgtgctttatttttctatttaaagaatcagagtattacattgggaagaggtcttatgtttgtcaatatataacctctttctaaaaatcgttacacattctctactaattcgtgtaaaatcaatatagttctaaatatttgaggtgatatacatatgagatattcctattctgatgttgataagaaaaatcatgaatggtttcaaaatgacataaatagtaaaagtctcaaaacaattcaaatggatcgcggacaaattcgtggccttcacccctgcaaaattaatttcacatatccaatttccgcaattgcaggggaaaatggttctggcaagtcaactttattagccttagcctgctgtgcttatcacaatgtttcttatggctacattccgatcgaccgtaacaaaccttattatacctttagcgatttttttgttcaaacaattgacgaaatgaaagtagatggtattctcattttgtatgaatttctggcaaaatggaaaggcggcttagaaggtcccggatggcaatatcggataaaaaaacggggaggaaaatggaataaatacgaccatcgtgtacgccgaaatgtcatcttcctcggtattcaaagaatcgttccgcccggagaacgtaaaactgaacgttcttattctggtaagttcaaatcctctgctctcaatcaagacaccaaaaatagaatactggatatcgcaagtaaagttttaggcaaaaaatatacaactttggatctgagaactgttgacaaacgccgcttatttgtagtagaccgcaaagaaaaacactattctggttttaatatgggtgccggtgaaaacgctgtttttagtttgctaattgaacttttctctgcgggtaaaaacaccttattagttattgacgaaatcgaacttggtctacacgaaagtgcgcaaaagcgcttaattcaagaactaaaagaattgtgtttggaactgcattgtcaaatcatctgttccactcattccagtactattcttgactgtttacctcccgaaggtcgattctacttggaagcaacagatggaaaaacaaatattttctctaacatttcatccggatacgctacagggaaattaagtgacggcgcaaaaaaggagttatctgtttatacagaagacgaggttggcgccagtgtcttgcagggtttactctccaatccaattttaagacgtattaaaattatacctatcggttctgaccaagccatattaagacaactggcagctgcttatcgagttggaaaccatgcatgtattgctttctgtgatggcgataagcaccaaaattatgaaaaggctgtttctcaagtcaaaaatcacttagaaggacgtgtaaatcccgattataatgaatggattcaattgcggcttaattatttgcccggagactcccgaccagaaaaatttttactcgatcttttaaaagctcataaagaattgcaacttgaactgagcaatctctggcaaatagactttaaactggaagatacaatcgatcaagcactctacgctggaaagcataacgaatttcattatttttcaaaacagctcaatcttaatgaagaccaagtacgaatggatgttattcgaattatccgaaaagctattcctgacagtatacgttccttagaatcagaaatcctcacaattcttggctgctaaattaggaatcatgtaaccgctccataggtttacttatattgacgtacatagccattagaattcacaaacaaagcaggtaggaaacggaccggattagctacccggtccgtcctcaaaaattaataccgtacagcaagactaattcatattctcattgcccttaatattgttatatatttttccacatatctacttttatttcccaatccaactcattaaagctttacctcttcatccaaaatccatctccaacagctctcccgccatttccgcattcctaatccgcatcagattatcatcttccctttccctggaaagcaaattcatacttccataccagacgacctctcgatcaatgatcgcataatgttcatgcatctgctgccttatttctactaacaccccgttattcttcatcgtctgtatcaattgtgtcgtagcctttatgcgctctttcgggtacttttccgggctcaaagtcagcacgatcacttttgtgcctctttcctgcacatttctccagatgtctgtcatagtctcaatcttatttttatttattccaggactggaaattatgatctctttgttcgcactctcgaggtcctttttatatacctcaatgtatgattcaaaatcatagatcgtattaacctgctgtattcctgctgtcgatggcacacaaatatcatagcccattttccgatatgtcttcatccgcttatgatacatcctctccaattgcggaatatgcatatccacgtaatcgtaaataatgacatctttctttgtatcataatcacggtgcagacgtcctgaatactgttctacatttccttcaaaagaaattggcatcgccagcatcatagtatccagtctcggatagttaaaaccctcaccgatatattgccctgtcgccacaagaatcacagattcatccgcgggaactcttttcatctgttcacgaatttcatcccgttccttaagcttttttccgccctccagaagaaagatatgatctaccagactctctaatctcttatataaatattctgcatgaactctgcttttcgtaataacaagcggtgttctcttctgctccagacactgtttcacatcatctataatctgattatttctgatttcactgccgataataagcttatttgcctcattcatgggcattttcttaatctccgggctgatcagacgcgtgaatcttggataaacaaaatgttcaattccctgtttcttcgcccggtcttttgcggtatatttataacgaattggtccaaactgcataaatatcttctgttcctgcccatcatccctcttcggtgtagcagtaagcccgtagacatatttggcattcacttcgtttaaaacttcctgtgcgatctgtgccgctgcatgatgacactcatccatgataaccattccatactgtttcacgatttcattgatcttatcttcccgacctaacgacgagatcattgcaacatccagaattccattcattgagtcatgtgcggatgtttttcttccaatcacgctttttcgtttctttaatcttcctgtcggtgtccgatattccggcaatggttcatcgatacataaaaacttttcaaagtcttccacccagtttttcatgatctccgtattatgtactaataccaacgtattcacttttctttcagcaacgagccatgaacctaccgccgtctttccgaacgccgttgccgccgagagaacaccctgatcatattttaaaagatgatccgccgcttcctgctgctccgggtacaacgcacctttaaaagaaatccgaatctttttcccgccttgacgctcatctttaatctctgcctgaattctcgcatttttcaacatatcctgcaatttttcataacatcctcttgggatactgatataattcccgtcctcctcactacaggaaataaatctcgggattccctgcacagaacgcccaattgcctggtttttgtaaaactccggattactgtatgctgctattcttcgaatctgattctgcattcttggttttacattcgtgatatcaacataaattcgatttgctaatataacctgcagtttcccatccaaatcttttggattgaaagtcatagttctctttttccatggtttaggaatttcttccaccgtcgatgttttctcctgcccgacccattccttaatacaattatccacaaattcttccgatagccgctggactttccccaactgcttccattggttttcaaatggtttccaatttttgtcaataaacgcgctgttccccttctttaacgcctgtccctgcagtgggagcgcaattaaatttccgagtccaccttccggcaaatgattttgagccgggatcatgcggtcatacgactgaaacgtctttaagttgacagattctgcccctttttctaaaagtgcatcaccaaattttcttgctttttctgccggaattgccttttcaaaaaagatccagatatgtgccccatgtccagatcttgaccgttctgttaacgcgcatatttggtttttctcacagatttcccgcaatgcatttacttcttctttccatgcgaggcctgtgttagctccatcatccagttgattctctttatcatggttatcaaaatcaaatatcagaaaattacaagtttcatccggcagcatcggatagataccgattacatctgagcaatcttccttatctccgcgtaaatgcatcaacaagtcatttcctgtcaaacttttatatttctgattttcacagttaccacattttatctgctttccctcgcgttttgggcataaaccatttttccaatagttccaacactgtgtgtaatatcctgtctttccggttttgggattcggctttcctgatctcttgctatagacatcagttctgcccttgaagaatgaatagaaatagttggcgtgttttggtgtgatcgtctccgggatgatgtatggcatcagattatcagcctctacactattgtccgcagactttggttctgaattttgttcaacatcatatggaatacctgcctgatctaagatttgctccaggtattcaattcgtttcttaagagcatcaatctcagcctctaatttttttgtttcattgcccataccgctgctcatagacttatctacactttcttttgaatgcacccttatgattttaacgctttttaccagttaaacaaataatcatccaaagattcttttaatattgctttgaccctatcgcatttacggtcgcagaaaagaaacagtgcatggtcaattcccataaaaaactgctcttggatgatggcattttaatttgtactgactcttgacaatgcaccgaatattttttgctagatccacaacaagcatacttacgttaattattaaacatctttttcctacaattgatagtaaacgctatggagcgtttaccttttgtcaacggaaaattatggaagcaaaattccttacgtaaacggtacaacgcccgtccttccaaccacacataaattttgagataatgactccaaacattacttgatagtttttcaagtcccattaagactaccaaaggaggcatcatcatgcatcaacttgttgcacaggtccgcactcaacagtggatcactatgatcagagaactgtgagccagtggactctctgtttaattctggtgtgttgaaaaagcacatcagtgagaactgcttttattaccgtcaacgccgaatcagagaaatcgatggcaatgaaattcctgagtttgttgagatgacaagggatacagtttaaatgcaccaaaaatatatacaagcaatctaaacattacaaaatatctatcatcccatcctcagagattacaactacaatactttttttattattttcaacataattaaccgccgaattatacctcgcccctctttctggcgttccctgcccagcgttgggagttgcgataatcagccctattcctgaacatttgccgtatggatcaatcataaaagctccatcaattgaactcaaacctataattaaatccttatcaacttttgtcaagtttttcttttctatagcagttcccttcttggcattgactaattccttactttccttttcagctgtctctgaaacaattaccattgttccatgtttttgatggcttgcagtttcaataacagttgcaatgtctttatcatacttatttccaaagcattttttgcatttttctaaaaataagtccttatcaaatttcttttgtggcaatctatattgaccattaatatacttcacaatatttttttgattacatgacaaatcccacatatttttcccggtaaattgaagcaaacattcttctttatatttttcataaagatccagtccaataatttcttttttggaaccagccgcaactaaacaagtattcccattagacatctctaacattttacgtatttttttcacattgtctgtagataattctacaggtttctcaaatctgaagccccccttcatatccccagtaaaaataattttccctctacagggatccccttcgtattcataattagcaatcttcgtaaaaatatgctcagatggtagttctcgccattcaaacatatcatttactgacgctgttataattgcctgactatctgaaatataatgaatagccgaaaaggtaagcccataatatatatactctaaccatttttcgaaaaaattatttatcaatgtttttaaaaaatatttatattcactatctgaatcctcatctgtgtttgtatattccaaatattgttcatactctttattatccaattgagatacaaaaatatacaaaacggtccatattcaatccaatttgacacaaatagagtattattattttttaataactctttcatcttagattgaatcatttcatatcctgatgatttaccttgtccaccactacggtgtatcgaatagagatccttattctcataataaatttcacatttttttatatttaaatcttttgacaaataatacagttgtttttcttgttcaagcttaattatcgcttcatttaatggtaaatcatctccaatttccgctctaatctcatcacactcaaaaaatatttcgttacttccattaaataaaatcccctccgtatttgatttcaacggaatcatgccaatgctaaacaactgacattttaatgtgtatccccatacctcttttataatccaacgaaattcttcgttaattacacgatgataactctttatatcctctacaaatcttcgatgttttatgtaaaactcaatattatctttctgcatttttcccttgtatgattattaggaagttacttatcacacgtttcctttcttttaatatcgtggctcaatacattcagatactgtggacttttgatttttccctgtagctctgactactcgaaggagtgtattgccactacctttatctgaattgtttatagctggatgtttccggagcaatccgagtacttattttcatcaagtctacgatgataatcgctggtggatatcacggtatcagactttagaaagagaggtgcaacctcatgatttacataggcattgacattgccaaactcaatcactttgcctcatccatatcttctaatggtgaagaactaatcaaaccgttcaaatttacaaatgacaatgatggcttccatttgctgatttccaagttagatcctctatacaaggacagcctcatcattggtcttgaatcgacggtacactacggcgacaaccttgttcgatatcttgttgctaagaattacaaagtgtgtgtgttgaaccccattaaaacttctactatgcgaaaaaaacaacattcgcaaaacgaagactgataaagtcgacacattcatcatctgcaaaactcttatgatgcaggaatctcttagtcttcttttttaattctaacatgtaactttgtggcataagtaaatacctctttcctttatgagattgattatatcttattagccactactgttacaactatagtttatcacaacaacccacatatagcttttgctgcctgcgggtcttccatcatggatcacatccacggtcgtctcgtcacactggtttacatgggctttcagctggcattgcttcatcatctcgtatacgactgataaatagcgctctgccgtccatacagtccaattggacatcgtctgcttggacagattcaatccgatcgctccaaaatccctggaaatccggtcgagtgggttgctgtttacatatttagagttgatgatcgcggcttcaagagaaggggggcgcaatgctgcctttgaataaggttgccggatgatctccacggaggaattcatcctgatgcgccccatccgttccgacatacacttttatgacatgtttctccgcgatccacctatccggttcgaaccggagttggccagaagatctcttccggcatgcttttccagttccccaaaccaaaagcttcgtttaattccggctccggtatatcatgagaaatctcttcctgcaggaaatctttcaggccttcttccctctgtcccttctttttagacttacgagatcccttttttgcgaattcgatcacctcttccatgaccagttcaggggctgtttcatcgtaattcgcttcagcctcattaaaaaaggagagctgtcccgcaatatcatccagtttttctgtctgacgatcaaaacgctgctggtttgcaagtcggatctgttctatgagggtttcatagttttgttccagcttatcgagccggtcctgaatctggaagatgacatcattttgggctgtatggtccatcttgttcagttcatccggagtgaattttttacacatgatgcccgcctttcttcctaagaaaagtatagcaaaaatctgtgataaatgccaatctggtttgcataccagtccgtcatttttacttgtccgggacatctccagatgtccggttccagtcatctggaatacagggcttttaaaattaaaagttctcttttttatcttcctacagcaagcttgacatgatctggattaaatttatttcccgaaccactcttcatttcattgagtgcatgtgatatgatttcagttaagtcattggcttttctattttccattgttgatgatttgactgttatattgacatacatcatgtttaaacttctcagttgaaaagacaatggctttttgtgttgaatggttgattctgagcgactaaaattggtctatttcaagcgactctgggtggtcgatcctcccccggcgctaacagcgacaagtctaattcataagctcatcgctcttaattatcatagaagaatcttatttacagagattttctcatagtctctttacgacgtaaattttgaattcctataatttttccaccatttgaagcccttattttcagttttttacaatctcatttaatgcatccaatagcggtacaaaatttgtaaaatctattgatgatatattttgtgcaatataagaggcaaatatctgcttactatatgacttctcaccatcttttccttttcggtcaaaatatttcccatctatttcatgtgataatacctcatccgaaaagagatcttcaatttcacattctttttgctcctttacaagaggaatggttgcgagatacagattttcatgtatattaagccataaccgataatccattccacttttattatttatatgattcaaaaaatctttcaatggtctcttagttacagtttcattgtcaaataataaaattaccgggttacttgactttaatccatattttcttaatggttcatacaaattaggatattgattattacctacatattcattgtagatattcttcatagcattagccccatcttgttggatccccaagaaaaattctaaccgcgatgtcctttttaaaaacgtgattagatactcaaatgaaccatcttccttttttcgaattaatttaggatattgaatataaaatttttgtaatgcagatcgaatatatacgggatctgtttttccttctgttacaattacaggtttcgaaggacaaaaaaaatacttataaaacaaaaattgctgatattctttttctctaccattcatacctttctgaacattttttcgctctcccccgtgtttattattatatttgtcaatttgattgataaatgataaacgtccttctatttgctgtaaactcacttcaataccattatgttcaacaattaatcccttatataaatggtcaagcatagcccgtgtttctttgtaaaattccctttttacactaatttttttatttacaactaatcctgttacttcttgtctcgaattccaaaacaaaacccgcgttttattacgatttaccttaaacccgcttttatctatcaccgcatataattcggatattagctcatccttattttccaaaaaatctcttctgttggttgagaaagttaaatcatccgcatagcgtgtatatgtcatacgatatttttgagcaatagtagccaatctccgatctaaaatcgagcatatcaaattggtaataactggagatgaaggggatccctgaggtaactttcctttatagcaagctatattggccaaacatgtggctacattggaatttagcataaaatattgatttttctgaaaatagcctttaactctaccaaaatgaaaactatcaaaaaaattttcaagatctaaatttaatatataacgcttatttctatgataactaccattggatattatatctctcttttttgtgaagccttgaataatattattcgtctctaagtaatatttttc

SEQ ID NO: 1983 - DNA, 15065 bp, Unknown
  gut microbiota DNA sequence
agttgttttgctaaattacgttgaacatatttcaacggctcctgtggtgcatttatgcatcgcatttttccatcttttttggggatttcaaatgtttgatatagattttcggtcctttttgaataaagaatgtacgttaattccttatattttattccgagaaattttgctaatagacgtttatcagttatatccttaaattccattttaataatcattcaaaggcgtgtggttgctcattaacaccattcgagaactactatattaagaagcccctccagtctgaacatagagagtggtgtacattcccaccatttttgtcaaaacttgcgaaacacaagccaaataatccaaccacacgcaatgatattatactccttccacttattctgttcaactactatagagttaataatatactttttcactttccgagaaaatcttaatcgatccgtcttggcttatttttacagcaactccattctgtgcaagtaatctcgttgctgtctccccagaaccagataatttcacaacactatatgaatcatgactcatatctgcaaatacactatcaaatattatttttccatccctatcaataataacagccccatcacttgctagaattttctctatcaaaacttgatgactttcattcattatatttaactcattattccatatcttcaccctgttatctgttgtcaatttactaatggcctctttactacaatcttttggtatccataggatagagctgatatgatttcgtgaacaccttaagatataaaataaaatcgcataactaaccttatactctatgcctaattgttccaccataaattgcgttatatttttataatgtctatatctccatacgttttcaattttcacaaattctttcccatcagagtcagaaaccgatatttcattaggtccaactgtacgcacaataaaatccggtgtcttcaaatcattcgccaaataataatcctcaaagaatctctctatatagtcagtggattttgacattgattttctatatatttttttagaattcatgtttgaatccagcaggaaaaatgtttctttaccatttgccgaaaaccactctcgcttatctagtgtatccaaatctctctgtgttcgaaattcaaagctatcttttttatatttagttaaatctgagcatacaatcactcccgttgtgaagaattctccttcaaaagttgacgaggctaactgttccattttttctattaaatgcgcatacttaattccatcatattttctggttgaaatgcaattagatataattattcgtgccaaattttctccaaaaatccaatcccctccccggaaatcttgaagatagcacattgtaatttgatctgatattgcttccgccagttttgatataaagctactagttctcaagtaaattttcacatttcttcctgctaaaacatacgggaaatatgcaattaattcattgtttactttaatttgagatacaacgcatatttcattatctttttccgaaacatccatcacctcctcgattttatcaactttaagccactcttttaatttttttagttcacaaggttgaatgcgaaccttagataagtttaatagtttttctaaaaaatcacaaaattcatgttgctcaagctgtaaaaaacggttaaaattgggtaattcagcaatacagtgtactttcggttcgcttttttcaaatttcatgataactccattctttaacatatatttctatgtacatcttttacaacaatatcaacaactaaattatgattgggggatggcatagcttccttaaataaagttttctatgcccagatatagtctcatttcttgatgattcaatatctcatatttccgctgatatacacatgttcattaggctactttctataggtaaaatgcatcgcacaatttcattagcattacaactgcaaccatttttctctattcctctattttccaaaaatgatatattggatattgtttgaaactattttgttcttcttttgataatcttgcaaaatgtatttctgcggcttgctgttgttccaataataaatatgctcctacaatacactcttctcctatggctttattttcaaccattgaatatagagtttctatttcatttatattgaaattcctatatcgtttaattgtttgcagaacattcagtgttctaatttgattatccaattcagcttgaggcgctttagaaatccaggtgctaaacgctttacacgtttctaaaatttgtttttttcttatccctttggccttatcgtatgctttcaataattcaagtaaaaattcatttgctttagaaaatgtcaaacgattatgttctatcttctgaaaagatggaagtaaaatattgaattttatattacttaatgtcaagaagtctttttcatgcaggatgctaaattgtgagacaaaaaatgtattcttatcgctatttccatcttccatagtaaccttgcaacttatatcagtatcaaaaaaatcaaacatttcatatgttccttttttctcgcacggctttaaataaactgcaaatgccatttttcctactttaatggtaataacaggtggcaagttttctttaagaccctctactggttttttatttaaaaaagctattattaaataatgaagatttctccaatccgaatcattcaaatcactaatatcaatatcatcggtacatcctaatatattaagaacccttacgatttcttttacatgtaaaagtctctctcgttctttttccttatcaaagtttgaaaaatctatatcaccacattcaagtgggatttcaatgtcattgattttaaaaaatcccttatccatatatgataaaataaaatcaagatccctctccaaaactcgaattttatttgagtctttatattcaaccgtgcaggaattgcaaatctcatcgattctcatttgaaaactctctccaatgcaaagtgtggtctcttttgcactttttgtaaccttataatttgtgtaaaagaccttatcattaatcgtaatcaatgcatccatactctgctgcatatgtatatcctgcggaataatgtcaagtggttgtagaatagtactgccctttattttagcatatagataaatctcattcttaacgagtgccatttgaggatccatctttcccacacctgaaaccggaataactacattttccaacacaccttgcgcacttaattcctttaaagtaaatagcttttcctctttaatgttagattgtctttgacagttttgtaagcagttcaaaaagattgttgtttttttattattatcagctggaaattcctttaaatagactgttttatgatcttgtccttttgcttcctccagcagttttcttaatttaactggagtaagttctacataataaattttattagtcaaaccgtggtttccaatatatacaacaaaaaggatacaaccgccgtcatagaggtaatttcttaaatctacagtcggcattttaaatgaaatagtatcttttgaatgatcatcacattcagtgcctttcacctgtactggcattcttcccttaagtttactttttgctttagatttgtctccataaatataaacaaatccatcccatgaaggttctttatcattgtctgcaataaattgggcaagaagttctgacattacaatactattttttacagcattgaccgacagtgtctctattgaattattatctaatggcattttaacactctcccatagtaaaatagtcagatggcttcactgccatccttctacacattttttatattgtattcatcgcctgcatgaacctttatttttatatcctaatcggtgaataaatcttttgatttctattccgattatatcatatttcttatattatacatcaatctatacagcagaattttcacgacctaaaatgaaaatttaaattccacttttcctaactgcggcggagtttactcttgcacagttgataaaaccagaagagcctccgcttggtttcacaaagggacttttcttaatgcgaagaacttctgtaccaatcatttccgttgtaagaaaacgaatgcctgcaataagatcctgctctgcggcgttaaatgtgcttcctgtcccacctgtaaccagacccgtccggattttcaaaaagaacgctgctgcagacttgatcgggctccctacgtctgcaatggatgcagtaaaaagatcaatcattgtacgattgcccacaaatacacctataatgtcaggttcgctgaccggaaataccgggaacgtctcaaggattccaggtccggtatcgcttaccttcttttttacaagagaaaagctgtttcttgcgttcctcatgaaccggaatacggaaagctgcaaattccagccaaacggtgcgctcattctgaaataaacggtgcatctattctgaactgcagattgcctagctaaacggacgtcagtgccatattcggcggacagtgcagaacataatcaccggacactgcgagcctaattaaacggacaagctttccagatataatagatttatctcttacaagagagaaatattatatttggaggttccactatggactacaaaaaagttttgagacttcattttgtgaatcgtctcagcatccgtgagattgccgaaagctgcggtgactgcgaaaaaacatccgttggtgaattcctgaagcgttttcgggaatgcccggaactatcgtatcctttgccgaaggatgtcacaaatgagtaccttgaaaaactgttgtataaaaagcctggtgtgacagctgaccagcttctgtatcgggatttcgatgcagaagccgtctataaggcacttgcccgtaagggtgagacacttaaacatctctggcaaaaatacaatgctgcgggcattgtggacggcagaagacctatgagctaccgccagtattgcagacgatacagtgaatgggcggattccaaacagcttaccttccatatccagcgatatccgggtgtcaatctcgaactgggctttgcaggaaaagcgctttgcattcatgaccgtcataatccggaagagacaacaaaagttaccatctttgttgccgcacttacctacagcgattacttctatgcggagggtatgactgagtgcgacataaaaaactggatccgcgtcaacaacaatgccctcgcattcttcggcggtgtaacgccaacagtcactccggataactgtaaggttgccgtgtcccgcaataaagactgggtaagccccgttgtgaacaaagacttccaggcctgggcagaacataacggtaccgtgatcacaccggcgaaggtaagatcacctcgctggaaaccaacggtagaaggacatgttaagatcattacaatgcatatcctgatggatatggaagatatgatcttctattccctggatgaattaaaccatgtcctgatagaaaagataaacgcggaaaacaaacgaccattcgagggcctttcgtactcccgttacgatctctttaacaaagaggaaaaagagagtcttctaccacttccatccaccgcctttgaataccttgaacgaaagactgtgaaagttgcccaggacttttcttttaccttcgacaaggtccattacagcatgccgcgaaaatatctccggcaggaagttgagatcagggcaggtggaaaagagatctatgtttataacaaacagggggatttcattcgcacccacaaacgcagttatactccaaaagactggggcgttattccaagtgatatgccggctgagtacaaggattatggttactggaatgttccatacttccaacataaagcctccgcgatcggtccgaatacacgcattctgatcgatgctgttattcaaaagagccagtatccggtacagtctttcagaaactgctttgggatcctgcgctgtgcggagaaatattcgccggaagcgctggaacgctgttgtaaggatgccgttctggcaggcaaatgtaactattcttatgtcagtaacacggtctccacatatcacatagaaccttcgcatcaggtagaaaagttctacaagaccagtggaaacgcatctggaacaatttctggtagatacaaagatgatgacagtaagtattccttgaagagccttatggaacgccaggaaaaggaggtatcccatcatgaataatacgaattctgatatttatgagatgttggatacgctttcccttcctgtggcagcgcaacgtttttccgaacttacgcacagtccggaactcgtgaactacactgcgttccagtttatccgggaggtccttgaacctcagtatacagagacattaaacaggcgttttgaaaccaatctgagactcagcagcttgatcaataaaggtgcgttgacagaaaatctgaagaccggaaacgggcgggtctataacgatgctacagtacagcaggtacttgaattccactttgcggagaaccgacagaatgttggcatttatggagtcacaggagccggaaaatcttatttcatttctacctgctgtgtagaagcatgccgcaggaactatcgctgtaagttcgttgattacagcgatcttctggatgaactgatcgttctgaaccgtcagaaagacctgaaccgatatcgtaaacgcattaagtactatgcgaggatacagcttctcttcatcgatgattttgcaatcagccgttattccgaggaagggatcaagatcctctaccatcttctgaagcttcgggatgatctgggaacttccacactttttagctgccaatactcacccgatgagtggggaaagcaacttagtgatgagaatgaatgctatggaaagttagacggcatccgaagacgtcttacaacaggatttacagttctgattgaaaaagcatagccaaaagcctggcgaagcagggaatccctgcttcgctggtcagtaaaaatgtccgcttaatatggccctgcatgtccggggaatatggccctgatgtccgttaaaaccggctatatgcatggaaagacggtgggtcattcagcgcttacgttgtaccgtttactttccttctgtcatttcaactctgtgaacaggtttcttttatcttgccataataaaaggccctcctaatgatatttattttatcatagaaggaccttgtgatggttattttacagaaaaagtttcacaggtgaaaatttcaaaagtaaattccaccgtccgcttgggcatgcggaatttagtcttacacaccagatatccagaggtctcttttccatgtcacaaactcagatattttatgagaagttagcttaattataccagttatctaaagattttgctcattataattcaataaaatcaaggaattttaatgtctggtggaatttaccactgcactggaatttaaaatttcaagtcagcctttttccaattgtacttaaccatcgtgggtgtgggagcaattattaaatgtcttccaagtattctcttttcagttcctctatcgtttcaaacgggaaacattccgcacagccatccgggattccttccagaagctccacgattgcctttacaagttctattccctccctgctgtgttctccgtcctcttaaccttccgtttcctacagtattttttcacacatatccagtgccgatgcaatcaccgcatccatatcataatacttatactcacctaagcgaccaccgaatacgaccttctgctcgccctctgcaagctttttgtactccgcatagagaattccattcttttcatcattaaccgggtaatacggctcatctccaggcttccattccgaactgtactcacggctgatcactgtctttggaatttcgtttccctcatcatcttttccgaactcaaaccacttgtgctcgatgatacgcgtccacggagtctccgcatccgtatagttcacagccgcgttgccctggaaattcggcttatcaagaagttcggtctcaaagcggacagaacggtactccagagcgccaagcttaaagccaaagtatgcgtcaattgcacctgtgtagatcaccttctctgccatcgcgtcatacgcttccttctccgccagataatccacgccaagcttcacctcaactccatccagcatattcgcaaccatcttcgtgtaaccacccatcggaattccctgatataacgcattaaaatagttattatcaaacgtcaggcgcaccggaagacgcttgatgataaatgccggaagctccgaacacggtctgccccactgtttttcggtatatccctttaccagcttctcatagatatccgttccgatcaggctgatcgcctgctcctcgaggttcttcggctccgcgatcccggccgccttcttctgctcctcgatcttctttgcggcctcctccggcgttacaacgccccacatcttattaaatgtatacatgttaaacggcagcgaatacagctccccatgataatttgccaccggggaattcgtaaaacggttgaactccgcaaactggttgacataattccataccttctggttgtttgtatggaaaatatgcgcaccgtatttatgtacatggatcttctcgatgtcctccgtataaacatttcccgcaatgttcggacgcttatcgattactaaaacagactttccatgtttcttcgcctcatgtgcaaacactgcgccgtaaagaccggcgcctactactaaataatcgtacatcttctctctccttcacaaaatcattgaatttttatcttacctatagccgcaagcagccatcagaacatttctactcgcttaacgcattcccagaccgatcaaaccttttcagccgacctgaaaccattatgaaaacagttcgtccttataaatgcccttcgcaatcaactcccggatcgagtccacaaccacctgcttgtcctccttataagtaacgccaaaccaccggtctcccgtctctaggaccttcacacgggctttctgttccgctaaaagcttatcgatgatcttcgggagcagatactcctttttcatggcatcctcgccaagttcgtccagaaattcagcaaatccgccctctaacagttccaaaaatctcggcggaagtccccacatgttcatcgaaacatgctgaccggcatttacggaaatcggtttcttttcatcatcgcacgccgtcagctccccatctttcatccggatctcatacgtttccgtcacgcgctgcatatatccgtccccgtctaccgtgcagacaccgcgagtcacgccgccgttctcgctcagcgtattggaaagaataaatcctgccatgcagatatcataaaccggcgcatccacgtccatttccgttgtcatatactgatacagctttacaaacgcctctttgccataatagtcatctgcattgatcacgataaacggttccttcacgatatccttcacgcaaaggaccgcctgtccggttccccacggtttcgttcttccccaggtattcttccgacctcccgggagttcatccaccgactggtatgcatactcgaccggaatcagcttctcgatccgctttccgataatctccttaaaatccttctcgatatccttgcggataataaagacaaccttattgcatcccgcttccagcgcatcatggatcgaataatccataataatctctccattcggcccaaccggttccaactgtttaattccgccgccaaaacgactgccgattccggcggccataatgacaagtgttacattcttcattttgtgatgttcctcctgatccattccttatatgcaaaggcagcctctggacataattgcccattggctgccaacttcccttatttatccttttctgtgagcattgctataatattcatcgccggtaaaacaatcggcatcatgcctggctgcgtcgttaaagtcgatacataactacgaaaatacgggaacatgattgccaaagtatttcgctcaatcaaggtccgtgttttctgctctgtctcaaatatggccatgccttttacaaacacagataatttcccttgtgggtctgccacgctcaattccagtatgattttatattctctatcagaaatctgattaacattatgagacacatttacttgcaattccacatcttccaatgaatcttcactgcgtttaaaagtcccttctgtaatcatgatattctttaacaccaacggactctcataatttgtagcaatattcataatctggttcctttcttcccctctacgcaatcataagttcctggggtgcatacatataacttgtttttatcttataagtattacagttattctgataggaaactgtcccctgatactgcggaagaagtccttttacatcttgctctacaagttctcgtatttcaccatttgtttttaacataggtttgtcatactggttgctgagttccacgccatatttgtcacataacgcataaaacaattccttgttaaacatctaaatcacctcatcttctccagtatactgtacttctatactttttatacattcttttcttgatacgcaaatttgtttctcatggtaagcaagtccaagagctttctctaactttttctgctgtaataaatcagcgccggaacgaaacgcaccatatttcgcacaatctttgctgaatgtaaacataattaccgatatatgatacattttcctgtaataatcaaaatacacagctctctgctgctctgggttaaagatcggcattctgtcacaatcatcactttcgatttctttctgcatatccaaaagccgtcccagaaacagatcgtactgcctataatcatctaaatccaaaacttcttcttttgatgcctcaatctgtgcccgatatacaatcggaaagcttccatagttatatgcttttcctgctatgtcgtttgcccaccattttgcaagtccgaaattctcataaaaatacacaccctgtcctagccagtggtttggtctctcgtgtgttttatccggatcaagcccattcttggcaatgctttctgcatgtctggaactagttccatgatatccggttattcctacatagtctgtattcatattacttttttcaatatataatcgatacgaatagttgctatccacatcatagcatactttatgtttcaccacaagttaatactttataaaagcagtggccctattgtttttcctcactcccccaaaaatactttccattcctttttttatcaaacaacgcataatactgcaccgtccggtacctctcgatccattccctgtaatcattctccgcccagagatcataccagtccccatccgcagtcatatatcccgcgaaattaaacaccgggatctgctctctctggttcatccggtaacggtcatacgcggacagctccagccccgcatacttccggaccagcgtcccgagataattcgtgctgaccacatcttctccccgggaattcttcatcgaataatcctccgggatctcataattgctccagataaaatacggcaccgtatagatcttctccgtcatcgtaagatccgtatccgtatcctctctcccggcttccctgagcgcattctcgaagtccccgttcagcgccggctgatgatccccgaagaagcagataagtaccggccggtccacctgctcaaaataggagatcagatacgagagcgcctgatccgacttcgcgatcagcgattcatacatctgaagatccgaatacccgctgtattcctcatcaacatcgacgatctcctccggcttcaactccccgatcccgtcatatccgccatgattctgcatcgtgacattaaaaataaaggtcggttccgtctgcgcctcatagacctcgatcagcttctgataatccccaaggtcagacacccggttccagaccgtccgctcacggtcctcaaacgcgctgatcgacagaaactcgtcaaacccgagcttcggatacacaacacttctgcgccagttttccggattttctgggtgcattgcgatcgtatggtagccctgctcctttaagatcgagaccatggacggcacattcgtgaaatcaaagctcgaatacggattgatcccgtttgtataggtcatcgaatcccccgtcagatattcgaactccgtcgtggatgtcccgccgccccgggttgaaacataatcccatccatactcgattatatgcggatcatccttcagcgaatagaaaaacgaaagatcatcctccgtacatgtgagcggtcccagaacactcagatcactgaacgattcattcatgatcgtaatgatcatcggctgctcgccggtatctttcttctccgtttccgcaggagcttccgccgccccgtactcatcaaaaatctgttccgcactctgctccgtatacccatccggcttactgatcttcatcctctgccagaacgagataaatgccggagcaaaaccggtcgcctgatatgtattcgcctgccaccagaaatcaacgccgatattgtaagtatccgggaaatcatagctgccaatccagaaaaacaacgccgcagctgccccgatcgctccgcagccctttatcaggatccgtttctttcccgttctcttctgaaaaatatccatctttccaagcgcccacatgcaggtaaacagaaaatacaggatcagaaacgtaaacgccagctcctccgcgacctcaaacgtatactgccctgcgaccgacatggccgtccgcagtgcaaaaatatctgttgcaaggaacggctgtccacggaacttcaggagataataattgagcgcaccgacaaaccacgcaaagatatatagcgcctgaagcccgagcatccctttctgcatcaggcacacaaacaggacttccagaatcagatagatcaggacattcagctccccgtttaaaaggctgatccccgtcaccgacggattccaacagagttcctcgaggaaaaacgcaagaaacggagtgatcgccagaaagatccagtagaacgctctcgcacactccggaaaccgccggagcacgtccgttccatagatccagatcgcagtcgccgcaaggagcatgagatccgccatccctgtactcaccggcgggaactggtttgcaatcttcgtgacgccgatcacatcacgtgagagattcacataataaaacgccaggatccccatgccgaccgccatcttgattgacatggaataaacctggttccgtttctccggtatgcaaatgaagatccacaacatccggctgcactgcgccgcgatcagcgcatacgtcaggatcagccatatcgacaggtagtggatatggaacgccaccttgatcgcgagttcacagcatagcgctgcgaatagggaacagcctagatatagtttctctttccggttcttttcctgctcctgtttctttccggttcctataaagtacataatgatcgccgctgcgatccagattatcgcttccactcttttgtatttccatcctattcctaattctaacgcatcttttcctgcattttctcatccagaccataaacagcttacaaacattacttttatgcttgtaagcaagagcaatataattatacctgaatcagctccatgattctatatctgccacatttttgcaccggattatttcaagttttgccacaaacaatctctctgctcccatccacaaattcaaaatagtcatctttccacaagacacagcaatcataccccgtacttctgtatttgatcccatcaattccaattctcttacaacacgaagccacaaaattcggaagcagataatttttcacaatttttccgatctcattttccactgtaaaacgcatatgttccataaagcggtttgttcccttgatttctcccgataaatctatcatctttgcatgttttaccggtctcaatccaactacctggatatttatggtctttccgccactatgctttcttatttccgtcatagcaccctcttttgtctccgcaacataataacagctcttcccaatcgcattatatcgtccatgagaagatacatttgttggtgctttcagcatttcctgatccaaaaacggcggctttccctcttcaagcggtctggcgtgaaaatatgtatcatgatcaaagtcaataaaacttttccacccctgaataatcccaaatatcttttttcctgtcggatgctccattgcaaatgtcacatcctcatacaactgactttcaaaagaaagcagctcgtcaagagaaatatccgcaaaaagagcctgagaactttcagcaactgtaacttgatccgcagtcagtgcacatttcggaaagtctttatgatagaattcctttttttcggatcaaacatgattttttctgtctgcgtcagcttctcagcagttctctttgtcaaagactttagtactatatggtcttaaatgctgaaaccatatcgcgaatattttgaaatcttttggatttatctgggttcaatcctctctcgacaaaagctcgtaaattctgattcgcaattttttctgtattagttttacctgtcatcacaaaataaataactctggtgagagcataagtttcgtgaactatgctataagtgttaaacccctcgacaaccagtgcaggatcattaaaataacccttgaactccgtattaaccgttgttagcgtactatcaggaatttttacaagtccaaaatccgaaagtttaactacaagggtatcgtcgtactcttttatcaaaatatttttagggcttatatcacgatgtagatgtccttttgaatggagataatcaaaagcgcgtaatatttgttgggcgattccttttcgctgtataattgttaaggtggagttatgagcagc

SEQ ID NO: 1984 - DNA, 686 bp, Unknown
  gut microbiota DNA sequence
catgtattatacattatatcattgcagataatatatggtgtacgaattttcacgcgctctttataaaagcgcttctggatttttttctatgatcactgcccgttccgtattctcgctgcgttcattccacgaatcattttgtgtttcttttcaggtcgtcacccggttttcggcatcaaaaaaacgccatactcatcaccattccggcaatgagcagacgttttatattttgtccgtattcttttgcaaaagagaaacaaatgaaatgtaagtttgtagcgcatgtcgcatctgtctatgataatattagcacaggtcaattctgaaaaaaagaggcagaatggtagcaaaaggatagtaattggtaacaaaatgggagtaatacggaaacatgctgcacattcccctatcctctcagatttaaaaaccatctatcaggctgctgatgagcagaatgctcaggctgctttagaccgtgtgacagaaaaatggagtccgaaatatccgaatttcatgaaacgctggaaggacaacagggatgctgtttctccaatttttaagttttcaaccactgtccggaaggtcatttatacaacaaatgcgatagaatcactgaactccacataccggaaactgaatcgtcagagaagcgtatttccaagtgatacagcgctgttaaaagcctt

SEQ ID NO: 1985 - DNA, 9871 bp, Unknown
  gut microbiota DNA sequence
cggctcttttgagatcatcacatccacagggatcctcacagttctctgtaagaagatggcgaaagccttccgcggccgcgagtattttgtgatccctgcatttctgctgttattttctgtttttggaacaacgatgggaatgtctgctgaggtcatgatctttgtgccgatcggaattgcccttgcggcatctctgggacttgacaaagtgacaggtaccgcaatgatcgctatgggcgccgcatccggatttacagccggaatcctgaatcccttcaatgtcggtgttgctcaggatattgcggagatcccgatgttttccggtatgggataccgcatttttattctcggagttcttctggtgatcgatacggtctacattacctggtacgcaaagcgcgtgaaagcggacccgacaaagagtatcatttacggagagcctgaggatcaggaatttactttcgatgatacagaagaagcgctgaacctgacccatggtctgactctggcagtgatcgtagccggctttgcggtcctgatctatggactcagtaagctcggatggtattttgaggagatgtctgcgatctttatcgcgatgggtgtgctctgcggtatcgtgaaccgctatagcccaaacaagatcgccgctacgttcggaaacggagcgaagggaatcgttgtgggagctctgatcgtcggtattgcccgcggtgttgagcttgcattatctgacgcgatgatccttgacaccatcgtccatgcgatcgcaagtatcgtaaacattcttccgcagtccttaaaagccatcggaatgttccttgcacagtcacttgtcaactgtgtgatcacctccggtaccggacaggccgcggttaccatgccgcttatggtaccggttgcggatctgatcggtatcacgagacagacagccgttcttgcgttccagctcggagacggattttcaaactctgttcttccgacatcctccgcgctgatgggctatctcgtcgtttcgaagatcccgtatgtaaaatggttaaaattcatgatgccgttattcctgatctggacattcttcggatgtctgttcatgcttggagcactcgtgatcggctattaaagcggaggaaagagaagatgcaggattttgaagtgaaggagcgtttaagagaacatctggagtacctttgttcgttcgacaagctctccggtgaaccggaggcgtatcgcgcggtcgagtatattcttgatgtattggaaaaatccgggatctcctgccatgaggaggattttccggcttatctgagcaatccggtgagtagtgtccttatcgcggatggtgaggagtatccatgtcgtccaaggtctttctcggagagtacaaaagaaatgatcgaggtcccactgatctacgatcccggaacaaaaacagaagtctccctttcagaacagaaacggtttatggaaacagttgccggaaagcttgtcctcgggtatggttttgatgagcgttacgcaaaattgctggagcagcatggtgcggccgggtggatccagatctggacctccgacgaggacgcggtccatgaggacacggtaagtcctgtctggggaactccggatatggactcatttctgttccagttacggatgccggtggttgccgtctcaaagccctgtggggagaaactgatccggaagctgaaaacatatgaggcagaaggaaaacagctttttgcgcagctttccagcgaagtggacacagatgtaaaaaatgtcgcgctgccgatcgccgagatcccgggaaaaagcagggattttgtcctgctctccggtcactatgatacctggtaccgtggcgcttttgacaactgcacggccaatgcactggctctggagcttgcccgttatatgaaagaacatcaggatgagcttttctattccctgcggatcgcctggtggccgggacattccaatgggcgctatatgggatccacctggtattgtgatcaccactgggatgagcttgaggagcactgcatcgctcacctgaatcttgatcttctgggatcaaaaggagcagaccatacgcttgcgatccggacagcggggcttgagggcgaggaatggctaaaagagcaggtgcggaaggtagatccggcggcggaaatgatgtttgggcgtatcgggcggggagcggaccagtcgctctggggcgcagagatcccatatcacatcaatccccgttatgaggcgaaaaaagaacgaaaacactcggatgctccgggtcccggcgtgtactggtggcatacgatcgacgatacctttgacaagatcgatcttgacgggcttttgcgggacggaagagtcgtgggcgttctgttgtatgaactcctctcgaaggagaagcttcctgccgattatagcagctatgcaaaaacctggctcccatactttgagacgttaaaaaattcagaggagcatgaacaggcggcggatgagatcgaaacacttctaaaagaggttctggatcgttgtgaaacgcttgaacatatatggggaacggagaagatcgaagaacataaccgcctttgccgtctcgtcggaggagttttcagccgtcttatgcactccacaggctccgcgtatgaacaggatacttcttttgcgtatggtccgctgcagctccttaaagcttctgcgaaggcacttctggaaaacagtcccgcggattggagcctgttctatcagacaacattcgtgagacagaggaaccggatggtgacggagcttagaaaactgctgaaagagatcgatctggaattcaggaatggatcggatcgctttggggcttcacgaaattgtgacaggagaatggagatatgaataaagaaacaataaagcaggccgttgcgttttacatggcagagcttgcagggctggcggatcagatctatgatctggcggagccggggcttgaggaagtccgctccagcgcgatccttacagattatctggaaaaaaatggatttcagatcgagcgcgggatcgcagatctcccgactgctttccgtgctgtctatgaacagggaaacggaggtccttcctttggatttctcgcagagtacgacgcactgaaagggatcggtcatgcctgcggtcatcacatgcagggaccgtctgtgatcggagcggccctggcactccgggatctctgtaaggatcagccctataagatcgtgatctacgggacaccggcggaggagacagtcggcggaaagatcattatgaaggagaaagggtgttttcaggatatcgatcttgcgctcatgatgcatgcagcccccaatacctgtgtcgatgtccgctgtatggcacttgagtgcttttacgttaccttccatggggtagaagctcatgccgccatgagcccgcacaaaggtaagagtgcctttgatgccgcgcttctttcctttcaggggatcgagtttatgagggaacatgttcttgaggattccagaatgcattacacggtccttgatgccggcggtccatcgaacatcgttccgggaacggcaaaggcagagtatacacttcgctcttatagtacggattacttagagaaggtcatcgttccgagatttcaggacatcataaagggggcgtgcctgatgacgggaacgacctgtgagatagagagaagctatccgtttcaggcaaagatcccgtgcctgaccctgaatgacctgatcatggaaaatgcaagaaaatttgaggcaccacagctcgccggaccgcgtgaaaagacgggctccacggactttggaaatgttatgtatgatgtgcccggatgctgcatccgcacagcgtttgtgccagagggtaccgcggcgcattcgcaggaatatctcgatgcgggcaagacggagcgggcccatgaagcgatccggtccggttcggagatccttgcgggaacatgcatcgacatgattgaaaggccggagcttttggaacagatcaaagaggagtttcggaagcggaaacaggaagaaaccgcaaaaatatgacaaaattgtcattttccagtcatgaacaattaaactgctgtctgtaaaatatgaatctgtaaggaacttaacaaatatccagaaaggaagatgattatgacagcagctattggttttctgatgatcatcgcgatcgtagcactgctcttaaagggcaaaatgtctccgatcgtggtacttgcggtgattccggtcattgcagccctgatcctcggcttctccccggtggaggtcatggacttcattgcggatggaatcaaaaccaccacaagcaatggtatcttatttatcttttcagtaatttattttggtgttctggcagacaccggactctttgatgttatcgtaggctggctggtaaaaaaagccggaaacaatgtaattgcggtcactgtagttacagcgctgatcgcaacgatcgctcatctggacggtactacggctgttaccgttctcattacgatcccggcgatgtacccggtatataagaagatgaacattgattcccgtatccttctctgcctgacaggtgcctgcatgggcgttatgaacctgcttccgtggggcggtccgacagcgagagcggctactgtactcgctatggatgccactgagttatggcacatgctgatcccgcttcaggttgttggcctgatgatgaacatcattcttgctgtactcctcggcatgttagccatcaagcatggtgccggcgccggaaagggcgtagaggtggagtccgatgagaaagagaagaaagaggcagctgatttaagaaaatccaacgcttacctgatcttcaacttcttacttacagtaggtgtgattgccctgttatccacaggtatcggtaaatcctatgtaatcttcatgcttggtctttgcatccttctggctgtcaactacccgaaccagaagattcaggacaagctgatcaagaagcacgctccggcagccctgatcatttccgcaacactgtttgccgcaggtgctatggtaggtgtcttcgacggaaccggtatgctggaagcaatggcaaatgcgatcatggcgatcattccggcagctcttggaaagtacgttcacatcatctttggtattctggcgcttccgcttggtctctgcgttggaacagacgcatacttctatggcatcatgccattagttatgcaggtaggcgagacctatggtgtggcttccctgaatactgccctgaccatgctgatcggtaagaaccttgcgttaatggtaagcccgttagtaccggcaacttacctcgcgatcggtctgacaggaacagagctgaaagatcatatgaaattcagcattccgccgtactacattatcagccttatcatgctggtattcggtgtgattcttggcattgttgccatctaaacgatacatgacgaatgaaaatcctgttctgcagcacggatcttgtaccgcagaacgggattttttgctataatgaaagaaaaatgacgcaggagtaaggttatgaatacagaaaagatcctactggtggacgatgagcgtgcgatccggctggctgtgcggaccgccctgacccgtgaaggaatgcaggtgacggaggcagccgatggaagtgaggctctggagcttttaaagaaacaacagttccatctggtgatcctggacgtaatgatggaacatgtgggtggttatgatgtgctgcaggcaatgcgcgccgcgggagaccacacgccggtcatgatgctgtcgggaaaatccgatgagatggatcaggtgctggggctcggctttggcgcggacagttatctgacgaaaccgtttcatactgcgatcctgatccagacagcaaaggcgctgatccgcagaagtcagatctacagccagggagcatccggagacaccgggatccgtaagggtccgtttacggtagataccttaaagatggagtgcctgaaaaacggtgagccgttaaattttactgccagagagatgaccctgttccgattcctgatggagcatccgggacaggtatttacgaaggaacagctttatacccaggtatggaatgaggcggtggtggatgacaataccatcaccgtctatgtgaaacggatccggaacaagatcgaggatgacccgaagcagccccggtatctgaagacggtacgtggaatcggatatatgctgaatgtgtaggaataaaaaatggaagaatttttaaataaaaggaaatcaagactggtggcggtcagtctgttgatcattttatcagtggttgtgatatttgcaggttcccggctttacagtcaataccgggagcaggtgatccggacggaggaaagccagcttttaaccatggcgggaatcgtcggaaataacctcaattcctacatggaacagcagcttgaggagattgacctgttttattcccaggagggaatgccggaaaacgtctgggcggagtctggcggaatcaatgcgcggacagcttactttttaaaggaaaatgcaggggtctataactggattactgtaacggaaccggatggaacaaaattccggtatgaaccggggaaaaagacgtttcgggaatctgcggacggagaagtgaaagcagtggattcgcaggacggaaatcatcctgcagagatcacgggaaaagaaatatcggatcagacgggatggtatgagctttatattgagaagaatatccctgtcggatctgaggtctatatgctcacatttgccatggaccttggagcgctgtatgagaagatcgtcgcgccggtaaagatcggagaagccggatattccagcgtcaaagaccagaatatgaacatcatcatgcaccatgtaaagaaccagatcggtcttgaagcggtggatggacgtattgagaggtatccatatcttgacatgagcagcctgaatgcctggatcatgaggcaggaaaatgagaactccggaaccggtgtgatcgatacatatgtatgggatgatcctgaattaaaaagagtccgccgcgtcgttgcgtttcaggcgatctcgattcagggagaacgctggatcgtcaattccacactgccggtccatgaactttcgggaccgcttgagagcatgatgaccatgctgatcggcgtgatgatcctgtacatgctgattcttgcggtgatcatggtatttttcctgagaaaccgttttctggcggaatcccagcaaaaggagatcacgtatctaaaagagatcaatcatggaatggagatgctggtccagaaaaacaacgagatccggcattatcaacggatccagtcgctgggaatgatggcgagccacattgcacatgaattcaacaattatctgacaccggtgctgatctatgcggagcttcttgagaatgatgaatccatctcttccgaaaatcaggagatgatccatgagatcacaaagtcggtggatcaggcatcgaatctgtcaaaagaactgctcgccttttccagacaggataccggtgtgcggctggaaccactgaactttacggaagaagtcaggaatgcggtatccatcgtgcgacagcttgccccggcggcgatcacgttgaaaacagagatcgcggaggaaccgctatatgtgttaggacgcagacggatggcggagcacattttgatgaatctctgcaaaaacgcgtttcaggctatggaaaagaccgagagaaaggagttgtggatccggctggcggcaaaggggaacgatgcgatccgcctgcaggtatctgataccggctgcggaatcggagatgatgccatgcagaagatctttgaaccgttctacacaacaaaaggatcgagacagggtacaggactcggtctttcggtggttcggaatatggtgacatcggtcggcggaacgatctgtgtagagagcaaagcgggtgaaggaacaacatttgtcattgagatcccgcagagcggaccggaagtggaagctgacggccggaaacggctgaagcatgtacaaaagattgcgattgtctccagtgaagagtccgcgaagacctggaaagcggccgcatctgacagccggaagacggtagatctgtacgcacacccggcggcccttatcgaccgggtccagaaagatccgtcagcctatgatcttctgatcgcggagtacacactgccgaccatgaacggaatcgaactgtgtgaggtggttcgccgcatcaatccggaaattcgcctgatcctcatcgcggaacagggaggagccgatttcgaatggtacctgaataacggcatgatcgaccggtttatgctgaaagatgagttcgcggaggaatttgcggagatgtttgaaggatgattgttggagattccgaagccggacgaaggagtgcgaaagatcaagatcataagagacattgaatgatttgtgtttcgaagttttatgtgacaaatgaaataacctatgatattatagaaaccatataagcgaaaatgacttttgcgggaacgaaagtgtctttatattttttctcgcatacttcctagttgcttacagatagagaagcatattgcggataaaataacatttttacgtgaaaagcgtgatatcagtaaatacagattatcgcagctgccgggtatttccctgtcgtcacggggaagagtcatggagcgggaaacagtaatgtcaatgcttcgtggacttcggaagtaggagaacagttcgagtatatgtatcggctgttcttttttgctttggaacattaaaacggtaattttttcttgtgtatagtagagcgttaaagtataataaaatcagtttctttgcataagtttaaccgaatcaggtaagtcccctgcttcaattgcgaaaagcaataagtagtaggtggggacttgcttgtatcaggaggagtggaaacttcttctaataaactgcggcacagttatttggttatgagcaagtagcaaagcggattgaaaatatccgctggacaagcttaaaaggatgatcggcaaaccaggtggaaagtctgggacgcaaagctacagggcctttaaaatggcagccagttgcatgaaatgacgtgcactgtctgtttgacagtgttttttttacggtgttgtttcatagacgcaataataatgactttatcaggaaagaatgaggaaaataaaagtatgaaaaaggcaaaacattgtctgatagcagtggtgtcgggggtacttgtagcaactgctgtcttgtctggatgcggacagtcaaagaaagaagtatctaaaaacgatgatcatcttactgtttatttgtgggaaaatcgtttgatgaaaaatattgcaccctatatccatgaacagtttcctgatcaggatattgaatttattattggtaacaatgataccgatttatacagttactttaaagaacatgatgaattaccggatatcataacagtacgtcgattttccggaacagatgcacaggatttacagccttatcttatggattttgcttcttacgatgttgtttctaagtattattcttatgcggtgcaatattataagaatgcggaggatgaaatccagtggcttccaatctgtggtattccgcagacgatcattgccaacaaaacactgtttgatcagtatggaattaagattccggaaaattatgaggaatatgtacaggcatgtcagcagttttatgataatggcataaaaccgtattccatggatttgggggaagattggtcaaatcaagaaataattcaggctgcggcaatcggtgagtttacaagcctg

SEQ ID NO: 1986 - DNA, 132832 bp, Unknown
  gut microbiota DNA sequence
tataatacatgggagaatattgcagagagtgattcagaatgttttcggcgttgtatttgcatttgtattttgtgctatgttttatttgtttacgtcgaacaaaaaggaaaccggggtgaccgtagatgaagagtgaggtggattggaaagaaagtaagtggtacacgatgtccggtggtcagaaatgtattgactggaaaaaacattgaaattaaaatttacggagaagactatgatacgagaaattgagaacagaagaagtataagaaaatatagatccgatgagattgacaggaagctgatcgaagagatcatatatagtgctactcttgcgccatcagccaaaaaccggcagccatggaaatttatcgtatatcagggagaagagaaagataaactggttgaggttatgcgccagggtataaattcagaaaaaatcacacatgaacttatgccggaatgggcatttgcaatccccgatgctgaaaatacagtcagaatcatgcaggaggcgccgtgccttatagcagtgcttaatacaaatcaatatacaccatttgcaagcatcgagagagaaaaacggatcgtagaaatttgcgattcgctgtcgatcggtgcggctgttgagaatatgatattgacagcgaccggatatggattaggtacattatggattgccaatacctgctttgcctataatgagctgatagaatttatcggaacagacaaccagctgacaggaattgttgctgttggagctgcaaatgaagctccgccgaaaaggccacgaaaagcattaagagatgttgtcgagtatagataaagaaatcttagagagattttaaactgccaaacaacgaagagataaaattcatattggagatgatcagctttgaagaaagcatatgagcaggaaatagaaatgtgaacccgggtttttgaggaatgtataccggtggatctgagaaatctggatttaaaggtggaacccatgtcgtttgatggagtgatcctgtccaatgttctggatgtaatgccgaaggacatatcaacaaccgtgatcgatgatctggaacgggtgctgaagcccggcggatattggtttattaagatgaatccgtactattcaaaagaagagcttgaaaactttgaatataaaaatgcgggtaataatatttatgaaaaagatcatattatgagattaagacaggcaactacaaactattggaaagaaaaatttgcacgttttgggaaagagatcatatatttggaattcgaatacccgtggcaggagggaatgaaccgtctgcttgtttaccagagctaaagatgccagaagattcgcagcaagaagccggatactgaaagagagtgtccggcttcttttacgaggtgcgccagacggcgcactttgcagatagatataagcttctgggagaacgttttatttctcacggcaatattcccggatcatttccaaaaaatccctcgcatgctgcggcagataccggtttttccgataggcggcgatggtagttgtgagagccggtttatggccgacggaaaagcagagggcgcggtttccggtgtactggttttcatggtggaaatagctctccggggcgaaggcagcgccgacgccgtccatagccagatggatcgacatggaggagtttctcgtgtggagagagaccggtggattgatgttgtactcttgaaagagatccagagcgatgccgccggtgttctggtccgggtagaggagaatgaagttttcctcttttaatagggaaagatccagccacgggtagcggaagccagggcgggtgatggcttttgcggcgagaggatggttttcatgcaggaccagaacgatctcctcagagcgcaggatctggtaatccatggtctcgggaaattcatggatattgtaaagggtcaggtcgatggatgaggtctccagactgttctccgcaatgaaatttacagcttccatgatatttaaggtcacataggggtatcgtttatgaaacggcgccaacattggctcgatcagagtgctgcccatcatgatcggcacggcgatgtttaaacggccgcgctggcggtgagcgatatcgtcgtattcctgcatccactcatcaccgcaggcaacgatctgttcggcgtagtgaaggtagcgttcacccatgtaggtcgggtagtagcggttttcgtggcggctgaacagcggagcgccgagacgttcttccaggttctttaagtacttgctcagggacggctgggagatataaagggattcggcggctttgccgatgctctggtggcgggcgatcgccaggatatagcgggcttcttttaattccatacagggcctcctcatagctttactgcataaaaattatagataatatgtatttgacgtatagtatatcactttttataatgaatgtaaaatataagtgtaattgatgaaaaaacaaatatttataagaaacgctaattaaaatttattacgcacagttaagaaaggggcaaaccaatgaaaaagagcagtgcatggtgcatgctggttccgggactggtgatcttatttctcttcctgatgatcccgctgcttcgcgttctggttccaagcgtgtttacgggagattacccgttcagcgcatacgtggacttttttaaggacgagtattacagaaagatctttttgagaaccgtgaagatcgcggtcatcaccacctttgtctgtatggtgggcggtatcccgacggcgtatttcatcagccgctgcgataagaaatggagaggtcttcttctctctgcgtcgatcttcccgatgatgacgaactccgttatccgaagctttgcatggatcaatattctcggaagcaacgggatcatcaacaaggcaatgatcgctatgggactgatcgagaagccgatgaagcttctctacactgatttttccatcatcattggttctgtttacctgttcctgccgttaatgatcgtgacagttgccggtgttatggaaaatattgacgatgacatgatggaggcggcacagagcctcggagcttcaaggacggaagcgttcatgaaagtcattttcccgatgagtcttcctggaatcatcgtcggcggtattctggtatttaccggaaccctgacagcttacacgacgccgcagttattaggaggcaacagcaacatggttatggcgacattgatctaccagagagcgatgtccgtcagtgactggaccggcgcgtccgtgatcgccctcatcatgatcgttgtaaccctggttgtgatcaaaggatttaacgctctggccgcacggctggaccgcagaggtgaagattatgcgtaaaaataaagtgctgaccatatgggcagcgatcgtatttgcatttttgatgatcccgttactgatcatcaccgtaacagcattcggcggcggaagcgccatcacattcccgatcgagtccttctcgacgaaatggtttgcgaacgtgttcgcgttaaagtctttccgcagatcattcctgaccagccttgaggtcgcgctcctcgcgacatgcatctctcttctggtcggaatcccggcagcttatgcgctggcgagatccggtttaaaaggaaagcagttattaaagtccatcttcctttccccgaccatcgttccgggaatcgtaatcggctttatcatgtaccagtgcctgatcctgacactccggatcccggtatttgcaggacttttagcaggacatttcatggtcacacttccgtatgtgatccgtgttgtcggttcctccatggaacagttcgatttttccatcgaggaggcggcgtggagtcttggatgcccgaagggagcggcgtttttcaaagtcgttctcccgaacgtgacttccggaatttcctccgcgttcatgctggcgttcatcaattccttcaacaacattccggtttccatgttcttatccggaccgggcgtatcgacattcccgtcgacactgatgaactatattgaatacaattatgatccgaccgtatcggcggtttccgtacttttaatggcagctaccgtgatcatcatggtgatcgtagaccgcacactgggtatcgcagccctggcaaaataaggagaatatgaccatggcttttatgagtttaaatggaatcgatgttagttacgataaaaagaaacagatcttaaaagggctgaatctggaagtcgaggagggcgagctcgtatccctcttaggacccagcggatgcggtaagtccacgacactccgcgtcgttgcaggctttatcgacccgcagggcggaaccttcacattagatggtgaggacatgacaaaggtcccggtccataagcgtcagttcggtctggtattccagagctacgccctgttcccgcacttaagcgtttatgacaatgtagcgttcgggctcagaacaagaaagatggacaaggatgtgatcgacaagaaggtcagggagatccttgaggtctgcggcctgacagagcttgccgaccgtttcccgaagcagatgtccggcggacagcgccagcgagttgccctcgcgagagcacttgtcatcgagccaaagctactgctcttagatgagccgttatccaatcttgacgcgaaattaagactttccatgcgtgtggagatcaagagacttcagaagcgccttggaatcacaacattatttgttacacatgatcaggaggaatgcttctccatctccgacaaggtagccgttatgaacggcggtgtcatcgagcagttcgacacaccggagaacatctacaagagaccggcgaccgagttcgtcgcaagattcatcggtttcgagaacttcctggagcttgcgaaaaagcaggacggcgtctacacagcgccggacggaagtgagttcttaacttccatggatcttgactgtgaaaactttgcaggaacgatccggccggacgatatctgcctggcggatgagatccagacagagaatgttttaagcggaacgatcggcgtccgcaccttcctcggaaagagctaccagtacgaggtcgagacttcagccggagtcttaaaggtcaatatgggtaccgatcatgtttacaaagagggcgaaaagatccgcctgtatctcccgaaggacaagctgatcctggtgagaaaataaaaatttaacttagtgaaccatcgcgcgggcagagatcctgtcaacgcgaagaaatattatctcaaaaagagagaaagaggagaaaaaaatcatgaagaaaacagcagcagttgtactttgcgcagcaatgatgcttaccgcctgcggcggcgcatccacaacagagaccacagcagcaggaagccaggcagcaggttctgaggccgcagcttccgcagaagagacaaaggcagcttccggagacgcacagaagctcgtattatccacatacggcctcagcgaagacatttccgaagaggaagtttacacaccgtttgagaacgagttcaactgtgagatcgttactgagacaggcggtacaaacgaccgttacacaaaattagcggcagacccgaactccaccatcgatgtgatcgaactctcccaggctatgacagcgaagggcactgacgagggacttttcgatacgatcgacttaagcaagatcccgaacgctgagaagttaattccggctgcaaaggagattgcagaggcaggacagggtgttccgtataccatcaacagcatcggtatcatctacaacccggagcttacaggctttgatatcacaagctttgacgacctttgggatgagcgtcttgcaggcaaggtttccattccggagatcacaacaacattcggaccggctatggtttatgttgcaagtgaccatgcaggcgttgatgtgacaactgataacggcgaggcagctttcaaggcacttgctgacttaaagccgaaccttgttaagacatacacaaagtcttccgacctgatcaacatgtttacttccggtgaggttgcagcagctgttgtcggcgacttcggtgttccgacgatcgtagcagcaaacccgacacttgtttatgtaacaccggacggagcttacgcaaacttcaacaccatcaacgtaacaaagaactgtgcgaacaaggaacttgcttacgagtacatcaactaccgcatcagcgaagaactccagacaaagacaggtaaggcattaaacgaagctccgaccaacatggatgttacattcactgaggaagagtccaaagatatgacctacggagacaaggctgcaaaagttaaggttgttgactatgcttttgtaaacccgatcttaaataactggatcgaccagtggaacagaacgatcaataactaataacgaggaattttatatgagacccgatttcattctgaaaaatgtcatggtctatcagaccttcagacagtgttttgaaaaacgggatgtggcagttgcaggggaaaagttttattgcatttcccctgcaatttcatatccgggagttgaagagagagacggcaaaggcagatacatgctgccggggcttgtggacatccatatgcatatcgagagttcgatgacgtatccgggcgaattttccaggatcacgcttccgtatggagtaacaacggtggttgccgatgcccacgagatggctaacgtgttcggcatggacggcatccgggcgtttatggctcagaagacgaagcaggatattttctgggcgatcccgtcgagtgttccggcgacgaacgagaagctggagacctccggtgcgtctttaggcgtgacggaagtttcggagatggcggcggaggacggggttctctgcctcggcgagatcatgaactataaggatctctccgcggagggcgaaagccggacgagagacatgatccgggcgtgcagaaatgcagggagaaacttgaggatcgaaggccactgcccgggacttaccggggcggatctcaacagattcatttatgagggagtcgatgcggaccacacgcagcagacgccgcagtcggtcctggagaagtcggagcttggcatgttcctggagctgcagttcaaatccctgacgccggaggtcgtgaagaccgtgtgcgacaatgcgctgtatgaaaatgtggcgctggtgacggacgacacgatgccggacaagcttcttctcggacaactcaacaagatcatcgagacggctgtgaaggcggggatgccgatggagaaggcgatctactgcgcgacatggacacctgcgcggagaatgcacctggatgacaggggaatgatcgcgcctgggaagatcgcagatttcatgcttctggacagtctggatgggatcgagccggtggttgtttataagaggggcgagtgcgtgtactgtaaatgtgacggggatgcggcgtgcggtgctgggaaagagcgtgctggcgcggctgactgcggagcagaggcagcggagatgagtaccgcgcaggtgggaaaaaacggtgctgtgccggcagctgcagcgtgcagtttcccggagagcttttaccacactgtgaagtgccgtccggcggagctttccgacttcgttttaaaggcagaagacccggatgcagcgtgggccgaggttaacgtcatgaagatcggcacgtttggaacagcgacaactcctgtgaaacggaaagtcgcagtgaaggacggcgtactcgactggaagtccgcaggactttcgcttgcggtcgtgtttgagcgctatggaaaaaatggaaatatcgggtacggacttgtcgaaggagtgctgacgcaaccgggcgctgtggccactacatggtcccatgacagccacaacctgtttgtactgggaacagatgaggaagacatgaaactggcgcagagacgcgttctggagctccagggggcatatgtcgtgtacgccggaggaaagtccctggcggaggcaagactcacgatcggcggcatcgtgtcggaccagccggtcgaggtcctcgggcaggagttaaaggaggtccgcgcggcgatggaaggtctcggatatgagaacaacaatgtcatcatgtccatgtcgacgctctgccttccggtgtcaccgaaactgaagctcacggatcatgggcttttaaccgtgccggggcaggagcgggtgccgcttgttgagaggtacggaaaataatcgcgaagagcaaaaaaacagggatgtctgctgttttttggcagatcggccggatgccggatgggtttcaggatatctgaaaaacgggtctggaggcgaaaaagatatagatcgaaatggtgaaggatgaagatagaacgatgaagaagatcattaaaaacggcattgtcgtgaccatgaatccggcgggcgatgtctggaaccatggttatgtgatatttgaagggacgaagatcctggcagcaggaccggaggatgaacttgagaagaaacttcaggagatgacggctcaggggaatttcaaggcgggtgaagagtttgaggagatcgatgcaaaacgtgcgatcgtgatcccgggactcgtcaacacccacagccatctcggcatggtcccgttccgcgggctcggggacgactgcaaggaccgtctgcgcgtgttcctgctcccgatggagaatcaggcgatggacgcggagatggcggctctctcaagccgctacgcggtggcagagatgcttctttccggtattacgaccgtgctcgacatgtattatttcgaggaagtcgttgcgaaggtcatggatgagatggggatccgcggaattgctggggagacggtgatggaaacggattcctgcgacagtgagaataccgacaaggcgatcgagcgcgggcttgcactgatcgcagcgtacaaggaccatccgcgtgtttccggaacactcacgccgcacgggacgacgacgtgcagtccggagacgttaaagcgggtctatgaggaggatgtcaaagcgggaagcgtgttcacactccacacggcggagatggattacgagatgacgcagatcagggaacagtacggcatgacgccggtcgagttcctggagcacatcggggttctcggcccgaatacgctgacggcgcacacgatccacgcgacggagcgagatgtggagatcctggcgaagcacggagcatccgttgcgcactgcatcgcctcgaatacgaaggccggaaagggcgttgcgccggtttccctgatgcataaacacggcatttccgtcggtttcggaacagacggaccggcaagcggaaatacgttggacctgtttatccagatgcggatgtgcgagaatttccagaaaacaacgctccacgaccgcagtgcgcttccggccaaggaagtcgtgtccatggcgacgatcgagggcgcgagagcactcggactcggtgatgtgaccggctctatcgaacctggaaaagaagcggacctcgtcctgatcgagaccgactccccgaacatgttcccggtctatgatccgtattccgcgatcgtttacagcgcgtctgcggcgaatgtaagggatgtatttgttgcgggagaatgcctggtgaaagagaaacaactcgtccgtgcggactttgcgaagatccgggatgagcttcgggagaagatggagcggacgaagtttggtgagatggggaatatggtataggtgcaaaaacagaagcagatccaggaatgggtctaatagccacaaacaacggatgcagaaagccgcatggaaccttttgaaaggaagcatgcggctttcttttttcaatgaaaggcaggagcttattgatacatttttttcgccagcccccgccacagaccgatcgacagaaccactgcgatataatcggtcagcgcctggccgaagataacgccgtttaagccgaagagaccgtttaagagatacaggatcgggatcaggaggacgccctggcggagaatcgagaggatcgttgccgggagcgcctttccggcggactgcatgcagttcatgttgacaaagaggatgccgatgaccgggccggagagcatgtaggcgacgagcatcctgacaccgcactggatgacttcttcatcgttgatgaacatctggatgatcgggcggcggaagaaaaagaacagggccgttgccaggatgccgacgatcaggcagcatttctttgtgtaggattcgaccgcatggaagcgttttgtatcaccggagccgaaattgtagcctaagagcggctgtacgccatttgcgaggcccatctgcaggaaggtgataaacatgtttgccttgaatacaatgccgatagcggccacaggagcgttcccatatgccacgaggatctggtttaagatgatcgtggagagactcatcagcatggagaagatcgcggtcgggagtccgcaggagcagatcgttgccgcgaggcggttttcaaggctgaagtcctttggcaggatggagaagttcgggctcttcttcacaaaataccagagatagtaggcactggccatgacgtttccgatcgtcgttgcgatggcggcaccggcggcgcccatatgaagcccgctgatcatgatcgggtcaaggacgatgttggcgacagttccgatcatgctgccgatcatcgcctcgcggctcgaaccttcggagcggaccacgaagcttgcggctgcggaccagatgatgaacggtgcgccgtaggaaatgtggaagacatatccttttgcgagagcataagtttccgcattcgcgccgaagatcccgaggatcggctgcatgaacaggaccagcagggcggcaaagacaatgccgacgccgagcgaagcgtatgtaatgaaggcggagacctgtttcatccgctttttattgttttcgcccatcgcgatggaagccgcggcgcttccgcccatgccgaacatgttggcaaaggccataaacaagataaagatcgggttcgtcaggctgacggcagcgacctgcagcggatcgccggtctgcccgacgaagaaggtgtccgccatgttgtagacgacggtgaccaggctgctgatgatgctcgggatcgccattttggcgacagcctgcgggacgggcatggttttcatgagttcgttatcgttcatgatgattgtttctcctcttagaaatgtattttaaaagcgcttccaaccggtgcggtataaataatcggactcagttgggtttctggagcactggagcattattgtggggaggacgatttctcttcagagtcaagattttgcagcattttttctgttattcgtgtaaattccatcaattcctgttcggaaatcccccgtaaaagaagtgcctccgtctcatggatctcctgatttaaggcgtccttcacggcggcggctttttctgtaaatgcgatccgtttgaagcgcccgtcgttctcatccgggatccggacgatgaggtctcgggattccagtgactttaacatctccgtgacggtcgacgggcggagggaaaattcccgctcgatatctttctggtagaccggatgcagtgtggattccacaagaataaaatttaagatctttccctgcgcgtttccgattccaagactggtgtggacgacctgggagcgggatttgaggcggctggaaagatggttgatgatttttccgatgtccatggggagctcctttcctgtatatcacaacattacttcggaacctaaatatattacgatgggggaaatggaaagtcaaggatagttcagaaagtgaaatatcggcaaacaacgaaaaagatcctgcccaataaaagagacaggatcttcatgtactcccacaggagtatagaaacaattcaaatacgaagagatcagtccaccagctcattctgatgtctcgacagatgctcatacggcaggatcaagcggccgcggtagaggccgcagccatcgtttacgagatcattgttgatggcggagaacatgttgacgtcgagggatgcgaggtccagatcgacaaggcgtcggcagcgctcgtaggcttcgtcaaaatagacgcattctccctccgggatctcatcacgtcttgcacgttcgccttcctgacgtttctcatagctcaagtggttggcaactccgatctcggcgatgtcgtccatgtgcttggtgcgcagctggacttccatgtagctgcgggagctgttgtcgtaaaaggtgatgtggagtgactggtagtcgtcggacgtgtttccgcagacatagtcccggtaatacggacggacttcgtcgtttaagagtggagaggtagtctccttgatcccataggctggttctgccgtaaatccgcgttcctcgaggaatcccggaagttcgttggcgatctgatagagatattttaagtcggcttcctcctgggactcaccgggcttcaggtaacatttcggcagagaagtcacgatccggtaggcgatgaggtcgcggaaacagctcagccgctgttttaattccgagattgtcggatatgttttcttttctgtatagcagtcgtagatgtattcgacgatgtagccgttgaattttgcctccgagcggatcagggacttgatccggcccttaaagttgaaggcgagaagcggatattccgtcgccatatggatataaaattcccggatcttctgggactgggcggtaaggaaatcattgtgttcaagaagctcccggatctggatcaggaagttcgcgtggatcaggtcgatctcgttgtttgtcttttttgcctcttctttgaggtcgtggctgtaatttttcaggatccggaacatcgtatcgccggaatacaggtaatcgtttaatgtaaccatggatgtcactcctctgtcgtatggtcatacggtaatattatgatttattttatcagaatcccctgaattgacaagagaatctttacggaaaacattttcccggaagtacggaagaaaatgcttgccagaatggttagtctatgctaacataacgcgcagatggctttcgtcatagtttcggaaaatgaaaagggagaataaatataaatggagatcaaacagctggaatactttgcggcagcggtggaatacggaagtctgaaccgggcagcggaaaagttatatacaacacagccgaatgtaagccgggttttaaacagcctggaaaaagaactgcatgttacattgctggagcgaagcaacaaagggatcagaatgacacagcagggggaagaactctatggtcatgccatgagcattttaaaacattccaatgtcatccgttccatgtcggaacgtccaaacgggcgaagattttccgtatccggatacaggagcggattactcacaaagcttatggtgcagctgtatcaaaactgcggagaacagttgaaatacgaataccgggaaggaaccgtggaggagatcacggacaatgtggcgtcgaggatttctgaacttgggatcgtgtattttgcggaagcacagatgccatgttttcagcatatcatgtggcataaaaaactggaatttcacaagctggcgctccgcgggatctgtgtttatgttggggaaaatcatccgctgtataaccgggaatccattcgattttctgaattgaaagggatgaaatttgtgacggagacagaggactttttcgcgatggaacatcatatcgagcggatcagtgtcggcgcatttgtctcggaacagcatatgaatgacaggttttatacaaacagtgattatatgatcaacaacctgctcctgcactcggatgtctgctgtcttgggatcgatatcgtgccggggggatatcagaaatatgggatcaaagcattgaagatcgaaacgtgcgaaccgtttctggcatttggatatgtgacagcggaaaatgcatccctgtcaccggaagcggaacagtatctggaacgtctgacggcatatttatagagtaggtggaagaatccggcagaaagagactgctgcgtacaatccgcctgttcaggaccggaaaattgcagaatcatcagaaatatatgaaaagcgtatagatggcagataaaacatgaatccaatcggactcttttactcccgctatacgcttttgttataaccggctctccctgaatcggcattagtaagcttagactaactatgatatagtatttcctgcgataagcagacacagagattcctggcaatgataaaaacaggaacagatacagacagatacttaattcaggaggacattatgaaaaagagagcaatcagcctgtgccttgcaggtcttatggcagtatcccttgcaggatgcggcggagcaggaactacggaaaaagcagcagaagcgtccgggacagagacgggtgcagcggcagaaaccggaaattcagagaagaaagaagaacttgtattcgttaattaccgcgatatccgcgatttaaatccgcatctttatgcgggagaaatgtatgcacaggagatgctgtatgagacacttgtcaatatcacagcggatggatatgagggctgccttgcagaatcctgggatatcagtgaagatggaaagacctacaccttccatatccgtgacggagtgaaattctcagatggagaagtgtgcgatgcgaacgcgatcaaggcaaattttgatgcgatcattgaaaacaaagaccgccatacatggctggagatgatgaatcttctcgtcggtgtttctgcaccggatgataagacatttgtgatcgaattatccgagccgtattacccgcttttaacagaacttggcgtgacaagaccgtttgccatgatctctccgaaggcgatgaaggacggaagcacaaaggacggcgtgaatgcatatatcggtaccggtccatatgtcctgactgacttcgtgacagatgaatatgctgtatttgaggcaaacgaaaattactggggagaacagccgaagatcaaaaagatcacggttaaagtgatcccggataaccagacaagaatccttgcgctggaaaagggcgagatcgacatgatctttggtaaaaacatgatcgatgcagatgcgatcaaccagtatacaggaaatgataaatttacagtttccctgtcagatccgacctctacccgtcagatcgtattaaatacaacaaaagaggttcttgctgacaaggaagtccgccaggcccttcagcacgcgacaaataagcaggcgatctcagatggaattttctatggactggaacagccggccgatacactgttcgcaaagacggttccgtactgtgatatcgatcttgaaccgtatgcatatgatgtggagcaggcgcagagcatgctggatgaagctggctgggttgtcggcgcagataagatccgcgagaaagacggtcagaaattaaacattgatcttctctacaacagcgacagtgtgacagagaaagcaatcgcggaatatcttcagagcgagtaccagaagatcggaatctccttaaatattcacggagaagaagaacagtcctaccgtgacaacatgaaggcaggaaactttgatatggtattcaatatctgctggggtaccccgtatgatccgcagtcttcccttgcggcaatgcgtgctccggtatacggagattatgcggcacagcttggtcttgaagacaaggcggagatcgatcaggcgatcacagacattcttgtatccacggatgagcagaaacgccaggatctttatacgtttgttctgacaaggctccatgaggatgcggtatacattccgctcacttatgagtgcaacaaggcgatctaccgttctgatctgaaaggattccatttcacacagactcagtacgaagttccttttgcagacttctatttcgaataaaaagcccgatatgacaggccgtccatccgggcggtctgttgttttatcagaaaggagaatttcatgaagcagtacgttatcaagcggatcctgtcagcaatcccgcttctgatcgtcatttcgtttgtgtgctttgtatttatcaatctgatcccgtcagatccggcggaagtagctttgagagtccggcaggttccgatcatcacggaggaagcgatcgcggaagtacgggcagaactcggtcttgataagccgtatctggtccggtatttttcatggctggcagactgtctgcatggcgattttgggattagttatgtaaacccaaaacgaacagttgcaggagagcttgcaagatgcatgccggcaactctgcagctcgccggcgtttcctttgtaatggtgatcgtgctgagtctgccgatcggctttctttgcgcggtttataaggacggatggtttgataagatcatgagaggaatcgtatttatgacaacggcgatgcctgcatactgggtgggacttcttctcatgtggctcgtatcgatcaaactggatctcctgccgacaagcggaaacggaacatggaaacacctgatcctgccggcctttaccgtgtcgttgagctatatctcaacatatatccgtctgatccggaacaacatgctggaaaatatgaagcaggactatgttctttacgcaaatgtccggggacttccgcagaaatcgatcctcgtaaaacatatcctgaaaaattccatgcatacgtgtatcgtggcagtcggaatgagtatcccgcagctgatctccggaacgatcgttgtggagaatgtatttgcgtggccgggacttggaacactctgcatcagctcgatctttaaccgtgactatccggtcatccagacatatgtactcctgatcggcgttctgtttgtcgtatttaatctgctgtttgatattctgcagacggtatcggatccgcgtatgagaagggaggaacattaatgctccagagatttttacataataaaacggcaatgatcacagtcgcgatcgtctgcctgacggcgctggtcggaatttttgctccatggatcgcgccgaatgatccgtatgaaacagacattctgaataaatttgcgggattttcggcgaaatatccgcttggaacggacaatctaggccgctgtatcctgtcacgaatgctctacgggatccggccgacattaggacttgctgttctgacgatgatcggaacgatcggacttggggcactcatgggacttctggcaggatatttccgcgggattccggaagagatcatcatgcgcactgtggatgtcatgctttctttcccgagtcagatcatggtttttgcagttgtggcgcttttaggcatcaatgtccagaacgtaattcttgcgaacgtgtttatcaaatgggcgtggtatgcccgcatgatccgcacaggagtcatgcagcacagggacaggaactttgtccagttttccagatgtgtcgggacgccggagcgttttatccttttccgtcatctggtgccgtccatcgcggcagatcttgcggtacttgcatcgctcgatgtgggctgggccatcatcaatatttccacgctgtcgttcctgggactcggcgtccaggcgccgacaccggaatggggcgccatgttaaatgaggcaaaaaatgttctcacgagcaatccgacccagatgatcgttcccggtgttgcgatcgtgatccttgtgtcagcgttcaacctgatgggggatgcgctgcgggatgttcttgatccgaaggaggtaaatgtatgaggccggttatttgcgcagaagatctcagcgtgacattaaagattccgagacggccggaaaaacagcttgtcagaaatgtgaactttgaagtccaaaaaggagaatgccttggaatcctcggagaatccgggagcggaaaaagtatgagcgtaaaggccatgctgggacttcttgataagaattttgcggtttccggccatgcatggtttgacggaaaggatcttttaaaggaaagcggtgaattcctgagaaagatccgcggaagccagattgccgtagtgcttcagaatccgatgacctgctttgatccgctttaccggatcggaaatcagattggggaaacatttgcaacgcatacggactggaaagcagaaaaaatccaagagagatcaatggaaacactttcccggatgaagatcagaaatccggaagaagttcttcagaaatatccgcatcagctgtccggcggtatgctgcagaggatcatgatcgggatcgctatggcattaaagccggcgcttctgatcgcggacgagccgacaacggcgatcgattcgatcacccagtatgagatcctggaagagtttgtgcggatcaaaaaggaacatgacacggcaatgatctttatcacacatgatctcggcgcgatctcgaaagtcgcagatcagcttgtagtcatgaatcatggggagatcgcagacagaggaagtttttcccatatcctgcatcatgcctcagatccgtatacgaaacttctcgtagaaaaacggtcagctgtcatgaaaaagtacagggaaagcattggacatgagaatggaggtgcgttatgatccggatgaaagatatctgtgtcagcttccgcagtgaacggcaggagaagatttttggcgtcagcagaacgcaggtgctgtttgatatttcactttcggtcccgaagggaagctgccttggaatccttggagaatccggaagcggaaaatcaacgcttggccgtgtgatctgcggacttttaaagccggacagcggggaatatctgctggaaggaaagaatgtttatgcatcaagagaaggaaaaaagaatcttcaaaatgagttaagcgtggtatttcaggattacacgacatcggcgaatccaagattccggatccgggatgtactgatggagggaatccgggtaaaagaaagaaaaacaggaaaaataaaagatccggcggcagagtgcagacggcttctggaattagtggggcttgatgagacatttcttgaccggtttccacatgagctttccggcggacagctgcagcgcgtatgcattgcaagagctgtggcatgtgaaccgcagctgatcctgtttgatgaggcgatctcatctcttgatgcgcatacacaggtgcaggtcatggatcttttaatggaacttaaggatcagcttggacttacctatgtatttatcactcatgatctgacttcagtgacttatctttgcgatcaggtgttattcctttataaaggcaagatcacggaacatatcccggtggagaagattgcggagacatctgatccgtatgcaaggaaacttctggattctatcatcgaatttgatgaagagtatgataatgagagcgatatagggcaggagatgacggcctgagcctgacaggataaaagggaggaagcgatgatcgaaatcggacagatccgggcagaagccgggacgaaacaaaatggatggctggaaattgcgggggaagacctgaaattgccgcttacgctcatcagtgggcgaaaagaaggaaagacactgctcatctcggcaggtattcatggagcggaatatattggtgtacagacgcttttggagatctccggagagatcgatccggacacgctgtcaggaaatgtaatctgtcttcacatggcaaatccgtcggcatttaaagattatgtgcgcttttatgtgccggaggacggaaaaaatttaaaccgggtatttccggggaaaaaggacgggacgctttcggagcggatcgcatggacgatcacggaagagctgcaggcaaaggcggatttttatatcgatcttcatgcgggcgacacgagtgaagaggtaatgccctttgtctattataatgtggcagcaggagaccagattgcagaaatttcagaaagaatggcaatggcagcagatatgaaagtgcgggcgagttcgacagcagcgaccggggcgtacagcagtgcctgccggaggggacttcctgcaatcctgatggagcgcggtggaggcggaagatttacggaagaagaagttgcggcatataagcaggatatcaggaatatcatgatcagtctggggatgatccagggcgtggaacaacatacggaaaaacagcggaatgtgacgagagcagagtatctggaagcggagacggacggactctggtatccgaataaaaatgccggagagacattccggaaaggggagcttctgggggaagttcgcaatatctggggagaactcctgaaagaataccgggcaatctatgacgggatcattttgtaccagacagtgagtcttgggataaaagagggggatccgttgatcgcgtatggagcatacggagaaagctgaagacggtgtatggtgcttatttttttagatgagcctgatgaataaaaatttcggaaaaccagaaaaaaagaatcaatatcaaaaagaggaagatctgcacgatggcagatacttcctctttttgatgccatgcatctgaaaggagattccggcggaagcgttttatatcttaaagcacttctgaagttcccggtactgtccgagcaccagcaaggtgtcggtttcctcaaacgttgtatccggagttacggagaagttcaggactccgccatgccgcacagcgatgatattgatgccgtattttttacggatatcgatccagccgacactcatgccgatccactgcgatgggaggtccacctcgtagatgtcgtaatcaccttccagatttacaaaatcgaggatgtggtcggaactgaagcggatcgcagtccatttggcaagctgctgctccgggtaaacgaccttatcggcaccgtttcttaacaggaatttctcgtggacatcgctggatgcccgggagacgacaagttttgcaccgagttcctttaagagagaggttgtctctaaagaactctgaaaattgtcaccgatggcgacgatgcaggcatcgaaattccggatgccgagcgaagaaaggaaggactcactcgtactgtccccgatctgcgcttccgtcacatagggaagaacggaatcaacgcgctcttcggtgctgtcaacggccaggatctggtggccgagattgtgaagttccattgcgatatgttttccaaaacggccgaggccgatcaaaagaatcgatttcatagaattctccttataagcagttgtttttataaaaaatcacatcatccgacggaaatcttctcctgcggcagctttccgcactggagcttatagccgttcatggtcgcgtagatgatcgtgagtccgccgacacggccgatgaacatgaagatgatcaggagcagctttgataaaacggacagtgtcggagtgatcccgaaacttaatcctaccgtagcgatcgcggaaaaggactcaaacagacacggcatgagcggcagttcctcgatgatgctgagtgcgatggcgcaggtgatgccgagtcctgtatacatgaagaagatcgcgatcgcggttgcgacgatgtccggcatgatccggcgtttgaacatttccgggctgtcttttcgggaaaaaacagcagcggcacatgcgaggagcacggcgatcgtcgttgtcttgataccgccggccgtggatcccggacttccgccgattaacattaagagaatcatcaggaactggctggactcgtgcatggcggtcagatcggcagtgttgaaacctgcagttctcgttgtcaccgactggaacagggcaacgagtacgcgttttccgaccgggagatctttaaattccagcaggaagaaaaagatggccggaaggacacagagcgccagggaccaggtcatgatgaccttgctctgcatccggtatctggagaaatgatacccgtttgcgcggatatcatcccaggtcaggaaaccgatgccgccggtgatgatgagcagcatgatcggaatgttgatgagcggctcatatgcgtaggaggtcagggaggaaaatgccccgcggtctcctaaaagatcgagccccgcattgcagaaggccgagacagagtggaacacggccatccagatcccttttaaaagaccgaaatcacggcagaataccggcatcatgagggctgccccgatgagttcgatgcacagggcagttttgatgataaagcctgtcaggcgcacgatcccgctgagcttcggggaagcgacggactctgccatcatgctgcgctgggagagaccgatcttcttgccggagatcatggaaaaggaggcggacagggtcacgacgccgagaccgccggcctggacgaggagcaggatgatgacatgcccgaattcagaccagtaggttccggtgtcacggacaacaagtccggtgacgcagacggaggtgacggcggtaaagagtgcgtcgataaaaggtgtccagattccgtctgcggaggacaccggcagcatcaggatcatggtgccgagtgcgatcatgcaggcaaagccgagaacgacgatctggaacgaatttaaccgccggaaggcggagagaatacgattcataaaataatcctttctggaaacaatgaagatgctaatggttttattataaacaggaatgtttgtaaaggaaagtagtttttcgccgagttgtgtgggaaaagcaagcgactgcgttcatgagcaagtagcgaagcggattgcgaatgtccgctttacaaatttttgtccgtggaaggagcaagcatttcggcggagaggaattgccagaacgaaaaattcacaggatatcgttttaaatatgaaatttgcggtgagaggaaaaattttccatagtgaaagatgaaaatgcgttgtaattacaacatacgagagagaaatttgaggatataatgcgtacatgttccggcgatgccggacaggaaaatgatgatctgacaggtatgactgccgcagtgcagcggatatgcctgagtaatttatgcgaacaacgagctaaagtccgcgcttgcgcgagaccttggcgactgttgcgatagcaaggggaaactcgcgaagcgtgttttcgcgtgttggaaattcggtgaaagctgcgaaaatccgcagggattaccgggataaaaatatttggaggtatgcaggatggatcagaaaatgttctgttatcagtgtgagcagaccgcgggatgtgcgggatgcacaggaaatgcgggtgtctgcggaaagaccgcggagacttcccggcttcaggaccagttggtcggagctcttgtcgggcttgcgagagcagcagaaggcgtggaatgtccgggggacggcatgtaccgaacggtgatcgaaggactttttacaacacttacaaatgtgagctttgatgacgatgcgatccgggcgcagatcgaaaagacgcatagagagaaggaaaaactgctggcggcgccggtgagaagaaaggcggaagagaaaactccggcagcaggaacggatcctgcagctggaaatgaaagcggagaacaggcagccgacgattacaatctcggtctcttatgggacatggatccggatatccgttccttaaaatccctgatcctgtttggcttaaagggaatggcggcatatgcgtaccatgcgctgatgctcggggcgtctgatgagacggtgaaccagtttttcctgacaggacttcgtgagatcgcaaaagacgggacgatcgagagcctgcttccgaccgttatgaaggtcggagaggtcaatctcacctgtatggccatgctcgatgcggcaaatacgggaacctacgggacaccggcgccggtccgtgtgcctctcaaggtggaaaaaggtccgtttatcgttgtgacagggcatgatctcaaagatctggaacttctcttaaagcagactgagggaaagggcgtcaatatttacacccacggggagatgctgccggctcatgcgtatccggaattaaagaaatatcctcagctgaaggggaattttggaacagcatggcagaaccagcagaaggaatttgcggacattccggcgccgatcctctttacgacaaactgcctgatgccgccgaaaaaatcgtatgcggaccgcgtgtatacaacggaagtcgtggcctatccgggaatggtgcatattgatgatgagaaagactttacgccggtgatcgagaaagcgctggagcttggcggatatccggaagaccggcagtttacaggaatcaacggcgggacggaagtggtgactggctttggacacggaacgatcctgtctgtagctgatcaggttatcgacgcggtaaagacaggtgcgatccgccatttcttccttgttgcaggctgtgacggcgcgaagccgggaagaaattattatacggaattcgtaaaacagacgccggaagacagcattgtcctgaccctggcatgcggaaagtatcggtttaacgatctggatctcggcacgatcggcgggcttccgcggatcatggatatgggacagtgcaacgatgcctatggagcgatcaaagtcgctgtggcgctcgctgaggcctttgggtgcgaagtgaatgagcttccgctttcctttgtactctcctggtatgagcagaaggccgtgtgcattctcctgacacttttacacctggggatcaaaaacatccggcttggtccgtcgcttccggcattcctctctccgaatatcttaaatttcctggtggaaaattacgggatcggaccggtgacaacgccggaggaagatctgaaggcactgctgggataaagttacggtttgcggatagaaactttctgaacatgtgtatgacggtttcggagatgtgccagattggaaaggggaaagccagagaaatggctttccctgaataaatacaaaagggctgccggatcagcaaaaaattttactgatccgacagccctatttttagttttacatatgctgtaaaagctctaactgctctccattcggtccgaagaagaacgcgttgcggatcccgccgaagatcgggaggtcagcggctttgtcaacgccgttccggaaacttgtgatcccggctgctttcagatctgcgatggcagcgtcgatatcatcgacttcgatcgcgatatgcgggaagagtccgccttctgcggtcacaacggtgccgtcgtgcggctcgatgatctcaaggtcgaagccaggcatgctgacgatcttgatgtggttggttccgagtggttttaccacatcggcctgtccggttactttgccgccgagacattcgtagaattttacggaagtctcgagatcctttgtgaaaagtgcgatatgtgcaagtcctgtgatatgtttcatgatcaatgtcctttctgtattttcagaattatttggtatcggagagacaaaaggctggcttccgacatcatgaagatagctatgcttattataaaatcatttaaaggagagtgcaaccggttccttgtcacggaaagaaagtgcgtgcacgggaacacataatttgtcagtgacggacagaaaaatctgtgctatactcttttattatgaaaaattttattgtatttgacctggaatggaaccagaacccgggcggaaaagaattgtccgtggaacggcttccttttgagatctttgaaattggagcagtaaaactgaatgaagagcgggaaaagaccggagagtttcaccggatcatccgtccgtgcgtgtaccggcagatgcatcggatcatctcagaagtgacccatgtgtcgatcgaagaactggagcgggacggagaaccgtttgtggatgtgatggaggactttcttgaatggtgcggggaagatcccgtgttctgcacctgggggagtatggaccttacggaacttcagaggaacatggtctatcacgggatgacaatcccatttccgaaaccactccttttttatgatatccagaagctgtacagcctgtgctaccaggatggaaaggcgcgaatttccctggacgaggcggtggaatcatttgcgatcgatgtggacgcgccgtttcaccgggcactcggggacgcggagtataccggctgtgtgatgcaggcgatggactttgattccgtgaaagatttcgtatcggtggattactatatgccgccggagaatgtgcaggaggaatttaccctgcgtttcccgggatatacgaaattcgtgtcccagatgtttgagacgaaggaagaggcgatggaggaaaagcaggtgacggacgtcgtctgcacggagtgccgccggatgctcagaaagaagatccgctggttttcgtccgggcagcgctattacctctgccttgcagcatgtccggaacacggactgatgaaaggcaagatccggatgaaaaaatcggaggatggccggatctttgcggtgaaaacggtaaagccggtagatgaggaaggcgcggaagctgtttaccagaaaaaagaggaagccaggatccgacgcgcggagaagagcagacagaagaagctgcatgggatggaatagaatagatgactggtttgacaagtgtcagcaggaattttcttaccgcagcaggagtcaggagtgattgaaagaaatgaactcctgcggaaactgcaaaggcgataaagcaaaaatatcagaaaagtaaaaggtctgaaacatggaaccgacaggaaatcgggaaccatatttcagacctttttatgtgctcttttaagtcaggctctgcctggaaggaaccggcagtctgcatgatctgtaaaccggaaatcaatgtcgtttaaaatgagctttcacccgttcccagaatcccggctttgtgatcccggctttggaccggagatggttttccatgatcatatcaaactccgtggacgaataaccccattcctttaagcgcttttcacgtctctggtggcggaggatccgctcgttttgcgctttgttctcctgatagatcatgatgccgaagattgacccgccgatcacgccgatgaccgcaagaacgatcaggactttttttgcaatccggaaagcaggagaggaagtccaggatgatgaagaatcggagcttttctttgagcctttggagacggaggtcccggaatccgcattgacagcggatcgatccgatccgttcgcggtttccttagtcatatcagaactgtcctggatggattctgcagaggattccgggctcttttcagaagaatttccggaatcagccgtttcggaagttgtttttgcagctctcggaacatatccctgagtcacagaaacttccagatacgcctgtccgaccagccggtcatcgtactgataatcgatccgtgcgatcgcgccggctggcgcgtcattagtcaggtcataatccagtgtggaggtcacatcggaaaagcttccgtcagccggaagagtcacggcgctgtttttgttgacgatcagtcttgtggcacttccggagaagatcccggagatcgtcagatcgtcggccaccttgctgtaggtgctgtcctggtcagcgaccggtacagatttaaagttcttaaacccgtagtcgaatagagctttcgtgtcggaataatgggtcaggtgaccgtttaagacgacagcgacgagcttcatgccgtcccgctccgcacatgttacgagcgtgtttccggcaagagaagtataaccggtctttccgccgatgaccccgtcataatacagggaatcgttgcggcgcagcattctgtggtgagcgtaatagcgccagccgtccggatactgctttaattttccggcaggtacatcataatatgtggtggaatcgatctccacgaacgtcggattgttaaacgccgcttttgcgatgagagccatatcgtaggcggatacatagtggttcggatcgttgagtccgctcggattcgcaaaatgggagtcagtgcagccaagctctgccacgcgctcgttcatcatctccgcgaaggcgtccatactgccggcgcagtgttccgccagggcatttgcaacctcgtttgcagactgtaaaagcagtgcatagaggcagtcgcggacgcttaaggtgtcgccggctctcgctccgaggatcgaggagttcggctccagagtgttgacagccgtgttggagaaggtcacagtctcatcaagactgcagttttcgatcacgatcagggccgtcaggatcttcgtgatactggccggataatacggttcatggctgttcttttcatagagaacggcgccggaattgatgtccatcaggatcccgccgtcggcagagatcgagatgtccgacggccattccgcggccgcgtatgcagtctgaccgggaagaatgccaaggatcagggtcagacagagaaaaagacttaaaaatcgtttcatgaaactccttaaaataattttgacatttatttataaacatgatagtatattgtatagaaagagagtgccgtcgatagacggttagtccgatatataattgcgtacaaaaattgccgctatgtttaccagacgaggcggctatttttgtgtcttattgcatccaattgtatatcctaacccgaaagctgttaagcataagctgataacagcaattaatccttcgagagtcaacattggcatcccctccttttgtgagatttccacagaaaagctgtagatatctatgtaatcagagggtcacagtcccccaggagaggacgaaccgcctaccgttttgacagcacccatagtataaattatagcagttcagaggcagagctgcaactgataaattgtaataaaaagagctggcagacttaatgtctgtcagctcttttccataaaacaaaattcccgacaaaaaacaccacaacgatcactgcaaacaccagcgcgatccgcgcagcggtgtcgaagaagaatccctccgggacgatgttgatgagcatgtcggtccgcggatcgaggatccataagtcgttagtgaagaagatcttgtggaaaacgataaaatattttgagaagtctgtggatatcacgccgatcagcgcgagagccacggcaaaaacagcaccggtgccgatgcagagcgatttcgggatcagccgtttgagcgctctggtccgctctgcgtttttgcgtccccagagataagccagggctgcgaaaactgcggtgaccgcgatcccgattctgcggagccacagaccgccgataaagagtccctgtacatcctccatgtgcgcgatctcccggtcattaaagaattcccggtattccccgcccatggtcgtgtatacatgaaggtcctcccgctttccgcgaaggaaagccatcatctggtcggtgacgtctaaaagatcatccattgtcatttccggaagatcgtttaaaacctggtacttggtgtattccttttcatagtagccgggggtccagtacgcgaccgcctcgacggatgtgatgaggaatgcgatgatcagccagaatgcagtgaagatcccagcggcataggtaatggtttttgctttttttgtcatttcgtggtactccgtttgatcacttttagtcttgtaaattcctcgcggtccttttcctccagggcgttggaaatatcttttacgagtgcctggtaggacgggatcgtaatattcttcaatgcatttgcccgcttctgggtcttcttgatgctctcggcaagacggtaggcggaagtctccacggttgcgaggttggcggtcagttccttcacgcgctcgaaggcgatccgcgcctcatctaaggaatcactggtgctgtaaaaggcgtagggcggcttttcatcctgggcaggtgtatactcgacaagcgggatctccgttcccatgatgctgcgcgccttgatccggatatcatcggtgaccgggatcgatccggcgatctcttccacataatggatccccatctcgatattggccttctggagcgccttgtaggcggctgtgaaggtggaatcgatctcggactggatcgtctttgcctggtcgatcaggcccatcagttcccgcagcaggatattcctttttttgtccatcagcccatatccctgcgtcgcaagggcgagggaatttttcgcaaggatcagatttcccttggtaggaaatgtgttcggattcatgagatcccctccttatgaagcgtcggaagcggcgtctgcaggtttataatacttgtctaagattttcgtgtcaatacggtcgagctcttctctcggaagaagtcctaaaagctcccagccgatgtttaacgtgtcgatgatggtacggttatcatggatatcctgtccgatgaaccgtttctcaaattcccgtccgaattccaggtattttttatcgatgggggagagctcatcttcaccgatgacggaggcaagcgctctcgcgtcaccgactttcgcgtagcaggagaagagctggtttgcgacatcctgatggtcctcacgggtgaaaccttcaccgatgccatccttcatcagacgggacagggacggcaggacgctgatcggcgggtagatggactggccgtttaaattgcggtccagaacgatctggccttcggtgatgtatccggtaaggtccgggatcgggtgggtgatatcatcgttcggcatggtgaggatcgggatctgtgtgacggatccgttgacgccggcaacgataccggcgcgctcgtagagggaagccaggtcgctgtagagataacccggataacctttacgggatgggatctcgcccttggaggaagaaacctcacgaagcgcttcggcataggaagtcatatcagtcaggatgaccaggatatgcatgcccttttcaaaagccaggtactcggcaacggtaagggcaaccttcggggtgatcagacgctcgacgaccgggtcgttcgccaggttgatgaacatggcgacatggtcgagaacgccgctctcgcggaaggtgcgctcgaaatactctgcgacatcgtattttacgcccatggctgcgaagacaacggcgaatttctcgtcagaattgtcaccgagggaagactgcatgacgatctgcgcggccagctggtcgtgtggaagtccgtttccggagaagatcggaagcttctgaccgcggatcagggtcatcagtccatcgatggcggaaattccggtgcggatgtagtttcgcggatattcacgggcaaccgggtttaacggttttccgttgacgtccagttttttatcggccaggatcggaccgagtccgtcgattggatttccgagaccgtcaaatgtgcggcccagcatgtcggcggagacgccgatctccatcggatgtccggtaaggcgggtatgtgtatttttcagtgccatgtttccggtactctcaaagacctggatcacggctttatcctcgtacgcttcgataatgcgcccgagcttcttttctttaccatcgacggtcatttcaacgatctcatcgtaagcagccccggaaacgccttccaggacggcaagaggaccgtttaaggagctaagtccaagatattcgactgccatttgaaattcgcctccttatgcgttgcgctcgatgacggaattgtagaaatcatcgatctgttttttatagtcatcaaacatgtcgagacggtcgttcggaacatcatatttgatggcgatgatcttctcaaagatcttttcttctttgaggacggataccggcatgcccatcgcgacgagggcgcgggattttttataaagataaaggatgatctccatcatcttaaactgctttttgagcggaacgcaggtatcttccttgtgaaatgcgttctgctgaaggaatccgaggcggatgacctttgcgatctcaaggacaagcttctggtcatccgggagaacgtcggatccgatcagttttacgatctccatcaggctgctttcctggtttaagatcgtgacgagctggtttctgtagttgacaaagttcttatcgacatgctcggagtaccaggaagaaagatccgtcaggtactcggagtaactggtcagccactggatcgccgggaaatgtctcgcgtaggcgaggttcttatcaagtccccagaagcagcggacgaaacgcttggtgttctgtgtgaccggctcggagaaatcgccgccctgcggggatacggcgccgatgatggatacggaaccttctgttccgtttaagttctggaccatgccggcgcgctcgtagaactgggagaggcgggatgctaagtaagcagggaagccttcctcggcaggcatctcttcaagacgtccggagagctcacgcagggcctctgcccaacgggaggtggagtctgccatgatcgcgacgttgtaacccatatcgcggtaatactcggcaagtgtcagaccggaataaagacttgcctcacgggcggcaaccggcatgttggaggtgttggcgatcagcgtcgtccgctccatcaacgggtttccgctcttcgggtcgatcagctcgctgaattcctccagaacctgtgtcatctcgttgcctcgctcgccgcagccgatgtagatgatgatgtcggcatcggaccacttggcgatctggtgctgggtcatggtctttccggtaccgaatccgcccgggatcgccgctgtgccgccttttgcgagcggaaacagagtgtcaaggatacgctgtcctgtgatcagcggtttggatgccggataacgctttacggtcggacgcgggatacggatcggccacttctgtgtcatggtgatggctttttctgttccttcctttgtcataagcgtgatcagtgtatcattgatcgtatattcaccatcggagacaacggagaggacatcgccctccagatccggtgggatcatgactttatgggtgatggctctcgtctcagggacctccgcgatgatggtgccgccgtagacatgatcaccgcgctttacagtcatgtgggtctgccatttcttttctgtatcaagggatgttacatgaacaccgcggtcaatataatagccgctcgattttttgatagcggctaacggacgttcaattccatcgaaaatattcgtgatgatgccgggagcaagtgtgacggagacgggagctcctgttcccgtgaccggttccccgggctttaaaccggtggtctcttcgtagacctcgatcgttgtgcgttcggaggtcagtccgatgacctcaccgacgaggttcgcctcgccgacgtagaccatctcattcatttgaaaaccgaaatctccggcgagatagacgatcgggccgttgatcccgtaaattgtgccttttgcagccatggtgatttcctcctaaactaaacctgtaatgcgaattgaaagctttcctcggcttccttaagcttcgtctcaaaggagttatcgatcaggatatttttcgaggcgataacggcccgcgtgccgccgagaaacggatactggctgacacggatgtcgcagtcggtcttcagggaaagaagattcagtttctctttatcggacgggtcgatgtagatatggatctcactgtctccggcgaatgctttttcttttttgatctgcgcctccaaaaaggcgtcatatttcggggtttccatgaaacgtgcgagtctgtcgcgcagttctgagaagatctttccccggagttcttcatcttttttactgtaggaacggcggatctcgatctgtcctaaggacaggttcttgtttgtttccctagcgatccgctctttctcggcagcgatctgcatagctgcctgctttttcgcgttttctttatgttcactcaggatcttttcctcgtaagcggtataatcagagactgcctgctcgtatttctttaatgcgtcgcccgtgcagatgtcttcaaaatgttttaacttctcttctgttgtcaaagcagtcacctccttgaatcttatagctttaatccgatcgcgtcatttacatacgcggtgatgaaatccggccgtcttccggttccgtgacggtccgggatctcgatgagcagcggctttttatgttccgtgcggacggtctttacgaggtccgggaactttcgtcccagcgactccgtcagcaggatgatgccgatgttcttgtctttcaatgattcgttgagcgctttttcaagtgtctctttttcttttacgatgacaccgtccacgccggccagccgcatgccggtcagcgtgtcagtgttatcgctgatcagatacattctcatagcgatcctccatttccggatctgcggatcaaagtttaccgatgatcatgaaggagatgataagtccgtacaggcacacaccttcggcaagacctacgaagatcagggatttaccaagaatggaagaatcctcactgatcgctccgagtgctgcggatgctgctgcggaaacggcaacgccgccgccgatgcaggagagaccggtggaaagagcggctgcgatgtagcccatgccggtcgagatgccgccggctgctgcagttgactctgctgcgaatgcagtgccgttgaagagtacgcatactgcaaagagcatggttccgaagaacatcacggtgttggctgcaagagcggtcttataacggcctcttgttttttctcctgcggcgaaagcgccgaacgggactgcgatgctgaagatgagtgcaacggttaaaagaacttttactgcgattgtcatgactgatgacctcctaaattctgtagtttaactgaaagtattatatctgtttctgataaaacggcttgaattcacggccggttcctttgtagaaacggctgaacagctcgtagtactcaagacgaagaacctgaatcccgacgatcagaccttccatgccgcagacgaacaggtttccgagaacaatgaccggtatggacggtgttccggattctgcacctgcaagcatcaggacgacctgcatcatggccgcgtggctcactgcgaaggcgccgacacggacgaaggagagcgtgttagagaagtagcttaaaagcacttcaaacagctcgaaaaagccctgtgtgacgaacatgccgaagccgccggagatcttttcggactttttctccaggatcgcggtgagcggttccttaaagaacataacgatgagcggcaggacgaacattacgatgaggatcgcagctgccggcagcgtgtgtccgctcatgaataaaacgatggttgccgcaagactcagatagaagatgaagcctgcgagaccgtttgtgtcgaaccaggtcttttcgatgtcgtggttcttaaaggatgttgccatgttgaggatcatcgtgaagaggatgaccgccatgccgagggcgatggcaacgacaaacacggtatttaaacggcccacaaacgggagatccgtcatggcttccgtcgggcgcagccacagagcggggatcacgtcctcgaatccgaatacgcttccaaacaggaatccgaagatcgttgagaagaagccgcagcaggaaatgatggccgcaaggttgatcttcttaaatttgtagagcaggaaaccgccgatcaggagcagaagtccctgtccggcatctccgaacatgaaaccgaagaagacggagtaggtgactgcgatcaggagcgtcggatcaaactcgttgtacgccggaagtccgtacatctttacgaacatctcgaacgggcggagcagcggaatgttttttaactttgtcggcgggatgctggtcacatgttctttgctgtcctccaggacgaagaatgtgtcggcatcttttgagagatccttatgaagcttttctgcgtcctcttttgtcatccagccgcatagaatgtagaatggatgatctttgtcgtgggtgcacgccgcatattttctcacattgaagttggtctcatatgattccagaacactgcaggcatcctggagaccggatcttcttgtgagcagatattcggaatcttttgcatcgagcgcctgctcctttgctttcagctccgcaagctcattttccagccgttcgacttccgtcttcggcgttccggcatattcatccggcaggtagatccgctcaaactgcatggaggaaaataccgtgtcgatccggtcggaagtgatatccggcgtgaagtagagcagggaaatatatttgtcggattcatggcatttgaacaggatcgtctcatccgaacggtcggcgaaagcctgaagctgcgggaaactttcctttctgacacgtccgaaccggtatttgatgtgtttgagcttcaggacggccggaatgtcgaagtcgagttccacatacaggcgaacctgttccagcagagaagagacttctttttcttttgatttcagagcttcccgctcctcggttgaggcggcgagctctgtatccatgtcattgacgagcgcgatggcattctcgacaggcatcgtacctgcatttggagccatctgtttggctccggcacaggaagcgagaagtttctgcgctttctgcagcggttcccggtatggattggtgccgggatatggttccagctttgatgcagattttaattcggtcagcgcgttttccaactggatctcatatcgtgagagatattggttgacgattcggtcgagatcgtttttcggcccggagatgctgacgaatttcattttttcaatcacaaagcataccccctttttagctttctgccaggcaggagaggatttccggagtgctcaggctgtaacggatcccctcgacggtggtaatgatttttctgatctcctcttccttaaaatagaagtaggtgtttaaagcagcagcggagtacggatctttccgtccggatctgctgtacatggcatcgagaagcgcccggaataacgagcggaattccggattctcctgctggtctccggatgtatggaagatccggtttccgtagcgggtccccttcaggatccggtcaaattcctcgatggacgatgcctcggcgagctctctcgccttggatcttttcaggcggtgccagatggggatcagaagctccatgatggcatcggcggataatttgtagtggcgtttcgctctcgcgagccattcgatatttaaaagatcgatcttttcaccgacacagtcggcgatagccctctggtcatccttcgagagctgatcttttaagctcttctcaaatcggatgaaatacagagtatccagcgcggattcaagctcgaacagggaagtgatgccctggtctttcagttcctttaacggtccgtagtaaggagtgttctgaatactgtccagaaattcgtcgagattttccgaatccgtcagtgcggtaaaatccaggtgcgagtgttttcgaaagaacggctcgaagctcttgaaattcagctcggagcgttttccggagaccgcatcccgcagacaccgcttcatgacatcgatctcaaaatggagaaagtagagatccagaaatttacgctgggtcccatttgcgaaccggtaaagtcttgaaaagtcgttgtgaagggagtgccataaaagctcttcgatctgacttctgtggagctccccgttctcaatgccggaaaagacatccgcataggcgggatcatttttcaggtaatcaacggcagccggtacattctccattccagcgaggaccgcgaactcatcatccgtaagaaaatgtccgcgcatcgctgcaagctttgcggcgatcgcgctgtaagtgatgagacttcccatagatcacacctcggtcatcgaacggaagagggagtccacataccgggaatgcttttcttcataatgctgttccaggctggccatctgctcaccggcggcagttttctgctttccaagctcagcggcagcttctgcctccattttccggcgcatggactggatctccagttcagtttcatgattcagctcttcgtcaaactgtttcgtcttcacctcatactccgctgccaggttctttttcctgtcggcggcgccgtccaggatcgcggcggttttttcttcaatctgggagagctgactgataatgttgttcatgtgatatgctcctttcagagaaggatttttcctcattcggggatgggacaggacccagaaaactgatgcagatacagaagatgttaagaagctgttcctgagccgctgacccgtttgataccggactgttttatactttgtgtgtttgcagacccggcacaatctaatataacttgtaaaattataatttcaaatatataataattatgctgatataacatgaatattatggtatttagaaaatgctataaatgagcgaaaaattaacacaaaattaacaccgtgatcacggggacagcggaaaagagggaaaagcagtatggagatccagcagtttcggtattttttgacggcagcgaggtatgaaaatctgacaaaggcggcggaggagctgcatattgcccagccggctctgtcccagtcggtcaagcgcctggagacggagcttggagtgagtctgtttgaccggaaaaatcaccggatcgagctcaatgagcagggaaaactcttaaaaaagcgcctgatcccgctgatggaatccatcgataatctaaaggatgagctatgggagtctgtttattcatcggagggcacgatctacttaaattttctgtccgcatcgaatctgatcacgaactgcatcatttcctaccgtgcccagaaaccggacgtccagttccaggtgtcccagctcgagatgacggaaaactgtgatatccatattgaatcgaggatcgcgatgtctgtgacgccgcctcatccgcaggaacttccagaggggatcgtgcggcgggaatatctgcgggaagagatttttctggcagtaccgccggactcgaaatttgcgaaacataagacgatcgatctgagggaagtgaaggaagaaaattttatccggctcggaaacgggtggcagctccggatgatctgtgatgatttctgccggagagccgggatccggccgcaggcggtgtttgagagcaacagtccggagtcggtgcgaaatctggtcgcagcggggctggggatcggcttctggccggaaaaagcctggggaggtcctccgggacacggagtcgttctgatcccgatccgctatccgatctgccggcgggatctggtggtcacgatgtttgaacaggcgaaagataagccggtcgtggatgaatttatggattatttctgcagatattttgaaaaagagacgctggagagcggcgatgtgacattataaaagggcgggatcctgatcgatcccgccctgatcaaaaatttccagacgatatggtgaaatctattctgccgtgaggaattcctttgcgacataagcttcctgaccgttgtatttgatgacagcccaggtatcgtcgtagtcacggagatattcgacggatgcgccaggatcgagctttccgatccggtcagcatcggtggacggttctttgcggacgttcagggtcgttgttgtcttgtaggagccggaaacggtattctccggttctgttgccgcttcggtcgtctcagctgcttctgtggtgatcaccggtgcagaagtctcttcagtagccggtttcttcggtgtgaggacccggatcaggacgatcaggatgatcacaagaacgataggaaccacaaatttgagaatatccgtaggctgaagtccgctgccggtccgctcggaagcagaattccggcttcttgactgttgaggacgggcacctgccggacgtctgccccgtgacggctttccgttgtccgcgaaggagtagatctcctgagacagtacatggtaagcctgatttgcattgtacgcgccgttatcgccgtttttcgcggcttttgttccgatctcgtagatctgtaaatagtgttccgccgtggattttgagatccatccgctgttgtagagctcacggatcatggcgtccatggaactttccacgatgccggcctggtcacactggagttttaccatgtactccacagtctggcgggctttgatcatggactgattatattgtttctgtcccatgagacgttccgtctcctggacattctggcggatcttatcccatccgcttgggatgtcgcttcttgccatataaatccctccgtttgtgtattttaacggctgctgcaggagaatgctgctgtccatgcgctgcagaacgacagcaaaaataccagatcactgcggaaaccgtttttttcatgtgagctgcgcctgtgaagagtgcagcagaacgattttgtcagtcattatctttattatactggaacaataggaaaattgcacgaacaatttatgaacaatttaagaactttgttacagcgcatgggcataagagtatagttcccttgcaaaacagaacggtcaatgttaaaatgagacacaggcaaaaatcaggatcattttgcagtcggtccgcggctttatctgagataagcgggagcgctgctgtgaagataccgtacagttacagaccaggaggaaagctattatgagattacgccatatcaaaggcgcagaagaagagatcgctgagagcccatatgtggtccaggatccacagtcactgaaaggaaagtggcatgagtttttcggaaacgacaacccgatccgcattgaagtcggaatgggaaagggaaaatttatcatggaactcgcccagatgaacccggatatcaactatgtggggatcgagcgctattccagcgttctgctccgcggactccagaaacgtgcggaactggaactttccaatatctattttatgagaattgacgccttagaacttgcagatgtgtttgcggaggacgaggtggagaggatctatttaaacttctcagatccgtggccgaaggaccgccatgcgaagcgccgtctgacatccgaccgtttccttgcagtgtatgacaagatcttacagccggacgggatcatcgagttcaagacggacaaccaggatctgttccgctattccttagaatccatcccggaagcaggatggcaggtaacatcccatacctttgaccttcaccatagcgatatggctgagggaaatgtcatgacggagtatgagacaaagttttccgcggaaggcaagccgatctgcaagctgacagcctgtcgcgataaaaagaacacggcgtgcatatactaaatgggaaacgatgaaaaggctgtatcttaaatgagtatgtggacatgtgtaaagcggtggctctcacaggcaacctgcgacaagacagaattgaaccggaaaatcatccggatcaaaaaatgctttgacgaggcgaatgatgtggtctgcggcaaaaagaaataggcgcggccgccaatcggaaagctgagaaagctcaggaaaggagaaaataacatggaagcagtatttacaagcgcaaattttgatactgatgtgctgggatccgacatcccggtcgtagtggatttcttcgcgacatggtgtggaccgtgccgcatgatggctccggcgatcgaagaactcgcggaagagtatgccggaaaggttaaagtcggaaagctcgatgtggatgagaacagcgatatcgctgtccgttacggtgtgatgtccattccgacgatcattctctttaaaaatggagaggttgtgaaaaagagcgtgggacttcaggataaggaagttctggagagtgcgatcaaagagatgctgtaacggcagttagcacaggaaatgatgaaagaaggtcggcggcccggagagaacatgttaaagctctccggaaagccgacctttttttcaaataaaaaatttttatttacgcgaacaacgagccaaagtccgcgcttgcacgagaccttggcgactgtcgcgataacaaggggaaactcgcgaagcgtgttttcacttgttttgccggaattttcgagtgaaagaaatctgaaagaaatttcttcataaaatttcttcgggatccggagatgtaaaaacctcggaaacccttgtatttacaggtgttttcaagtgtatcttttgcacatgttttttgaaaaacaaaaaaataaaaaaaatttcaaaaaaggtgttgacttttttgctggtttatcctataatacaaaacgtgccacggatgaggcaaacaaaacaaagaaaaacaacaaaccaagcacctttagctcagctggtagagcagtagactcttaatctatttgtccagggttcgaatccctgaaggtgcacgagaaaagcactgttttagcggatgtagaagccgccgggacggtgttttttgctgtctgaagatttatttctgtttttgcatgtcaaatacaaaatttatttttccgaaaagaatccccttcttataatcaatctgatataatgagcgagagagccagaaagatgcctgcagatttcaggcattcactgtttgccggaggacaggtatctgttttggacgggaaagaaaaatcttgctagtgaaaaaaatatgaagaatagaggaagataggaatcatgaaagagatcaggatcacggatatcgagaacattaagatcggcagcgcggaaaacaaggaagccggaaccggctgtacggtcattatctgcgagcgcggggcggcagcgggattagatgtgcgcggcggcggtccggcatcccgggaatcggagcttttaaagccgatggcggctgctgacgtgatccaggcagttttactcagcggaggcagcgcattcggtctggacgcggcaggaggcgttatggagtacctggaagagcgcgggatcggttttgatgtggggatcacaaaggttccgctggtgtgcgagtcctgtctgtttgacctgatggtcggggattacaagacgagaccggacaaggcgatgggatacgcggcatgtgaaggcgcggagaagaacaactatcaggatggaaatttcggagccgggaccggtgcatcggtcggaaaactcggagataagtccctctgtatgaaaggcgggatcggaagctatgcagtccagatcggtgatctgaaggtcggagccattgttgcggtcaatgcgcgcggggacatctatgactggaagaacggaaagaaagtggcaggacttttaaataaagataagaagacgtttgccgatacggaagaagcagtctataagagctatgaagtgatcaaaaacaaattcaccggagcgacggagaatacgacgatcggcgcggtgatcacgaacgcggcattcccgaaaagcagtctctgcaagatcgccgggatggcgcatgacggctatgcccgcgcgatccgcccggtccacacgacttcggacggggacagcatctatgcgctgtctgtaggcgatgtggcggcagatcaggacatggtcggcactctcggcgcccaggttatggcggaggcgatcctgcgggctgtaaggagcgcaggatcggcctacggacttgtcggtgcgaaagacctgtaagtatatccggtcagacgacgctgcaaacaaatggcgggtttacatctggcctgttacacgcaggtaaagtccgagttccatttcaagtgcctctgtgatgccgcgctcatccagctggaaatggcagttgtgatgcggggaagaggtgattgggcgttccggatccgccataccgatctggaaataggcgcccggcttttcaagaaggtaataggcaaaatcttcgccgcccagggcgtccgggcgttcataaacggtatatccgagatcttttgtgacactgcggacagtttcgatttcttccggcacattgatggcggccggatagccaagcgtcgttgtcacgtcgcaggtgagtccgaaaccggcgcagatgcctttgctgatggaatgaatggagtcgaagactttatcgatcagctcattatttaaggtgcggacattgcctcccaaggtcactgtatcggtgatgatattcggatactgaccgccgttgatgtaggagaccgtgagtacaccgccttccagaggatttttcttttccgcgaggatctgattcagcgcagacccgaccatgcaggcaaccggaaccgggtttaacgcgttctgcgggtaaccgccatggccgccttttccgtggatctttacctcatagatgccgatcgctgcggagtatgcccgcggagtcacggcgatcgtaccaagcggaaaggcagaagcacagtggaaaccgtagacgaaatccacgccgttcatgacaccctcctcacagagcgtcttagcgcctcccgggagcttttcttcggccgcctggaagataagccggacagtaccgcagacaagctccggatgggctgccaggatctttgcgaaggtcagaagaaccgctgtgtggatatcatgaccacaggcgtgcatgacgcccggaacctcggacttatatggaagatcattttcctcttcgacagggagcgcatcgatgtctgcgcggaaggcgatgcatggtcccggtttctgtccctttatgatggcaacggtgctggtcccggaaattccctccatcagcggaatgccgagtgatgtcagggtgctgcggatatattccgctgtgtttgtctcctcgaaggataattccggatggcggtgaagatagcgccttgtttcgatcagctctttctcatagggactggtgatggatttgacaaattctttcataaaaacctccaattttcagattgttgtggttggtgtattcaaggaagaaacgacacttcgacgatcacgacctcattatcggtcccgactcgcatggccggtccccagactccggcgccggatgtgacaacggatgtcatggaaccttttttcaggactccgcaggcgttttcccagagaaaatgaacgacgatgtttgccgggaacatctgcccgtcgtgcgtgtgaccggagagatcaagatcgactccggaatcagcagcttccgagagttcacgcggctcatggtccatgacgatgatgggacgagaatgatcgagaggttcagtgatctccgaaaaggtctttctcgggagctgttctttatgcgccatctccttatcccggcggcccgtgagatagaatgtatcgtcgatgagcaccgtctcatcttcgagcatcgtgatatcagcgcgggctaaaaattcagagaagcgctcatcccggacgatcttttccttctggggaaatgtaaatccggcgaggatcttctcattcacgtcatggttgccccagcaggcatatgtgccgtaccggcttttcagccctgagaggatatcggcgacgccgtcaggatcccggatcgcatcgtaatcgttgtcgaaaagatccccggcaatgcatacaagatccacatgttcgcggttgatgtcgtccacgatcgtacgcacatgggattttgtggagttgtatccgaggtgaagatcggcgatcagggcgatcctgagtcccggaagtgaggagctcttttcaatcacgaccgggtcatggcgcacatacacgcgtcttgcgtgcaggacaccgtagacgctgactgacaggatcagtgcgatggcaaagcctccgaagatcacgagatttttcggcatggtatgcagcatggcagggtatcggtatttcatgaagaaggaatgaccggtgatcctgcggaccacatcgaatacgaggatgaagagcaggatatattccagagtgccgagccaatagttgctgatcacgcggagaaagtggtggaacggttcccttgtgatcagaaatccggtcagcgggctgatcgcgaaaaacagatagatcaccgtgacggggatcctgaaaaacggggaatgaagcgccggtgagcaggaatctgcccaggcgtagagccataaaagaatgtatgcctgaaataacaggtagatcggagataaaaatactgctaacattgtgtactcccggtgatagttaagaaaatttgtaatgatgcgcagaaaccagaaggttcatgccggaccgtttctggtgttaagtatagcgggggatttccggttttgcaatacccgccggaagcatagaaaagaggttcatatgatcgatctgacaggaatgatctccattccatatttaaaaaagacaacatttacaggaagcgaaaaagggacgaatttcatgatccgtaaggtgagcggggaagaaggcgagccggacaagatccaggcgatcacctggccgggaccttttatcttctcggtgacggaagaggaaaaaaagacgtaccatgattttgagttcagcgaggacgggatccatgcggctgtggcatggctgaacgaggtgacgcacagtaaagagtagaaaatccggcagatagaaagaggacaccggcagcggtcagaactgtcggcgtcctcttttttcgcgaacaacgagccaaagtccgcgcttgcgcgagaccttggcgactgtcgcgataacaagggggaaactcgcgaagcgtgttttcgcttgttaatgatgcgcacatgcgccgtatcttacatcgacggtgttcttgcggtgagatccagggtcacatctgaaaatctctgtttcaggagcgcgcagatctccttgcgctgttccatcagcttcgggatcatgtcctcggtgagctggagcttcgcacaccacggagaggaagctttcgctgcaccacccgccggattctggtagacgcggacacggaaatcgcgaaatccaagatcagcgagagatttttcggaccattccacatccttcagtacggaagcttcgatggaaactccggccggaacgcgtgtcgcaagacaggcgtaagcaggcttgttccatgtgaataatcctgcattatgggaatattcccggacggaagcttttgttacgccggaaaggcggagcggggacaggactttcatctcttttagagcacgcatgccagggcggtcgcctgcatcgtcagatgcatttgtcccgtccatgatctcggtaaagccgtcttctttcgcggcctttaagatcccgccaaagacctggttcttgcagtaataacagcggtcagccggattgctctttacgacctgatcggtcaggacgtcaaacggcaggaccgtcaggtctgcctttaaagactcagcgagaagtttcgcgtcatccagctcaaactggggctggaacggagtggagacataataggcatgtacatttactccacatgcctttgcagcatagagaagataagaagaatccgttccgccggaaaacgcaagggcgatcgtgggatgctccgcaaagaattcccgaagcttttccggaacgcagtctatggaaaaattgatcgtattcataaatagatctccatcctttcatagtaatttggtgggtttattcgcttattataattcggcaagtcatataagtcaactgttacagttcacgggtattccacgaccactgctgtatcatgtggaactttcagttcagaaaatttctgcccgtgaaaagtaaaattcgagtattttcatttttcgatgtttgttatatcataaattaacagaatgccggtttcaaacaggtcccggcagaacaaaatcataaggaggatgcaaagctatggaagacagagaactgatcacaaagacatccgaatatatagacagccacagggatgagatgctggcgctctgggagcagatcgtttccatcgagagcggaacgggggataaagagggcgttgaccgggttggagcggtcctggatacggcactgaaaagtgccggggttgagacctcattgatccggatggagcattatgggaatttattgacaggagtattcggaaaagaaaatccgggtcagcccattgtcctgatcggtcacatggacaccgtgtttgcgaaaggaacgctggcaaaaaatccgttccggatcgatgagaacggacaagcccatggtccggggatcctggatatgaaggcggggctggtgatcgcggtctatgtcttaaaagcgctccatgaatatggctatgataagcgtccgatccgcgtggtatttgccggagatgaggaaaacggacaccgccagacgaacgcggaggacgagatccggagactctgtgcgggatgcgcggcggcgttcaactttgagacgggatttctcgatgacggacttgttgtcggaagaaaaggttcctgcagagtgacactcaccgtacacggcgttgcggcccacgcgggaaatgacccgcagcgcgggcggaatgcgatcctggagatggcttatgaggtcatcgagatccagaaacttcatgattttgaacatggactctttgtcaatgtgggagtaatccagggcggaaccgtcgcgaatgcggtcccggcttcctgcgaggtgaatatcgacatccgctatgacagtctcgaacgactcgaggagactcttcaggcgatcagaaagatcgcagagacaaatacagtcccggacacaacggcggagatgacctggacgaagccgagtacggtgatgccggtatcggaggaaaacctgaaacttttcaggcatgtccaggaggcagcagatctgatcggatacggaccgctgacgacgaaaaaggtcggcggatggtcagattcctgtctggcagcagcggaaggtgttccggtcgtgtgtgctatgggagtaaagggcgcgaataatcattcaatggaggagtatgcagtggtggataccctgttttcgagagcaaaactggcgcttgcatccatcatcacactgtagaggatataggaatgacaagaaaaaaatatgacatgctgacggacagtccgggaaaggcactcctgttttttgtgcttccgatgatcttcggaaacctgtttcagcagttttacaacatcaccgattctgtggtggtaggaaaattcgtcggggaacaggccctggcggcggttggtgcgtcctatgcgatcaccaacgtttttatcgctatcgccatcggcggcgggatcggaagctccgtggtgatctcccagttccttggggcgggaaactatggaaaaatgaagacagcggtctatacgacaatgttcaatttcctcgggatcgcggcattcctggcagtgatcgggatccgctacaacaatcagatcctggatctcgtcaatgtgccggaggacattttttcggacgccgcgctgtatctcgcgatctattttatcggactgccgtttttgttcatgtataatgtgcaggcgtcgattttcaacgcgctgggggattcgaagaaaccgctgtaccttctgatcttttcctcgctcttaaacattgcgctggacatgatcctggtgatcgttttcggtcagggagtccgcggggttgcgctggcgacactgatcgcccagggaatttccgcagtaatctcgttcgctttgctgatgagaaagttgaaaggttatcgggaagaggaaaaagtccgtctctacagcggagagatggcggcatccatggtgaagatcgccgttccatccacgctgcagcagtccattgtccatgtgggtatcctgcttgtccaggcggtgatcaacagcttcggatcgacggcgcttgccggatattccgcgggaatgaggatcgagtctctgagcatcgttccgatgcttgcgatgggaaatgcgatgtccacgtttaccgcgcagaatatgggggcggggaacattgaccgggtcaagaaaggctaccagatgtgctatgtgatcgtcctgacagccggggcggtgctctgtatcatgtatcagctggcgggaggaatgttcgtgtcactgtttcttgacagcggaagcagcgaagcgtataacataggattaagctatgtgagatttttgtcattcttctactccttcattggtctgaaggcgtccacggacggacttctccggggagccggggatgtggtggcgtttacggtggcgaatctcgtaaatctcgcgatccgtgtcagtgtgacgaacctgtttgccccggtctacgggatccaggtggcatggatggcggttccgctcggctgggcggcgaactatgtgatctcatttggctggtatctgaccggaaaatggaaaaatgtccgggtgatcaggaaataggacccctggggcatgatagaaattgtgtatgtacgagaaagagaaaggacgaagatcatggaacagaaaatacttgcttacttaaaagaacatgaggcggagatctttgaggacttaaagaccctggtacttgcggaggccagcacttcggatatcgaagcactggcaaaggtgcgtgaaaagctggtaactctgatcaaagagcgtacaggggaggactgctttgtctacgaagcggaaaacggacactgcccggtgcgcttccagtacgggaaaggcgaagagaagatcctgttcatcggtcattacgatacagtccatctgatcggcgcgttaaaatactatgcggaaggaaatgaacttcacggaccgggagtctatgacatgaaaggcggactggtctccgcgatctggactgtcaaggcctataaagacctcgggatcgatccgggaaagcgtctggaatttatcttcaacggggatgaggagacgggaagcgcggagtccagtgagatcatttgtgagcttgcaaaggatgtgaaagcggcgcttgtgtgcgaaccgtgtacggcaaacggcgatctgaagaccggaagaaagggacttgtccgctttacggtaagagttcacggaaagtccgcccatgcgggaaatgcgcataaacagggcatcaacgcgatcgaggagctggctcatgagatccttgcgatccagaaactgacagattacgaggtcggaacgaccgtcaatgtcggtgtctgcagcggcggaacgaaaccgaatgttgttccggacacagccgagatcgagatcgactgccgtgtgaagacggctgccgagggagagcggatccggaaagcgatccgtgagatccggacgaccgtcccggggacaacaagggaagtcatcgagcgggacagcaagatgccgatggaggagacggaagcaaatctggcgctctttgagaaggcgaagatctgcggcgagaaagtcggactttccttctcccaccagtttgttggcggcggaagtgacggaaatgaagtttctgcacttgggatcccggtcctggacggactcggagcgtctggagatggcgctcattccgcaaacgaatatatcctgatcgaccagtatatcccgaggatcgcgatgctggcggcgtttgtgctgacgatctgagaagacagatgagccgtaaacggtgatataaaatgccggaataaggaatgtgacaaaacgacgaaagtggattgagaatctcttttgatatgttcagaaaaacagaaagcgcatcatacagcaaaactgccggtatgatgcgcttttgtcattttcgcttgttttgttcatggacatgaccctgatttcaggtccggatcctggaatcagtttttgatcggaaatgtaatctgagccttaaagaggtcgccgtcgatgatcagctcgaactttccgccctgaagtgtggtgaggtccttcgcgatggaaagcccaagaccgctgccttcggtagttcgggagacatcaccgcggacgaatcgctcggtcagctcatccgggctgatatttaacgggttcgcggacacatttttgatcgtgaagacaacgtcggcgccgtggtcctcgatggtgacgtagacgcgggttccctccaaggcatatttaaatgcgttgttgtagaggttttcaaggacgcgccataaccgccgcccatccgcctcgatcatgatgacctcgttcgggagtgtattgacgatttcgagatggcggatcgcatatttttcctcaaattctccggtcgtctgctggacgagttccacgaaatcgatatttgtgatctccagcttgatatttccggagcttgcgcgggatgcctcgacaagatcctcagtcagcgtctttaaacgctgggatttctgatccaggacttccagatatttctgaacggtcggatcttcgatatgctggcgcttgatgaggtccacatagttgatgatggaagtcagcggcgtcttgatatcgtgggaaacgttcgtgatcagatcggctttcaggcgttcgctctttacttgctcggcaagcgcagtctcgaggccgtcgctaatgcggtttaaaccttcggcaagttctgcctccaggcttgagaaatcgtttacgtccaccttgtagctcgtctcgccggatgccagcttctcgatcgcagcgtggatcttatccgtctggtctgcgttccggtagatgaagtagaataccagaaggtttccggcgatccaggcgatcatcacgatgataaacggaatgaactggaacacgctgttctcatgacggaagatcatgaatgcgcccagtgtgatcatgaacacgttgtatgcaagatatagaataaaaccgaccgtgatccgatagcggaaggtgctttccgacaacgtttccgtcagatcatggaagaagctgtttttccagagtgtttctgccttgtaccggcggagcaggctgaaaaatgtcaggatcacacaaaaatacaggtatccgaacgcaacgagcagatttgcgcggtcccagtaatcggaagtgacgaaaagatgtaaaatctttgctgtcaatggtgcaagaaactgtacgcagagataggatacaagcgccatcagaagcagcataaagtcggtttttgtccggtcgaacggatagagcgtgatcgttctgtcggagagcgatgcatgaccggaaaggaacagcaggaatgcgaaggttacgatggaaccggcaagaccagcgatcacgatgtagagaccgtttgcaaaatttgcgcgtgatctggtataggcggtgtatgcctgggcatagtcatcgtttgccttgtaggaagtatcaagaccgatcacaacataataattattgctgttatacggattattctttgacatcagggccgggatacttggaaagttagattcaaaattcgtccggactgcgagatcgttggaatcaccggagtaataaatatatcttcccatcgccatcatgtcatcgtttgacatttctggtgcgtttgtatggatctcatagatcgcgtcattttttgagtagtacgctacacggaaatagaggtttgtgaagtcgctcatgagtcttgagtagatcgaatagtaggcggaaaaccgctttaagatctcataagtcagatccggcatcgttgaaaaggactgatccggactagtcaggtcggcttcatcctggtaacagcggtagcggacatagacctggtcctgatcttccgcagagagggattccggaccgccttttaaggcatagttgtcggattcgtccatatagtagcccagagactttccgtactggatgatatcgtcgagtgtgtaggacttttctccgcctggacctgtggtgacttccagaacgacttttgaatagtcaacttcgccgttggattcaaaaatatcctgatactggacataatcgaaaatgttggtgatatccgcctgaacctttttgctgaaatccggggactgttcgaaggtctccgttttgatccagtccagaccgcgcccgtagttgctgtttaaatacatgaacccgatccccacgagtgtcacacaggcaaagagaaagtgaaggaagccgacgagacgcttgaagaatgagtttgtctttttttctgccatctggactctccttactgtttctcgatcttatagccgacgccccagactacctttaagtagcggggctctttcgggttgatctcgatcttctcgcggatgtggcggatgtggaccgcaacggtattatccgcgccaattgcgtcttcattccagattttttcataaatttgatcaatagagaaaactttccccgcgttctttacgagaagaagcaggatgttgtattcgatcggtgtcagcttgatcggctcgccgtcaacggtaacttccttgttctcatcgttgatcatcagtccgccgcacttgtagacctgggagctgccctgctggttcaaattgccgagctgggtgtagcggcggagctgggatttcacgcgggctacgagctctaatgggttaaacggctttgtaatgtagtcgtcagcgccgatgtttaaccctaagatcttatcggtatcctcggatttcgcggagaggatgatgatcgggatactgctggtctcgcggaccttaagtgtggtgcggatcccgtcgagacccggcatcatgacatccacgatcattaagtttacttcattcttctccagaagctccagcgcttcgtagccgtcgtaggccttaattacattgaaaccttcgccggtcagataaatattgatcgcttctacgatctgtttgtcgtcatcgcagacgagaatggttggcataatcgattcctcctcatatcagacataataaaagatgaaaaatcgtaactgaccatatttccagttacgaaaaaatcaaatcaaagaaaaaatacatcataatccagtatagcataaaaatgacgcaaaaacataaggaacgttcttaaatttttatgtagagatgtaaaggggtgttacagtacacgggtactctatgcccgcgcactgtaacaggattttaccgatgcttcgcattccgaatcggcaaaatccgcggccataacggtatcatacggaattttcagttcagaaaattcctacccatgcaaagtaacaaaggggttactgtattgtacaaaaattttagttcagaaaagcttttgatacaacgcgtcgacttggtgcagtgacataggtgaaaaaatatgaacgtaaaaatttgtgtataatgttgtgaaaacgaagagtaaataatcgcgcaagaggttaaaacaataaaaaagtatagaaaactttgtgaaaattgtacaaaatatatatttctctgcgaaaaggttgataataattgtgcaatatgctatgattgagttaacttaaaaaagaagccgtgataggagagcaaaatgtaatcagctaacgattagctgttgcttggtgcgctccttttctttttgagaaatggagaaaagtttagtgaaacattatttttatcaggcactggaagaaaacccgatcatcgcagcgatcaaaaacatggatgatctggagctttgctgttccctagaagagatccgcgtggtatttgtcctgttcggcgatatctgtacgatccggacgatcgtaaaacgtttaaaggacgccgggaagatcgtgatcgtgcatgtagacctgatcgcgggtttaagcagcaaggagatcgtggtggacttcattaaaatgtcgacggaggcagatgggatcattagtacaaaggtcccactgatcaggcggggaaatgaactggatttcataacggtccagaggtgctttttgctggattccatggcgtatgaaaatttaagacagcagcagcatcaggtaaagccggattatatcgaggttcttccgggaatcatgccgcaggtcatctcaaagatgtgtaaggtgtcgaaagcgccgatcatcgcaggcggactgatctccgagaaggaatccgttatgagtgctctctcagcgggagcaatggcagtttcatctacgaagcatgaagtctggaagctgtgaatagactgataacacaagctgtttcaatgccgggaaaagggcaattgagataaagcatgggaaaaactatattgaaggaggaattggtatggcaaagtatgtaatggcgctcgacgcggggacaaccagcaacagatgtatcctgttcaatgaaaaaggtgagatgtgcagcgtagcgcagagagagtttacccagtatttcccgaagccgggctgggtagagcacgatgcagacgagatctgggcaagtatgctgggggttgctgtagaggcaatgaatatgattggcgccaccgcgtcggatatcgcggccatcggtatcacgaaccagcgtgagacaacgatcgtctgggataagaataccggagagccgatccatcacgcgatcgtctggcagtgccgcagaacatcggaatactgcgacaccttaaaggaaaaaggcctgactgacaagttcagggagaaaacgggtctcgtgatcgatgcgtacttctcaggaacaaaggtaaaatggctgcttgacaatgtgccgggcgcaagggaaagagcagagaagggcgagctgttattcggtacagtcgagacatggctgatctggaaactcacaaagggagcggtccatgttacagactactccaacgcgtcccgtacaatgctcttcaatatcaatactttacagtgggacgatgaaatcttagcggaactcgatatcccgaagtgcattctcccggagccgaagccgtcaagctgcatttacggtgagacagacccgtcttacctcggcggaccgatcccgatcggaggcgctgcaggtgaccagcagtccgcactgttcggacagacctgcttcaatcctggtgaagcgaagaatacatacggaaccggctgcttcatgttgatgaacaccggtgagaagccgatcttctcaaagaacggtcttgttacaacaattgcatggggcttagacggaaaagtcaactacgcactcgagggctctatcttcgttgcaggcgctgcgatccagtggctccgcgatgagttaagaattatcgattctgcaccggattccgagtacatggcaaagaaagtaaaggatacgaacggctgctatgttgtaccggcattcacaggtctcggagctccgcactgggatcagtacgcgcgcggaacgatcgtaggaatcacccgtggtgtcaataagtaccacattatccgcgcgactctggaatccctcgcatatcaggtaaacgatgttctggaagcgatgaaggcagattccggtatcgagcttgcggctcttaaggttgacggcggcgcaagtgccaacgacttcttaatgcagacacaggccgatattatcaacgcgccggtgaaccgtccgcagtgcgtagagacaaccgctatgggtgccgcttatcttgcaggtctcgcggttggttactggagcagcaaggaagacgttatcaagaactgggcgatcgataagacctttgagccgaagatcgaggctgctgagagagagaaaaggatcaagggatggaataaggctgtgaaatacgcttacggctgggcaaaagaagattaaaccagatattaaatgaggaaaaggttttgggtaagacgtacggcttgtaaaaaatggacttgaatgggaatcattatccgaagttacaggaacaaatcagaaagttttgaaaaaacagaaaactgtctccggcttttggggggaacgaaagccggagatgactaaaacaacaaaaagggggattttttatgctgccttatattgcagagtttcttggaaccatgatgcttatcatcctcggtgatggtgttgttgcaaacgtaaaccttaacaagtccggaatgaaaggtgcaggagctgtccagatcacactggcatggggccttgcagttctggtaccggcatttatcttcggagaagcttccggtgcgtccttcaacccggcgctcacgatcgctcttgcggttgacggaagtttcgcatggtctatggtgcctggatatgtgatcgcacagctggcaggcgcgtttgtcggcgcatcgatcgtttatctgctcttcaagggacagtttgatgcgacagaagatccgggaacaaagcttggcgtattctgtacaggtccgtcgatcccgaacactggattaaacattttaagcgaagcagtcggtacatttatcctcgttttcgcgatcaaaggtatcggcaatgtaactggtctttcaacaggtgttgataaactctttgtatttggaattatcgtttccgtaggtatgtccctcggcggacttaccggttacgcgatcaacccggcaagagatttaggccctcgtcttgcacatgcagtccttccgatcaagggtaaaggcgattccaacttctcttacggtcttgtagttccgatcgttggaccgatcatcggcgcgatcgtggcggttctcctttatggagcgattccgtggtaggataaaaacagagggctgtgcccggtgcagtacagcttaataatcagataattgtggcatgagatgagagagcctgacaggataaccgcataagggtatgcgtttacttggcgggctcttttctctcaaggacggacaccgccggattcccaagtgggatatggcggaaatcttctaaaagagacaggatgtaaaggagtgaacggtaaatgtatgatgtgatcataatcggagcaggagtagccggggcggcatctgcgagagaattgtcgcgctatcaggcaaagatctgcgtgctggagaaagaggaggatgtctgctgcggtacttccaaggcaaacagcgctattgtccatgcgggctatgacgcggcagaaggctccctgatggcaaaactcaatgtacgcggaaatgaaatgatggaacaactgtcgaaggacctggattttccgtttaagagaaatggttcactggtagtctgcctgcatgaagacgagatgccggggcttgaagctctttataaacgaggaatcgcaaacggagttccgggtctcaggatcttaaaccgggaagaactccgggcaatggagccgaatatttccgatgaggcatgcgcagctctttatgcgcccacgggcggaatcgtatgtccgtttaacttaaatatcgcgatggcggagaatgccaacgcgaatggagtagaattccattttgatacggaggtcaccgacttaagaccggtggaagacggctgggagatccggacaagcaagggcatgtataagacgcggtatgtcgtgaacgcggcgggtgtctacgcagacaaatttcacaatatggtaagcaacaagaagatccatatcaccccaagacgtggagattactgtctgctcgataaaactgccggaaaccacgtgagccatacggtgtttgctcttcccggaaaatacggaaaaggcgttctcgtgacaccgacggtccacggaaatctgttggtgggaccgacagcgatcgatatcgagaataaagagggaaccaatacgacgagagagggcttaaatgaggttatcacaaaggcagagatgaatgtgaagaacattccgatgcgtcaggtgatcacttccttcgcaggactccgtgcccatgaggatggacatgaattcctgatcggtgagctggaggacgcgaaaggctttatcgactgtgcgggaatcgagtctccgggtctgacaagctccccggcgatcggtgagatggtggcggatatcctgaaagagaagatggatctcagggaaaaagagaactttatcgcgacgcgaaaaggcgttctgaacccgaatactttaagcaaggaagaacggatccggttaattaaggaaaaaccagagtacggaaatattatctgccgatgcgagatgatcacggaaggcgagatcatcgatgcgatccgaagacctttaggtgcaaaatccttagacggagtaaaacgcagaacgagagccggaatggggcgttgccaggcaggattctgttccccgagaactatggagatccttgcgagagaatgccataagagcatgtttgagatcacaaaatccggcggaaactcgcagatcgtcaagggaatcaataaggattcgttataaaagggaggcgtcagagcatgaaatcgtatgatattgtgatcatcggaggcggaccggcgggtcttgccgctgcagtttccgcgaagaaaaacggaatcgatagtattctgatcctggaacgtgacagggagttaggcggaatcttaaaccagtgcattcataacggctttggactccacaccttcaaggaagaactcacgggtccggagtacgcgggacggtttattaaacaggcagaagaattaaatattgagtataaactgaataccatggtcatggatatcagtgagcagaagatcgtgacagccatgaaccgggaagaaggtctcttcgagatccgggcgaaggcagtgatcctcgcaatgggatgcagagagcggtcgagaggcgctttaaatattcccggataccgcccggcgggaatcttctctgcaggtacggctcagaggcttgtaaacattgagggatatatgccgggacgcgaagttgtgatcctaggttccggagatatcggactcatcatggcgagacgaatgacgcttgagggcgcgaaggttaaagtcgttgcggagctgatgccgtattccggcggattaaagagaaatatcgtccagtgtctcgatgattatggaattccgctaaagttgagccatacggtggtggacatcaagggaaaagagaggttggaaggaattacactggcccaggtagacggaaaaggaaagccgattcctggaacggaagaggaatacagctgtgatacgctgcttctctccgtcggactgatcccggagaatgagatatccaggggaatgggcgtggacatgaacccggtgacatccggaccgaaggtcaatgaaagtcttgagacgaatattgagggtgttttcgcctgcggaaatgtgcttcatgtccatgatctcgtggattttgtatctgaggaggcggcgattgccggaaagaatgcggcggcctatgtgaaacagggcgagaaccgtccgtccggcggacatgagatcgtcttaaatccgatcgaaggtgtgcgctacacagttccgggaaccatcgatccgtcgagaatggacgaggagctgaccgttcgtttccgcgtgggtggtgtttataagaactgctatgtgagtgcgtatttcggtgacgaacgtgtgatccacagaaaacgtccggtcgtggcaccgggggagatggaggaactgaaattcaaaaaggcagatcttttgaaatatccggatcttgagacgatcacggtcaaaatcgaggaggcatagacggtggaggaaagaagattaacatgtatcggctgtccgatgggctgtcctcttgtcgtaacgatggacggcggtgaggtcgtaagcgtgacgggaaatacctgtaagcgcggcgagatctatggacggaaagaagtgacaaacccgacaaggatcgtgacttccacagtgcgggtatccggcggaagtatcgacatggtgtcggtgaagacgaaggaagatattccgaagggaaagatctttgactgtgtgaaagcgttaaagacggttgaggtcgcagctccggtccacatcggggatgtgatattgaaggatgttgccggaacgggagtggacgttgtggcgacaaaaaatgtggaatagggtttattgcgatcagtaaatgcagatggtatgggttatgaacaaggtgctgtccggctggttttcatggaaaatggacagtattttgggaaaaggacctcgcggatccatgattcaggattttgcgaggtccttttttgtcagaaattgtctcaccattgtgaaggtgagacaatttctgatattttagttaaatttaaagatcgcagccccatacgccggcagtggatatgcgaaggagtatggctgaccatcgcactcgctctttttggagcggacggagaacgcgtgctccccgcgtttataaagtccgtgttcggaatccaggatcagcgagtaggttccggatttcggaacacctacacggtaatcgtcacgggcaaccggagtgaagttgatgatgaataagagattcttctttccggtctcatcgcggcggataaaactgaagatgctgcggtcgccgtcatttgcgttgatccactggaagccgttccagtcggaatcgagctgccataatgccggatatttctggtatacatgcagcagatcgctataatacttctgcagatctttgtggagcggctcgtcggcgagataccagtcgagggcgactttctcatcccactcgtgatactgaccgaaatcctgtcccataaagagcagcttcttgcccggatgtcccatcataaacgtatatccggcctttaggttcgcaaacttgtcaccgtttaagccaggcatcttgttgatcattgagcatttcagatggacaacttcatcgtgagacagggttaaaatataattctcactggtggcgtatgtgataccgaaggtcatcttgttgtggttgaatttccggaaatacggatcgagtttcatatactctaggaaatcgtgcatccagcccatgttccacttgaaggtaaagccgaggccgccttcctccggtgcctttgtgacgcccggccacgcggtggactcttcggcgatcatcatggcgccggtgagatgtccggtcaggacgctgtttaagtggcggaagaactcgatcgcttcgaggtttttgttctcgccgtatttattcggaacccagtttccatcgctgcggccgtaatccaggtacagcatcgatgcaacggcatccacgcgaagcccgtcgacgtggaagttttccacccagtagagggcattcgcgatcaggaagtttttaacctcatttttactgtagtcaaaaacctttgtgccccagtccggatgttctccctttcgcgggtccgcgtactcgtagagcggctgtccgtcaaagtcggcaagtccatgggcgtctttcgggaagtgagccggaacccagtccaggatcacgccgatgccctttttatgaagatagtttacgaagtacatgaactccttcggagtgccgtaacgggaggtcggtgcgtagtatccggtgacctggtagccccaggaaccgtcataaggatgttctgcaattcccatgagctctacatgggtgtagcccatcttcttcacatagtcggccagctcgtgggctgcctccatatatgtataataaccttccttctgcgggcggtctttctttctccaggagccgagatgaacttcgtagatcgccatcggagattttacaggatcagctttttttctcgcgtccatccagcctgcatcttcccatttaaaaccgctgatgtcttccgtgatggaagcggttcccggacggaattctgcgtggactgcatacgggtcagctttgaacaggatctttccatcctgtgtggtgatcgcaaatttgtagagttctccaaggccgacgcccggaataaatgtctcatagatccccgagtcggctaacggtgacattggtgcggcatccggatcccagccgttaaaatcgcctacaacgccgaccgcttttgcgtgcggagcccagacggcaaaatacatgccgctttttcctttatatgttttctgatgagcaccgagtttttcaaagattttataatgagtcccctgaccgaagaggtaacggtccagttcggtgatgaaaccgagaccgatttcttttgttttggcaggagccttggttttctttgttcttgtcatcacttaaacctcctgaagtttaaagatcgcgccgccgtttgccgggagcgtgacggaaagtctgccgttttcaagggagaatgggatttccccgggcagcagggatacggcatctgaagccgcgcatggcagcgggatcgagatggatgccggctgctcatcattattgacggcggagatgagagtgccgtgttctccggaccggctgaatgcatactgccggttggtgaggagaagttctttataagagccactgtggaacgcgtcatgttccgcatggatctttccgagcgccgcgatgtgggaaataagttccggagcttttccgtccatgccggataaagtgagcgccgggcgcaggacttcatcggatgttctggagcgctttccctcgatcccccactcgcttccatagtagatggaagggattcccggaagtgtaaagagaagctggtacaccggaaagaggttcgccggatgatttaacttgcttgcgatccggtcctcatcgtggttgtccacgaaggtgtaaagcgatttcccgactgcctccaggcgccgcacattgtgggcaatctcaaaatagttgtggtcgttgtgaccagagtagagagctttgtggagctcgtaatttgtgacggaatgcagcatttccggattgacccagcggctgtattcgccgtggatcacctcgcccatgagccagaagtccggtttcatggcggaagttttttcacgaagctctttcatgaacccgaaatccaggacattcgcgcagtccagacggatcccgtcgatatcaaaattgtcgacccagaagcggatcgagtcgaacagatactggcggacatccggattccataaatttaaacacggaagttcgaaatgcccctgccaggcttcgtagccgaacggatcgccaagaggacttccccaaccgaaattgacgccgcgataccagtctttataaggggaagcttcgcgtttttcccggatatcctgaaaggcgaaaaattcgcgtccggtatggttgaagacaccgtccaccacaacgcggatcccgttttcgtggcagagctgcacaaaatgggcgaaatcctcgtttgtgcccaggcgcctgtcgacaaggcggaaatctcttgtgtcgtagccgtgtgtggatgactcgaagagcggaccgatatagatcgcggagccgtttaaggcgcggatatgcgggatccaggcctcaagatcacggagtcggtgggcggtttctgtaagtgtattcgttttctcagcccccagaagtccgaggggataaatatggtaaaagacagcctgttcgtaccaggtatgcatggttatcagacctcctgaagctcccgttttttcaggcggcggagaagaaactgataccggagctgcgcagcgtttagctcatagatgtaacagtcgaccagagtcgggtcaacgacctgttcgaactggttctgggcggataggattgccgttttgctgagttcgatctggcgcttcagttcattggtctcccggctgaatgcctgttgggaagctgattttttagagaaaaacatcgtatcatactccaattcctttatttccggcgcgtatcgctgccagatccgggcagctgcgcccctgttttgtcagatcctgtctgcagaccggtttgccgcacggcgtgcctgtccgcggaaagatctgtggttcctgtaattggtagtatgagatccattcatccggaatattcaggattcaggatatttttcaagctcttcctttaagcggccgagcttatcgatggcgcttttgtttgtaagatagtagtaattgcagacgcctttttttaaaacatcgatcaggccggtatcttttaagatctttaaatgatgagagacagccggacgggagagacttgtccggtctgtgatctcattgacgttcaaaccggggatccggctttcgccggtggtctgcgtctcaaagagacactgcaggatcgtgagtcttgtccggtctccgagcgcgatgaataaaggaatgcactcttcgaagatatcgcccagaagattgtctgaggtcatgaattctctcctttcctgaagggtttggtttaaaaatttaaacttaattgcattttaccatttttcatgaatcacgtcaatgaattgttcaacatttctggaaaatgaaaggtgacataataatttttggtgaaaattgacgaaaaacgtcaccttgattttacgaaaacgaaattgactttcgctcaaaattcagagataatagtggcacattcagagatgagttcttcatttctaaatagcagatgtatgaccggtagcttcgccggatgcccgttttcagggcatgaaatcctttttatgttacgaagaccagtaccgccagtctggcatcagtgaagatattttcacaaaggatctatatggaaaaagtactgggaattcttcacctttttgagaaaggagatgatcctgtcatgatattatttacgattttactgtctgcggccgtgacggactgaaggtatggaaagatctttcacgtccagatctttttggggatcgcagccgggatcgtgtcggcctgcatgggcaacagagtggacggacagacacagataaactctgtgctcattcccgcgggagtcttcgttctgcggtttgccgggacatgcgctgtgttttatcttttttttctatgccggatgatcggcgcgggagatatcaagcttatggggctgatcgtcggattttcaggactctgggacgggatctttatcttaggtcttggatttgtgatcgcggctgtatctgcagcctgcaggatgacaagacagggaaccgtctggctgcggttagagaggatcgcgcggtttgcggtggagtccgggatcaatggaaagatcacggaatatccgggatattttgaaaaggaaagtcttatgcggctgggaccgtatctgttcgcgggctactgtctgtttctgctgatccgatagcaggcaggaccgcgagtcttgaaggctgggaaaccagtcctgtcgatcatatgccgggtctgctccggcaggggaaaggaaaaagtatgaaaaagatgatggcggtttatgacgcggatacgagatacgcggaacgattgtcggattatgttaacagaaaagagcggggagtattcactgcacaggcgtttacctcgaaagaaaagctggcggaatatgccgcgaaacatgagatcgatgtcctgctttccggggagcggacggattccggggatatctccgaaattccgtccggacagaagatctatatgtcggaggaaacagaacggcagatggaatcagggaaagaaatctataagttccagtccggggacgatattatccgggaggtgatggcggtctacagtgagatcccggggatccgcccgaataccgcaggaagcgtggatcagtccagacggatcataggcgtctattcgccggtcggaagatgcggaaagacctgtctggcgctggcgatcggtcagatcctggcaaaagaggaaaaggtgctgtttgtgacgctggatacttttaccggttttaccggtctgttaaatgagcgctggaagcgggatctctcggaccttatttactactataagcaggaacggtttcatatagtacggctgaactcacttgtctactatctgggagatatggcatggatcccgccgatccggatccctcaggattatgcacagcttaccgcgcaggagatggcggatctcatggaacggatccttcgggaaggaaatcatacgacacttgtcctcgacatcggggattacgggcgggacgccctgccgctgatggaaaaatgtcaggttgtttacgcaccgatcagagaagatccgttttctgcggaaaaaatgcgtgaatttgaggagtatctggaaacaacgggaaataacgctgtcgcagaaaagatccagaagatccatgtgccgatggtgaccggagggagaaggatggaacattttccacaggagcttctgtggggagatatgggagattttgtcaggagtctgctgaaaggacagaggaacttatgggacaattaaagaagatcctgcgggaacagatcctggcggagatgacatatgagcggcagatgtcggatgaagagatcgcggacctcatcgaccggaagatggatgcctgtctggaggagcagctgggagaattcccgctgactctgggggaacggctgaaactccacagggagttatttgactctttccggcgtcttgatattctgcaggagctggtggatgatccgcgggtgacagagatcatggtaaatggtccggaccaggtattcgtagagacagggggaaagatcgggcggtgggaaaagtctttcgaatccagggaacagctggaagatctgatccagcagatcgtcagcagtgtgaacaggatcgtcaatacatcaacgccgcttgcaaatgccagattgtcagacggatcgagagtccatgtggtcctcgaaccgatcgcattaaacggaccgatcttgacgatccggaaatttccggagccggtgacgatggaacggctcatggaatacggaagcatctcaaaagaggcagcggatctcttgaagacgcttgttgcggcgcgctacaacatctttgtcagcggcggcaccggagcgggaaaaacgacactcttaaatgcactctcagagtttatcccatccggtgagcgggtgatcacgatcgaggacgcggcggaactgcagttaagccatatcgagaacctggtaaggttagagacgagggacgcgaatgcggaaggagccggggccatcgggatcggggagctgatccgggcggcgctccgcatgcggccggacaggattatcgttggcgaggtgcgtggaaaagaggcgctggaccttttgcagagtctcaacactggccatgacggcggcttttccagcggtcatgcgaacagtgtaaaagacatgctcgcacgcctggaaacgatggtgctgatggcggcagatctgccgcttccggcgatccggagtcagatcgcgtcggcggtggatgtcatggtgcatgtggcgagaatgcgggataagacgagaaggataacagcgatcgaggaggtggaccggtttgaaaacggcgagatcatcctcaatccccttttcgctttcagggagacaaagtgcccggagagccggatcggggacaggaggaaagtggaaggaagccttgaacgggtcggagcactcaaacacagggaaaagctccgacttgcagggtatgatgtatgagacgtatgagttgagcagaaaagaatgggggatctacggggcagaagggattcttggcattgcggtgatggactatgttttttaccggaatgcagggctttttctggtgttgctgccggttggaatgctgtttcctcttatgttgagaaagcagttgaagaaaaggcggctggagaccctgcgggggcagtttaaggatgcgatcctggcggtggcctcgggactgaatgccggatattcggtggaaaatgcgtttgcggtgagcttaaaggagatggaggagatccatgggagtgattccatgatcgcgcaggaaatccgtctgatcctgcggaaagtgcgcctgaatctgacgttcgaggaggcattgggggattttgcgaagcggagcggcctggacgatgtgaaaaatttttcagatgtttttcttgcagcgagaaaaagcggcggggaactgatgaagatcatcgccaggaccgcggagatcatcggagaaaaaatccggatccaggaggagatcctgacggcaaccgcatcgaggcggatggagcagaagatcatgagcgcgatcccgatcctgatcgtggtgtacattgaacttacgtcaccgggattttttgagattttgtattcgaccatgggaggacggatcctgatgacgatctgtctcgggatctatctggtatcctgtcagctggcaaaaagtttcctggagatcgagatatgagtgagaaggtggaaaaaggcaggttaaaaaagtacgggaaagagtatggaaagtatgcggcatgtgtcgtgaccggatttgcgctctatggagcggcggaagtgaacagaaagctgggggatccggcgcgaaatgcgattctggagcgaaaacgatacggcgaaggagaccgtcagtatgatcttctggtggatggactgggagaaagggaggaggaaatctcagtcacgatcccggagcgaaaaatgtcggcagatgaaatgcaggaaaagtttccggagatcatggaatgcctgatcggagagatattgggggagaatgagtctctctccgaggtgcgccatgatctggagctgacaggcaggctggaaccgtatggattgtcggtacagtgggaatccggaaaaccggagcttttgagcgatatggggctgatcggctctgaagtgccggaatcgggggaggaggtggtccttgatgccgggatatccaatggaaccacagtcctgcgggcagagataacggctacagtttttcctgaagaaaagacggtcggggagaaatttgaagcgtttctggagaaactcgcgggggagaacctggagaagactacggtcagtcttcctgaaagctttgagggacagccactccattaccgtctggcatccggcggcggaaatggaggtctgatctttcttgggatcgcggcagctttatgtttattcttaaaggaaaaaagtgatgaaaaagaaaagcggaaacagtgggaagagcacatgatcctggactatccggaactgctgtccggtttccttgtattaacgggagccggatatccggtgagacaggcctggaagaaacaggtcatggatggaatgaagaaaaaacagcaggagcgtcatcctgtgtaccgggaaatgcagacgacattaaaccagatggagacgggaacgccggagattcgggcctatgcggaattcgggcgtcggatcgggatcggcagttatatgaaatttgcgtctctgctcggcaacagtgtgagcacagggggaaaggatctgaggaggcttcttgaggaggagatggaggcggcattccgccagagaaaagatcttgcgctcagaaaaggcgaagaagcgtccacaaaacttctgatcccgatgtttctcatgctgggagttgtgatggtcatggtagtcgcaccggcgtttttgtcactgtaaaaaatgtttggaggtaagtgtatgcagttgaaaagatttcttatggaagaagatggcgtcggagtcatagaagttgtgctgatccttgtagtgctgatcggtctggtcattgtatttaagacccagatcaacaaacttctgaccggaattttcacggagatcaataaacaggcgaaagaggtatattaaatgcggtaccggggagagatcacagtgtttctgagtctgacgatcctgtgtgtgatgtcgctgatgcttggacttttagaatcagccaggacggccggggcaagactgtatctgaggatggcgtctgactcggcagtctcatcggtgatgagctattataaccgaaatttatgggatcgctatcagctcttgtttctggaatatgactcggagacggcgatccaggagacattcgggcgttatcttgatttttatctggaacagaccaatatgtatccggcaagacgggaaaaggtttctctctccggggtactccgcatgactgatgaggatggacggtggctggaggaagagatcgcggattacatgaagtatcgggtcccggaactttttgcatccggcagcgggctcttaaaagaggcggaacaggtaaagaaagcgggagatttccgaaatctgtatgattcctgccgaaagtccggacgggcagtacgcagactggagaaggcggcccgggaggttgaaaattctttgctggaaatggaaacttgtaagaaccgattcagcaatgcagcatctgatgagagtgcgtctgcgctgaaaaggagtgccaggaaattaaagaaggaattccaggatttcccaaagcttgtggaacagtttgaacaggagatcagacggctggagaaagagaatgaagaatcaaggttcaagactgtggaggatgaaacagcagcggagactctcgggcaggaaatttccgcatgcggagaggtcgtaaaaagcgcgaaggagcatctgcaaaggtatcgggaagcagaaacacaggtggaacgaaatctggaacttttagaggaagcctgtgagtatctcgagatgaagccggacccggatgaagaggacgacgtggactgggatgcgatcagccagtgtgctgatgaaatggagatcccggagccagagaactccggaccgaaagacgcgaaaaaagtggctgccctggagagactggaggagctttttgacaaagagctttttgaacagctgctcccggcgggaacggaagtttccgggcgggcagtatccttaaacgggatcccatctgcgggaaaacatgagacaggatctgaaaataccggatcaggagagatgggaatcctggagacggcagaaaagaaactgcttgtcagcaaatatattccgctttattttggatcatttacggacggaacaggggaggcggatgctgctcttgattatgagatggaatatcttctctcagggaaaaaatcagaccgtgaaaacttaaaagaagcggtaaacaaggtgcttatgctgcgcggatcgatgaaccttctgtatctgctcaattctcctgataaaaaggcggaagcagaagcgctggcagcagcagtgacagcggggatcatcccggctcagatggcagtctcatttctgatcctgacgctctgggcatttggggaagcagtgctggatgtaaagacacttctggccggaggcagggtctcgttctggaaaacggatgcgacatggaaaacaggactttccggtctgctggatcagtcgtttttaggagaaacagcagagagcggacaggacgggagaaattatacggaatatctgagctacatgatgttcctcatggaccgcggggtaagaaatttccgcatgatggatctcatccagtggaatatccggatgggacagtctgatttttctgtagcgagctgtgcgtatcagatcgagatcgaggcggaggtcatgcaaaagcatatgttttttcaaaaagaggaatacagaggaacagtacatgcggcgggatcatattgacggctggaacagaatgccgggatcatgctgccggagcagatctggagtgaggtttgcgggttgctgtaaaaatgctgagaaattaaagaaaggaggtgtgtggacgtgctcttctttgccggtttctttatgaaaatcaatatacgaaaactcttctttcatcaaaaagtgtctctccaggtacacgaatatacgtttttaaccccgccggcaaggagagtacatccatgcgcctccggatttcaggcatctatgacggcagaggcagccattgcgcttccgctcgcgatatttttcttcctggcacttctgcagccggtatcctggcttgaccggcagagaaaagtgcagacctgcaccgagcggataggggaggagatcagccagtatggtcttctgatggatacggatcctgaagaagaaaatagcggacttcccgcattctgtacagacgcggcagcagcactctggatcaggggaagagtcgggcagtatgcggatcatgtactggtaaaacaggcagaggtgtatggagaaaatggggatatcacatttgaggtggagtaccgggaagatgttcctttttatgggaaaattcttggaaaacaacagagaaatgcagctgtaaaaaggcggacatggatcggattgaggggaaaactgagaggaaatgggaccggattggagacggaccgcgattcggacgaagagatcgtctatgtgggggccgggatggggcgttatcatctttttcgtgactgccattatatttccaatgagtaccagagcgtgacgcagatggaagcggaaaaaggcgggagctatgggaaaaagcgaacgccctgcgcagtgtgtgcgggaaaggaaaacggatccgggatcgtctatgtcacagcagcgggggaacattaccatttcgataaaaactgtgcatctatgatctcttatgtccgtgaaatgccgcgcggggaagcggaacatctgggactatgttcctattgtgcgagaaaaaagggggaattggagtgagtctgttttttctgtttttagggatcgctgcgtggcaggatctcagaacaagaagtatcagcctggaggtattgactgcgggtgcggcagcagggatggctgtttgtgtgctggaaggccgtggccttgaagaaattgttccggcgatgatcccggggattgcacttttgctcataaatcggtttgcgggtggaattatcggggagggagatggattattttttcttgtgaccggttttttccttgaatggaaggagatagtcttgctgttgatctccggacagttcttttgcggtattttcggacttgcgatggcggtaagtgtaatgacgataggaggcggaaacgggaatctgcggaaaatacggcttccatttttgccatttctgcttccgactgcgttgtggatggcggtgatgagagttttatgagggaaaaaaggcaaaagaatcaaaaatacgatggaagtatgactgttgaggcatccatagtcatgtcggtggtcatcctgtcgctggcctcattgatccggtatgcctataccgttcatgatactgtgacagggagtatgatcctggaagagacgatcgagagggtgagaaatagtgttgataagaaaaaaacgccagatatgttcgaagcggaaggaacccggatgggaaatccgagactttttcttggagagtacacgatcggcctgaaaacggggataaccgggattacaggagacgcatcggcaggagactggcatctgagtatggagcggaccgattttcagccggcaactttccttagaaaacaggatgccgcaaagaagatcatggataggctggaggactgatgaggacggaatttaagagagaaatgaaccggaattatatggtcctgcatccggaaacggaaatgaatgaaacatattcgctgcgcatgctgtcagaaaaccggatcacaggactgcttcctttccgggaaaaacgggtcgatggggaaagctatctttattttaacattacttcaaaacaggcactttccaggatgatggagtaccgcttttttacagcgaaagagatccggcagatcatggaagatctgctcatggcaatggcagctttagaaaagtttttgatggatggagaccagcttgccctggatcccgatctgatctatgtggatccggatgatctcaaggcaaatttttgttttattccgggaacggaaggatcgtttgaaataaatttccgcaaactctccagatatattctggaccatgtggatcatacggacggtgatgcggtgatccttgcgtttgcgttgttcaaagcaggagaaaaggagaactttgggatcgcggatctggaatcatgtttgagggcgggtggaaaaaacgacagggaagcaggaaaaatggaaacatatgagagaaaaattcagggaggatgtatagatgataagagagaattacgggcagatcaggaagaaaagcaaccagatccgggagaattttatgtgggaaagcaggaacgcagagaaggaaagaaaccgggaaaatatatggaacaggtccggaaatcagagcaggaaaaacaggaggacgccgatgacacagaagagccggacataaaatggagaattttgcaggttttgctgggaatattgctgcctgcagttccggcggctgtatttcttgccggtggaatggaactggtgatccgtttaaaatggggcatcttagctgcatggggaattcttcttgccgggatctttgctgtgggaaaagaaacgggcgggaagaaaggagaagatgaggaggagaacggagaggactgggagatcatgttccgggaggaagaggagctggagcggggaggaatcccggaagcgggatattcaggcgcagcaaaacacttttttcaggaagaacgggatcagaatgatcgcgggtcacaaaccgagcaaaagaccgggcgggaaaaagacgcggatgagatgcatacggtccttcttaccgggcggcagatctatccggtgacaaggcggctcgtaccggagaacggaggcgaagatgttcaggtcggatattttccctttttgatcgggaagaaccgggaaatctcggacctctgcctgaatcttccccagatcagcaggatccatgcgaagatcgaggaaagcggggacggatatatcatcacggatctcaactccacgaatggaacgagtgtgaacggtcattttctggaaacaaatgaaagcatgacgatctctccgggggatcagttatcttttgcggatcagagatatcgtttcttatagaaaacggacaagcatatattgagccatcgtggattttgccggttcggaatgggaagtatcggaagaatcctgttatagtgaggagatatggagtgcccgtgtactgtaacagtggaaaaataaaaacaggggtggtgtttttctgatatttggtctatgataaatccatcaataatgaaaggagggggtatcatggcatttcagataccggaatatcatcatcccgatttttcacaggaacaatttttgaaggctcctgacgcaagatgggaagttgtggagatggatggggtagctcctgaatattttcacagcacatccatgttcccggaatattttaagatccaggggaaatgggttttggcggaagaaagccgcatggattccagcgtagtgatctgtccggatggacatctggaagtggttgaaaaccggaatctcaaaaaaggagataaggtgatcctgggacggagtgaaggctgtgaagagggcatctatgtccacagcaccggatttcagacagaggaagaggcggcacttgcggataagtttgtgtttcgccagggccggagcagagagacctcctatgcgagagactatgaccgcctgatggatctcttgcggtatgagaaagaacatggaaagatcgtctgggtcatgggaccggcgttctccttcgactatgacgcgagaaacgcgatgcagtcgctgatcgagaatggatacgcacatggtctgatggcaggaaatgcgcttgcgactcatgatctggaaggtgcattgttacatactgcgctgggacaggatatttatacacaggtttccaagccaaacggacattataaccatctggatgtgctgaacaaggtgcggagaagcggatcgatcccaaagtttatcgaggaaaatcatattgacaatgggattatctacggatgcgtaaaaaatcatattccatttgttctgaccggttcgatccgtgacgatggtccgatgccggaggtgatcggagacgcgtaccaggggcagagtgcaatgcgggatatggtcagggacgcaacttgcgtgatctgcctggcaactatgctccatacgatcgcgacgggaaatatgacaccgtcatttcgcgtgatgaagaacggaacgatccgaccggtctatctgtacacggtcgatgcagatgaatttgttgtgaacaagctcatggaccggggaagcctttcggcgacgaccatcgtgacgaatgtacaggactttatcacgatcgtcgcaaaaggacttggcgtcatgaaataacagcatggaaagggtggaacccatgggaagccaatatggaaaaaaggcttatgtaaatggactcctgatcgctctgaatgtgctgtttttcctgtatcttgagatcacaggttcgtcggaggacgcgtatttcatgtatacaaaaggcgcaatgtacgcgccggcggtcctggaggacggtgagtattaccggcttttgacggcaatgttcatgcatttcgggatccggcacatcatgaataatatgctggtcctgtttgttcttggagataatctggaacgggcacttgggcatgtgaagtatctgatcttttacctgctctgtgggattggctcgaactgggtgtcgatgatggcgcatacagctgatacaatgacagtatcagcaggagcgtccggtgcaatttttggagtggtcggtgggctgctttacgtggttacgatcaataaaggaagattggaggatctgaatacaagacagcttgtggtcatgatcttcttttccttgtatctgggctatacaagtaccggtgtggacaacattgcacacctgtctggccttgtaatcggcattattcttgctataattttatatcataggcctaagggagaccgatggccgaacggaggtatcatataatgaaagactgtaattgcattttctgtaagatcgcaaatggtgagatcccgtcttcaacggtatatgaggatgaggattttcgcgtaatcctggaccttggtccggcttcaaaaggtcatgccctgatccttccgaaagaacattttaaggatgttaccgaactggatccgaagattgccgcaaaagtacttcctctcggggcaaagcttggaacagcaatgaagaaatctctcggctgtgccggttttaacctggttcagaataacggtgaggcagccggccagacggtatttcatttccatgtacatgtaattccgcgttatgagggtggtccggtcattgccggttggacaccgggagaggaaaaaccggaagtgctcgctgaaactgcagaaacgatcaagagtgcactgtaaacggtaatcagaaaagagttgaaggagatcatatgccgcaggacaaagatgaactgctgcaagtactgattacgcaatatactcaaatgtatatgaagctggcgtatgcgatcggagtgccgtttgacgatgtagaagatattgtcatggaggcattctggtcgttctaccgggcggattatggtgggaagctggagaataaaaaagtcgtaaaggcaatgttggcccgtattgttgaaaataaatgcatcgattatttcagaaaagagaaacgaagtatcaggccgaatgaggatgaagatctgagcgagctggagatcatcgcggacttttctgcacatgacccgcttcaggctgtgatcagcagagaaagctgtggtcagatttatgagatcctggatggattacgagaatcgtggaaagacgttacggtcatgtatttcattcaggggctgacgactgaagaaatttgtgagcgtcttgaaatcacgaacgacatgtgtcgttcgcgaatttcaagagcgagaaaatacttaagagaagaactgcaaagtcgtattgacaaaggtcatttgtgattcgcacagtcgttgatcagtttcatgatcgtatcgatcgcgttatttaaatgactcttttccatattttcaataaatgtccggcgattttcataagtatcatggatcgcgtcaaaaagagtatcatccgttactttctcttcttccaggactgtggaatacccctgttttgcaaaagaatttgcattcaggatctgatctccacggctggcagcggcggagagcgggatcaggacgtttggctttctgagcgcaagaatttcacagatggaatttgcgcccgccctggagacgatcagatcagctgctgcgaataagtgcttcagcggactgtcaacatattcatactgaacataaccggaagtcccgatcagggattcatccaggtttccctttccgcagatgtggataacctggaactgctctaagagctttggaagaatgctgcggactgcgccatttaccttgacggagccgagacttccaccgataaccaggatgatcggttttgcagcggagaggttggtgtattggagaccggcaagtctgtctccctgaagaagttctgcacggatcggggatcctgtgagaactgcctttccctccggaagatactttagagtttccgggaagttgcagcatacccatttggcggatgggatacagagtttgtttgccagacccggggtcatatctgattcatgaatgatcgtcgggatatggtagtgcttagcggcgagaacaaccggaaccgctacaaagccgccttttgaaaagagaacatctggtttgtattttcttaagagttttaacgcctccgcgtaaccttttaagacgcggaatgggtcggaaaaatttttaagatcgaaatatctgcgcagttttccagaagaaattccgtcataaggaatccctgcgttttcaatcagtttgcgttccataccattgtaggaaccaatgtattgaatatcgtaaccggctgccttgagggacgggatcagggcgaggttcggtgtaacgtggccggctgtgccgccgccggtgagaataattgttttcataaatgcctccatggaatttccggacaattgtccggagttttggctccggcaggttatgcgggaacccatgtgcggtgatcaagatacacgagattaccgatattttaatagtaacggctgaaaaagaaatgtcaacccctaaaagaaacgaaggaagaaaagaagtgaggtgctgaatcatggcagacatggaaaatcaggaagatcagaaaataagtgaatgccttcaggaagcatttggatactccgatgagcagctgttaaaacagctggatcatgtgaatgaaaattttaaggatgtttcttttgccggagccgaggagcgccttatgaagcggttcatggagcggaaagctgaaatggagcggaaagccactgaagcagaaccggaaacgacgaagtcagatgcacggactggagcaatcccggaaataacggcaggtgctgaagaatgtacattggtagaagaaaatagaccggaactgttggagctggagaaaaagcaggatgaaaagcagaataaaaagaagattgtccggtttgggaaaaagaaggtcctggctacggcggcgttggttgcagtgatcgcggggatgcttggggggacggcgattgggaagaagagttatttctttaggaaatctggtagtgctgcagagatttcattagataatgataaaaatttactaaaagattccaagttggaatcaatatacaaagagatagaagaaaaattagatattccaatactgttgtttggttattatccatcaggaatgaaatttgatggatatgatatgtatgaagatggcgttgaaatccgttttagttataacgacaaatttatttactttatacaacgaaaaaaggagactacatcatcgacgagaatagtatcagatagggagaataaaaaagttgttataaacaaatggattaatcaaaaaatagaatattctgtaaattctttggatgatggatctcaagaatgtggagcaatttttcccattaagaattattactattgtatttatggatctattccggaagaaaaatttaaagagatattagaatatttatatttttcctaaaaaacggtcacatttcttttttgcatacgtttatattaataaataaagtaaaggagaaatgagctatgaaaaaagttagaagatgtatctatggtgtgttggtgggtatggtaatgatgacgaatacggcatacgcaatgccaaatgtaacctggggagaattggcgcgcacaaatatgcagagtactgtgttgactaatggagaaaggacatcaacgaatataacggataatattaccagaggcaaagtgttttcgacaggaatgttggaaatcactaatcagcaggatggtacattacatatttccgtagatacatatgcacatgtagttgttgacaaaatatatcagacggtatttttagaggtatgggatgaaaagaaagaagattgggtaaatgttaatcactgggattttgtaaaaagtatagaagaagaaccgaggttatcatcctaccatgtaggtttcactgtatcaggctgtgaagtcaacaaatattaccgtgcacgggcaatgcatcttgttgagtggggagataacatggagggaaaagccactcagaccgatggtgtccttctcaccgaccacgaggtataactcgtaaattccgtatattatttcggccgaataatataaatacaattttgataaagggagatggttgatgggaggataccttagataaggccgaccgaggtcggtaagaacaatgattccaaatttataaactgaatgaaagagatagccccgcgcaacacaacctcttgcggggctatttttaagctttataccaggctctatgtcaatagttggcgggattccttagaatcctgctgcattgttgatatagagcctttactatttctgcgtataaaatcggtcagatcaataatattcggtctgatcaatgggttcgaagatggattaagcctgctgctctttatactgccttaaagctctcgcaagctggtctggacatgaagttgggcggccgttgcagcttacgccttcgactcttttgattacttcgtcgatatccatgccctcaacaagaaggccgataccctttaagttgccgttgcatccgccaacgaagcttacgtttttgagtttgttgttctctacgtcaaaatggatttctctggagcaggtgccctgtgtcttgtataccatataaaaacctccgtttgtaaaagtctggccgtatggccgaattgaaagtatccttattatactcacagcagagaatcattgtcaagagaagcactgaagtccattttattggagactctgcccgtactattcgcgggacggaaattcgttaaatgaacaattcgcatcatacagctgcggatacggattttgccgatccctaattcggtgtatcggaaaatttccgttgcagtgtgaaggcagggtgtatcagcgacttatattagttcgccaaagataacgatgaaaaggaactttatttgacctgtgccccattatcccgtataatgaaaacgataaagatgatgagaatctgtctgaaactcagacaggatcgatattttggtaaaataatgttataacacggaggaattcaaatgcttggtattatcggagcaatggaagtagaggttgagaaacttcgcgcaaaaatgacagagacagaaatgaagacagtggccggaatgaacttttgcaagggaaaactggaaggaaaagacgttgtcatcgttcgttccggtatcggtaaggtaaatgccggtatctgcagccagatccttgtggacctctatcaggttgacgggatcgtaaatacaggaatcgcgggatccctgagaaatgagatcaacatcggggatctcgttctctccacggtagcagtacagcatgatgtggacgcaggcggattcggatatccggtcggagagatcccacagctcggtgtaaaggaatttccggcggatgagagattgttaactcttgcggaagaggcgtgcagagaggcaaacccggacatcagcaccttcaaaggacgcgttgccagcggtgaccagtttattgacagtaaggaaaagaaaaaatggatctgtgacacatttgacgcgtactgcgcagagatggaaggcgcagctgttgcacaggcggcatacttaaataagattccgtacctgatcgtccgcgcgatctctgataaagcagatgacagtgcccatatggattacggtgagttcgaggcaaaggcggttgaacattctgtaaatctcatgcttgctttagtaaaaagactttgatcttgtcattaccttaagaactcgtttcctgtccacatttgacgaacgattcttccgttctcaatcttctcaaaatcattctagcccgctataattagtggcatcatctggaatgatccggacggagaaaggggaactgattatgctggaatttttacagacagggagaatgctctatgttctggcggcaatctgtgcgctcgggacactcagcaagctcgcaacaggaagcctctacaaaagattgatcaaagaaaccggaaatatggcgctgacgaaagataagaacttaaagacgctgaaacagcgcatggaaaatgtgttccttatcaaccacgggatccgaaatgtaaacgcatacatagaaaaacagctctacggattccgattcctccatgtaagtctcgatggctgggacaaactgtccgtgcaggcgatgatcctctgctttatggtcggaggagtgacggcatttggcgcatactggtaccgatgtgacaattcctatatcgtattatatggtgcggcaggcgtctttagcggattgtttcttgcatttgtggacaattggatcgggacgggaatgaaacggaaacagcttgcggatcatttagtggattatgtggaaaactcaccgcatttctataaaagtgtggataacatcgtttatgccggacaggagcggaaaaaggcggtgggagcttctccggctggagatttttccggcagtggtacaggctatgggagaactcaggaaagtgtgagaaatggcagaggaaatggacgtttttctgttctcagaaggaaaaaagacgcacagatttctgatgaaagcgatgaaacagagaatctggaaaatgaaaaccttacaagaaccggggatgccgtgaagctgtcgcggctggacggaaaaacatctgtgtctgaagggaatggaaccggtccggccgtaaatggaaatagtatcggcagttcatcaaaaaagccaacaggaaaaaccgactataatagaagcacgggccagaatgcccgggatgccggctcaaaaagcatggggacgggtggaaaggtattgacgagtgagacggaacttgcccagagcatcaaccacctgagcgaaagcctgaggcagatcgccgcaagccgggaacagccgggagaaagtcagaaaatgccggatgatcttgagctgatacggaactcgatcccggcggaagaaatggcgctgctgaaaacattatttaacacactgatttagaatgcgaagcattgtcaagggtttcacgaagtggtataataacggacagagattgagaatctcacacaagaaaaggagacagggttatgggtaaagaaatcgtatttgattattccaagacagccggatttatcagtgaagaggaaatgaaaaacatgaagagcatcgttatgggtgcaaaagatgtcctgacagcaaaatccggtgcaggcaatgactatcttggatggatcgacctcccggttgattatgataaagaggagtttgcaaggatcaagaaagcggcagagaagattcagggcgattctgatgtacttcttgtgatcggtatcggcggatcttatctcggtgcccgcgctgcgatcgaattcttatcccacagcttctacaatgtgctgccgaagggaaagagaaaaactccggagatctatttcgtaggaaacagcatcagcagcaaatacattcatgatcttcaggatgtactggaaggaaaagatttctccattaatattatatccaagtccggcacaaccacagaaccggcgatcgcattccgcgtattcaaggaaatgctggtcagcaagtatggcaaggaagaggccaacaagagaatctatgcgaccacagacaaggcaaagggagctttaaagaatctggcaaacgaagagggatacgagagcttcgttgttccggatgacgttggaggacgtttctccgtgctcacagccgtaggtcttttaccgatcgcagtcagcggcgcagatatcgacgccctgatgacaggcgcagcggacgcaagaaaggtcgctcttgagacagagtatgagaagaacccggcacttttatatgccgcagtccgcaatatcctgttaagaaaaggaaaacaggtggagatcgtagcaaactacgaaccgagccttcattatgtatctgagtggtggaaacagctcttcggcgagagcgaaggaaaagaccagagaggtatcttcccggcagccgtagatctgacaacagaccttcactctatggggcagttcatccaggatggtgcccgcatcatgtttgagacagttctgaacgtggaagaatccccggcggagatcgttctccagaaagaagacgtcgatacagacggaatgaactatctggcaggaaagactgttgattttgtaaataagagtgccatgaacggaacaatcctcgcgcatacagacggcagtgtgccgaaccttatggtaaagatcccgacgcaggatgcttacagccttggtcagctgttctacttcttcgagttcgcatgcggcgtcagcggctacattctcggagtcaacccgttcaaccagcctggtgttgagagctataagaagaatatgttcgcgctgctcggaaaaccgggttatgaggaggcaagagaggcgcttctcaagagattataataaagaaatataatattagacgtattcggcaaaatgttgccggataggatgagaaacgataaaataaaaaacggctgatctccatgtgtcagggcagaaatgacacaacggacagatcagtcgttttttgatcactcctcgatcacctgaaactccagataatcaaagtcgatggattcgataaaactgtctttcgtaaaccgcgtcttatcatgcagctgaaaatcgcggatattggaatcgagccagatcggctggcttaagtcgaattcgtgacagatctcatccagagcctgaaataccatggcggttctcgacatggaatagtcgttgttgcaggacaccatatctttgatcagatgattatctttccatatttttccccagattcggaacataaaacagtcctccattctttttcgttcacggtcatgatttgaaaaacagtataacggatttttttaagaaagtaaagccacgtgaacagcggcagcgcatttttgaaattacaaaagcacgttttggcatcacacggggcgaacatgcgaattttactgaaaatgccttgtatcgcctgaaaaattgtagtaatctatacctatatggacatttgatgacatacttgaaccaaagccaggaggacaaaagatgggacagccaattacagatcatgctgccttttttgccagcgcaggacaggcagttgaggaactggaagctctgaatacagaggtggagcagctcgaagcggatgagaagaagttagagagctccctcaagggaaaacagcgttctgttacagaaaccatcagccagacggtgaagcagcggaaagaggagatcacaaaaagctacgatgcggagctcgggaaggcgcaggatcgcctgaaaaaagtaagagcgaagcgcgaaaaagcgaaaaaccagggtgtcaaagagcggatcgaggaagataccagggggcttgtgcgggagaataaagaacttgcggaccagatgaaaactttgtttaaagcaaaccatgttccgggattctgccgtggaagttactattacgcactctattttacgagaacatttaaggattttctggcacttctcatgacgatcatgatctgcttcctcgcgatcccgtgcggagcatatttcctgatcccggagagacggactatgtatctcgtgggaatctatgttgcggcgatcctgatctttggcgggatctatgtaacgatcggaaacatgaccaaggtgcgctatatggaagtgctgaaagaaggacttgggatccgggcgaagatccgcacgaataaaaaagagatgaaggtcatcgcgaaaacgatccgacgggataagaacgagacggtctacaatctccagaaatttgacgatgagatcgcccagctcgatcaggacgcggcggagatcaaccggaaaaagaaggaagcacttacgaccttcgatactgtgacacggacgatcatctctgatgagatcacggcaaacaacaaagaggagatcaaccggatggaggacgagctttcttctctgtcagaaaagctccgcagtacgcggacggctgcgaaggaaaaagcattgttcattacggatcactacgaggtttatataggaaaagaatatatgacgccggagaaactcgcgacgcttgcggatatcgtgagaagcggtgcggcatccaatatcagtgatgcaatctcggtttataagagtcagggagatacggcaaaataacagctgatgcactggccgcaataaaatatggtcaggaaatactgagcagttacaaaaaggacagaattacagggaatgggacaaaagatgaaaaagtatggaataaaacttgcgcttgctgccgctgtattttgcatggcgatgccgttcgcatcgtttgccgggacatggaaatcggatgcaaacggaatgtggtatcagtttgacgatggaacatgtcccaagggaagatgggcatggatcgataccgataatgatggaatggcggagagcttttactttgactccaacggatatgttcttagaaataccaccacaccggatggttaccaggtaaacaggatcggtgcctgggtcgttggaggcgaggtaaagcagaaagccggcggcgagacaaagaacagtacgtcagggaacggcagcagttcagaaaatcagaagaattctaacaatagctacagtaatgacccggaatggtatttgaaagcagatggattaagcgaaatagacatagcgcagtatcgttattacgaaaaatactttattctgggcgctcatagtacagatctggagacaaaagtaaaagaacaggttgaacggatctcaacaaatccaaatgatgccacggcatccatggagatggtcagtgtagagattcctgtctggagattgaagaataatcagaaagttgccggaaccgcccatgtacaggttttgagttctattgcaaacgacgtaaaagagatttttacagaaatctataatggaccggagaagttcccgattgagagtgtcggtggatataactggagaagcaacggtgtgaaaagtaaacatagctttgggctggccattgatatcaatccggacgcgaatccgcagatcgatacagacggtacgactgtacttgtcggaaaaaagtgggagccgggcgtaaatccgtattctattggtcgtgacagtgatgttgtgaaagcatttggaaaacatggatggagatgggggatcggagccagcagagcagatatgatgcattttgagtattaaattaaatatgggatgttatgaaggatcgggtatctgagatacctggtccttttttgacatgtataaattgcttgaatcccgcctataatgtctcatagaaaccaaccaggaaacggagtgttcacgatgagattcgggaggcggaagatcacttattatgatacggaagcgggatttgaggcggagaaatttgcagcgagacttctgcttcttctgatgaatgagatgcgggcatccgggcgccgcaggatcgtatttttatgcatcgggacagaccggtccacgggggacagtctgggaccgctcatcggctcaaagctggcggcggagatgaccggcgatgtgacggtgatcgggacactggaacatccggtccatgcggtgaaccttgaccggacgatcgaggagatggaagaacattacccggatgcgatcattgtagctgtggacgccgccgtgggccgttgggatcatgtggggcttgtgacgctggaaaaagggccgttgcgcccgggactcggcgtgcgaaaggaacttaccgctgtcggcgacatttccatcaccgggatcgtcggcggggcggagagcggagacccattatttttacagagcatacgcctgtcccaggtcatgcggcttgcggactgcatcagccgcagcatctgccttggattgcggatcatcgggagacgtgtcgaaaacttttccggtcagactgtgccgttttgacatgttttgcagatctcccatgctatacttcggaaagaattcgacgaagcgcgtttacgtggttcgcgtaaataaagaggcggccggccgctgtctggacatgccggctgcctgaagatagaacgaggtggcagcatgggagaattatacaatccgtttccgaaacttccgaaaaatatccgccagatcggtgatacggaccaggtggtccggctgtatgtggaggactatgtaaatacatatttgaaacgcctgtatccggcaggaaatcagacgctgcgtgtgggacttttgctgggaaatacggaaaactatgacgggactccgtatatctttatcgatggcgccatcgagatggaggacgtggaagtatccggggagaaggtggaattttccgaaaatgcctggaaaaaggcgtatcgtgggatcgaggagtcgtttccgaagcggaccgttcagggatggtttatctgcggcactccgtcgagccagctgagtcccctcaattactggaaactgcacaaccagtactttaacgggaaaaacaagctgatgtatttaaatcatggcctggaaggtgaggaagtagtctatatcacttcggaggacggcttttaccggctgaaaggacattgcatctattacgagagaaatcagatgatgcaggattacatggtgaccaggaaagacgtgcgccgggtggaatccggctcgcatgagaaggtcatcaaggatttccggcagcggatgacggtcaggaaagaacaggcggatgcagggcggcatatgtccgggatcctggggacggcgtgcggagtcctcacggtggcggtcctggcaggaggtgttgtgctcgtcaacaattatcacaagatgcggcagatggagacggtgctgacttccgtggtgcctgccgggacggcaaactggagcgattatctggacaagctgaatcaggaaccggattttgtcattgaagagcggccgggaaatgtatttccgacggatgagagcgaggaaaccggagaaagttacgcggcggagacgatggaagcgacggaggcaggcacgaacagcaagtcttcagaaggatcagagagtacaggaaatccggagacaaccggcgtgttggggcaatccgctgcttcaagccagccagacaatccagatacagctgtttcaacaggaacccccggcactgatgggaccgagaccgctgctgcgtccggagccgtggaggaagcagttccatccaccagtgctgaagctccgacctcgccacgtgtcggcatgggaaaagaggaaggacagggcgacgcatccggtcaggaaaaagagccggtggactacgccgccgcagtcgcgaacggctatcggatctatgagatcggtgacggtgagacgttatatgggatctgctggaaagagtacggaaatttaaagcggttgtccgaaatctgcgcgctcaatcatctggacgatgtgaaccatatcgtagcggggcagaagctggtcctgccatagaaaacgggcatttccgcctgccggaatgaactggaataaaaacaaagaatttaatgcgcatctcctgaaaatggtgtatactaatctatatatgtccatttttcaggagattttttatgagtgatatgcaatctatggacagagagaacaaaaagaggcagctcagacaaaatatcgtacagatgccggacgccggatcggatgaaccgatggatgacgaacggcttgccagatataaaaagaaaaagcggatcatcgcagttgcagccgcatgtttccttgcagcattgggatttaccggatacagatatatgaatgaatatgaatataccagctacagtgttcagtgggaacgctctatgcggtatactgatacgtccaacgcggataaggaaacacaggcgccggaaacaagtgcggcggccgatgagggaacagatgggaccgatgagaccgctgcggcagaaagcgctgccggtacggacaccggaaactccgactctgcggcaacttccgcggctgaagtctcaaagacagtcagcgacagcagttttatccgctttgccgtgttcggcgacaatatgatcaagtacacaaaagacggtgcttcctatattgacgcctccggcaagacgatctggacacagagctatgagatgaagaccccgatcatcaatatcaacggggattatgccgtgatcgcggatcagcagggaaatgagatgtacatctgcaacaaagagggatgtaccggaaccgcgaagacacagctcccgatcacgaaagcggcggtatcggcccgcggcgttgcggcggccgtagtcgaggacagcacggcgagctacatattctactttaagaaggacggcgagtcgctcgggatcaacatcaagatgctcctttccggtgacggttatccggtggacatcgcactttcccccgacggaaaacagatcgtcatgtccatcatgtacatgaaaaacggcgctctaaagaacaaggtagcgttttacgatttctctgagatcggaaagaatgtcaacaaccgtttcatcgccgcgtttgaggaagaatttgatgataagatggtggggcgcgtccgatacttaaatgaccagaccgtctgcgccttttccgataaaggactgacctttatctctgtaaaaaatgtgataccggacacaaatgtgatctatgttccggtagaagaagagatccgaagtatctgctactcggataaatacgcggctgtcattgttgacagcacatccggaagtccgtaccggcttgatgtatacaacacggatggaaagaaagttacaagcattgatttcgactacgcctacacgggcgctctcattgacggggacaggcttatcctgtataatgaggaatcatgcagggtctacaacctggacgggcacgaaaagtttaacggacagttcgattattccgtatcgctcgtcagggctggcaaaaatcgtaccaattctctgatcaccgcaggcagcgaggtgatgaaagagattaatttaaggtaaatggaactgtgaaacttcaacagttcccaacacttatggattatcaggaggaatgaaacaatgaacacaatcgacaatcttgcgatcaattccatcagaattttatccgcagatgcgatccagaaggcaaattccggacatccgggacttccgcttggcagcgcaccggctgcttatgagctctgggcacaccacatgaaccacaatccggcaaatccggagtgggcgaaccgtgaccgttttatcttatccggcggccatggctccatgctgttatattccctgcttcatctgttcggctatggtctgacaaaggaagatttaatgaacttccgtcaggttggttccctgactccgggacatccggaatacggtcacaccgtaggcgttgaggcgacaacaggaccgctcggcgcaggtatgggaatggcagttggtatggcgatggctgagaaacatctggcagctgtattcaacaaggaaaactatccggttgtcgatcacttcacatatgtactcggcggagacggatgcatgatggagggaatctcctctgaggcattctcccttgcaggtacacttggacttggaaaactcatcgttctctacgactccaaccgtatttccatcgaaggaagcacggacatcgcattccgcgagaacgtggaagagcgtatgaaagcattcggcttccagacgatcacagttgaagacggaaccgatatcgatgcgatcggtgctgcgatcgaagttgcaaaggctgatacggagcatccgtccttcatcacgatcaagacagagatcggcttcggctgcccggcaaaacagggaaaagccagcgcacacggcgagccgttaggtgttgacaacatcaaagcaatgagagagactctcggctggcagtatgaggaaccattctttgtaccggaagaggtctatgagcattattcccgccttgcagaggaaaaagcagacacagaggcagagtggaacgcaatgttcgctgcatactgtgatgagtacccggagatggagaagctctgggagcagtaccatacagctccggatgcgaaggcactgatcgagaacgaggcactctggctcacaaaagacaaggcagaggcaacacgttccctgtccggcaagatgatcaacatcttaaaggacatcatgccgaacatgatcggcggttctgctgaccttgctccgtccaacaagacagccatgaaggatgcgggcgacttctccgcagagaacccggcaggcagaaacctccactttggcgtaagagagcttgcgatgacagcgatcggcaacggtatcatgcttcacggtggtctccgcgcttacgttgcgacattcttcgtattcagtgattatgtaaaaccgatggcaagactttccgctctgatgggagttccgctgaccttcgttctgactcacgacagcatcggagttggtgaggacggaccgacccacgagccgatcgagcagcttgcaatgttccgcgcaatgccgaacttccatgtattccgtccgtgtgacgcgacagagacatctgctgcatggctctccgcagcaacatctgagaagacaccgacagcgcttgttctttccagacagaatctcaatccaatcccgggaagcagcaaggaagcgttaaagggcggctatgtcatcgacgactgcgaaggaacaccggatgcgatcctcatcgcaagcggttctgaggttgatcttgcggtcaaggcaaaagcagagcttgcaaatgaaggaaagaagatccgtgtcgtatccatgccgtgtatggatatctttgaggagcagagtgcggagtataaagagtccgtacttccgaaagaggtcagaaagagagttatcgttgaggcactttccgacttcggctggggcaagtatgtcggtctcgacggcgcttatgtgacaatgaagtcctttggcgcaagcggcccggcagcgaagctgttcgagaaattcggatttacagttgagaacgttgtaaatacagtaaagacactgttctaaataacccgaacgtgacggttcagtcatgcagcgatccacatcggaagaccgcatggctgaactgacacggttttaagggcacgcgggatctgaaaacgtgtttgaaatggatccggcagattcaggaaaaggggaacacacatgagcttaaagtgtattggaatcgatatcggcggaacaagcgtgaagcttggtatctttgaggaagatgggactcttgtaaaaaaatgggaggtcccgacaagaaaagaagagaacggaaagtacatcctgggcgatattgcggcttcgatccgcagaacagcgaaggagagcggacttgaactctctgatttttccggcgcgggaatgggattcccgggaccggttcttccggacggacactgcgaagtgtgtgtaaaccttggctggaaagccggaaatccgcagcaggaattaagcagactgttggacggaatgcctgtaaagagcggtaacgacgcaaacgtggcggctctcggtgagatgtggcagggcggcggaaaaggatataagaacctcgtcatggtgacactcggaacaggtgtcggcggcgggatcatcctgaacgaaaagatctggaccggcgagcagggcgttggcggcgagatcggtcatatccatgtgatggaaggcgagaaagaggcctgcaactgcggtggtcacggctgcctggagcaggttgcttccgcgacagggattgcgagaactgcaaaaagaatgctggcggcagacagccgtccatccagcctcagaagcttaaagaatatcagcgcgaagaatgtgctggatgcagcaaaagcaggggataagcttgcgctcgattccctcaacaagtcctgctattaccttggctgggtccttgcaacactgtccatggtcctggatccgcaggcttatattattggaggcggcgtttccaaagccgggacatttctgactgacatgatcaagaaatatcacgatgaattatctccgatggcgacaaggaaagcggacatcgtccttgcaaagcttggaaacgatgccgggatctacggagctgcgaagctgatcctcggataaaagaagagagagtccggtaaaacgggctccctttttactgccggaaaaggatacgaagcgtgcctgatgtgcataggccttgagtgtatgggagacaaagaaaaatgtccgccataagcggacatataagacccctaaacatgaggagaccccggtcgcgacaaccggggcaattatgaaaaatctatgtgcaatttgtctagtaagcaaagctaaatgactttttgtttatgcaataagtataaaaaacaaatatgaataaattatgaacgcactatgaagttattgtaacacattctcatttgtgcgtctgagaaaaacgcataaagctccagaaaaggatataaagggaaaacttgcgaaggaatacgacagagaaactttctggggatatgcgcatggaatggagaggagaagatcaatggcagttgagggactgaaaaaaacacttgtccttggacacagaaatccggacacggattccatctgctcagccatctgctatgcaggtttcaagcatcagcttaccggcgagaactatgagccgtgccgtgccggaaatgtaaacccggagacacagtatgtactggattattttaatttaaaggcaccgcgccttgtcgagaacgtaaagacgcaggtcaaggatatcgagatccgcaagacaaaaggcgtatcccgcggaatttctttaaagaacgcatggggactcatgcaggagaacaacgtcgtaacacttccgtgtgtgacggaggaaggtctcctggagggcgttatcaccatcggcgatatcaccaaatcctacatgaacttatatgacagcagcatcatttccaaagcgtgcacaaaatatgcgaacatcctggataccctggaaggcagcatggtagtcggagactccgaagcatattttgatcagggaaaagtcctgatcgcggctgcaaacccggatctgatggaaaactacatcgagaaacatgaccttgtcatcctcggaaaccgttatgagtcccagctctgcgcgatcgagatggaggccggctgtatcatcgtttgtgagggcgcgggcgtctccttaacgatccgcaaattggcacaggagcgcggctgcgcggtcatcacgacaccgtatgacacatacacgaccgcccgtctgattaaccagtccatgccgatcagctatttcatgacgaaagagaatatcatcgagttctccgaggaagattatctcgacgatatccgcgagatcatggcgagcaagagacaccgtgatttcccggtcctggattctgatggaaagtatatcggcatgatttccagacgtaacctcttaggtgcaaagggaaagagtatcatccttgtggaccacaatgagaagagccaggcggtagaaggtatggaaagcgccgatatccgtgagattatcgaccatcatcgtctcggaacagttgagaccatgtccccggtattcttcagaaaccagccgttaggctgtaccgcgaccatcatctatcagatgtatcaggaaaatcatatggagatcgataagacaactgcaggtctgttatgcagtgcgatcatttccgatacattgttattccgttccccgacctgtacagcagtcgataaggcagccggccttgcgcttgcacagatcgccggacttgacattgaaaagtatgcgatcgacatgttctctgcgggaagcaacctgaaaggaaagtctgacggcgatatcttctatcaggatttcaagcgctttacggtaggaaattccgtattcggaattggacagatcacatccttaaacgcagtggagctgaaggatctgagatcaagaatgtccatatacacggaaaaagaacgagagcagcatgagatcgacatgatgttcttcatgctcaccaacatcctgaccgagtccacagatctgatctgcaccggacagggcgcggagcagctgatcaccacagcgttccatgtagcagatgaggatgtggaaaatgtgagtgcgcagaccggaatcgtgaagctgccgggcgttgtttccagaaagaaacagcttgcaccgcagattatgatggcattgcagcagtaaaagttgaataaaggcgggatctgcaaatgggaaaacgacagtttaaaccaggaaatatgctctatccggttccggcggtccttgtgacagcgtccgaccgggaaggaaattcgaatatttttacggtggcatgggcgggaaccatctgcacaaacccgccgatgctgtcgatcagcgttcggccggaacgccactcttaccatatgatcagagagaccggggagttcgtggtcaatctgacgacggagtccatggcgtgggcgaccgattactgcggcgtgcgctccgggcgcgatacggataagtggaaagacacgggactgacgccggagaaggcaaatgttgtcaatgtgccggtgatcaaagaaagcccggtaaacattgagtgccgtgttgtgaaagtcgaggagctcggaagccatcacatgtttatcgctgatgtcgtggcggtggatgtggacgaagcgtacatggatgagaaagatacgttccatctctctatggcaaagccgcttgcctattcccatggaagatattacgggatgggcgaagagctgggaagtttcggatacagcgtgagaaaggcggagaaaaagaagattctgatcggaaagaccgcaggaaaacaggctggaagaaaagcaccggaaaccggaaagaaggctgcggaaaaagaactgcagacgcgccggaaagccggaaatgaggtcagaggaaaagcgccggaaaccggaaaaaagacctcatctggaaagaaaaacacaggaaatccgggcgggaaggccggatcaggtgccggaaaaccgcgcagacagtagagatcctgcgatcggatcatgatgcgtgaaccggaaaaatgacaggatatgtgacagcagaaaggactttagtgatgaagaagaaaaatattctgatgatcggaatgccggcatccggaaagagcaccatcggcgtgctgcttgcaaagcgccttggctattccttcgtggatgtggatcttgtgatccaggagaagaccggaaaacttttgaaggagatcatcgcggaagaaggagatgacggtttccttcgcgttgaggagcaggcgaaccttgatctggatgtcgaaaagtctgtcatcgcaccgggcggcagtgtgatctatgaggcgaaagccatggagcactataaagagaccgcaacgatcgtgtatctgaaattaaattacgaagacctggaatcacgtctcggaaatcttgtggaccgcggggttgtcttaaaagacggaatgacactcagggatctctataatgagcgccttccgtactatgagaaatatgcggatatcacgcttgatgagaccggaaaagagttcggtgagcttgtagacgagctgagagcctattttgaaggtctggaaaaataaaaggcggatttttatgcacaggcggggtctgtatgatccaatagaaaaagagcctgcattgagatttggcgaataaatggagaagctccggtaaataggcagaaagtgttgctgcctttctttaccggagcttttacttacgcgaacaacgagccaaagtccgcgcttgcgcgagaccttggcgactgtcgcgatgttttggctcattcgcactgaaatcatgcagagcagtcataaaaacagaagagcatggaggctgcgctcagagtccgagacactcgacacttctctccaaaatccctttcatatatgcgatcgcgatcccgtaatttgtcatcggaatctcctggtcggcggcactccttaagcggcttcgcatttcccgttcatttaacatacagccgccgcagtggataatgagcttataatcggagacatcttccggaaattcggtgccggaggtgaaatgaaattctggctgttttccggtgtattcccggatccagttcggaagtttttcggttccgatgtccccgcactggcgatggtgggtgcagccctcagagatcaggatcttatcaccatcctggatcgtattcagagcccgcgcgccgtggacggcctgggtgagatttcctttatatctcgcaaacaggatcgaaaaagaggtcaggcggatttccttcggagtcatgcggtccacgagaggaaagacctggctgtccgtgatgacgagagacggctttttctttaaggaatcaagcgctgcagcaagttccgactcccgacagacgatcggcatggcgccggagtcaaggagatcccggattacctgctgctgcggcaggatcaggcggcctttcggggcagctttgtcgatcgggacgaccaggataacaacgtccaacggatgtacgagatcggcgacaaggcgtttcccgcttccatccggggcaacgaggcgtgccatgcgctcctttaagtcgtggatgccaaaaccggttttcgcactgacatagaccatattgctgtgaccggatcctgaaactgccggatctgatgccggagagtccccggtcgcaattccggtgggaacgccagcctgtgaagcattccggctggttttcctgtctgacggggcgggatccgggagcagatctgccttattgtatacaacaagatatggaatctcttttttctcaaacaaccggatcatctcagtttcccagctgccggttccggtcgttgcatccacgaccaggatcgcgagatcggtcttgttcagtacctggcggctttttccgacacgtttgatcccaagctccccctcatcatcgattccgggcgtatcaatgatcacgaccggccctaacggaagaagttccatggactttgagaccgggtcggtggtcgttccccggacttcagagacgatggagaggtcctgaccggtcactgcgtttacaagacttgactttccggcgtttcttctgccaaagaatccgatgtggatcctctcgccggacggcgtctcattcattcccatatattacacctgatgaacctgttgtgttcctggcctctgcatccgtaaaatgctgccgggggcattaagctcctgcaggtattctgcggacacaccttgcacaggcttaaaacagtccatccctttcttttttctggattatcctttgtgatccccgcggtccacaacgacatgatatccgacgctttccatccgccgtttcatgcagttcacacattctgctgcctcatcgccggtgcagatcttattgtcatagagaagatattttgcacggacctgtaccggggaaagattcggcatgacaacgtttccgccagcaaggatcccgagctcgcgcccgaacggatggatcgtgccgagcgccgtcgttgcgggaagcaggacattcggatcctgaagacggagaagtcccatcataaacagggtgagttccatggtccctgcagtctggtctccaaacggcgtgtcatgctgcgggataaacggtccgatcccaaccatttccggtttgagatcgcggataaagatcatgtccccggcgagacattccgatgtctggtatggggagccgaccataaaaccgcagccggtctggtagccgatctcctttaatgttctcagacagttcatacggtgctcaaaggacatttccgccggatgaagtttctgatagtgttctgcgtttgccgtttcatggcggagcagataccggtctgcaccagcgtcaaagaagcgcttgtagctctcgtattccatctcacccagggaaagcgtgatcgcacagtccggaaattccctccggatcatggagacgagatttgtgatccgatcctcagtcataaaaggatcttccccgccctgaaggacgaaagtgcgaaatcccagcgcgtagccgctccggcagcaggataaaatatcttctgtggaaaggcggtagcggcttgcgttctgatttccggcccggatcccgcagtagaggcaattattcttacagtaattgctgtactcgatgagtccgcggacatagacgtccgtgccgtacacgcgctcccggacggcctgcgcctttggaaagaggtaggctgcaagctccggggaacggccgtcgatgagacggacccattcgtctttcgtgagcgcttcgcctgcttccagacggtcgatcagcgcttttaattcattgagacagaccggatcagtcacgccgttccggaccggctctttccaccagcatttcgggtttaacttgttttccagcaatgcggtgttcataaaatcagtatccatgaggtcctcctgtggggaaatatgaccggaagaaatgacagagaaaagaaataagcccgtacaagtgtatgatacagaccgagtgttaaatatgaaagactccatgcagttcaagaagctgcagcgaggggatcagactttcttttgcagggcatatatgtatgccggataacaatttcttccctgtcagaacattcttaaggtcagtaatagcgaattcgactctttcccgaaagaataggaaacttctcgcaggtcagagaacatagaactatcgtaacatatcagaaaataaaaatcaattccagccgagcgaacaggaaaagatgtgggagtgatactttttacggacagaaatttcctgaataaaaatccccgccgcaagagagaggaagtgcggcggggctggtgctggtccggagcaggattggagacccggatccagtattacaaaataaaggaaaaatcataacgatcaagcaggcgtgaacagatattaaatatctttgccgatactcttcatatattccacgaaatcatccccgaatttcagcttcatgcagtcgagtgtgagcttcacgcagcgctcatccccgagtctcgcattgttgaacgtcaggtcgtagttgaccgggttagtccagtagttgccgccggtgtaatacttgtagtaatccgcgcggtacttgtctgtcttcgtgatcaggtgatgcgcctcctcgaccgtgatatcatccatccgttccatgacgcgccgcagtgtgtagcttctcggcgcctccacgtagatgctgacgacattgtcataatccttcaggatataatcggcacattttccgacgatgacgcaggactcggaggcggcaagtttttcgatgatgatcttctgatagtcgaaaagccggtcatcggaagtaaactttgagagctctccggtcggtgcatgatgtttcggcagtgcctgaagctgtttggtgatcagactgccgtttaaagtctcgtcagcttcccggaaaaagtgttccggatagccgctgtactgggacgcaagtgtcaggatccgtttatcatagctgtggacgcccagctcgtcagcaagcatagcggcgatgttacgcccgccggatccaaatcccctggcaaccgtgataacaaagtttttcatacaagatctcccgtcctttctgaatggtgcattagtgagacacattattttgtgaatttcagagtgatcgttccatcatcattatatacaacagcatcctgatccatcgtgatcgcgtcgaaggaagcgccgcgcacataggactccaccagaaaacctgcagcaggattctcagaccggacatgcatggcataaaattgcgcatgagaaggcagcaggcaggttattcgtataagaaacatgccaccatatgtccgtctccggtgtcgacgagtttcgggatctcctttttgcagcgctccgtgcagtgcgggcagcggcctgcgagcgggcagccgacctgatccccgatcgggctcgggatatcgccggtgagcggcaggcgctcttttttctcaaacgggctttctggcgggatcgcggagagcagagcctgcgtgtacgggtgcttcggatctgcgtagatgccttcggaggtgtagaactccatgacgcgcccgaggtacataatcatgatccggtcactgatatatttgatgatgccgaggtcatgggagatgaacacataggtcaggttgaactgcttctgcagacggcggaagaggttgatgacctgtgcctggatcgaaacgtccagggcggataccggctcgtcacagacgatgatcttcggctccatcgagagggcgcgcgcgatattcacacgctgcctctggccgccggagaactcgtgcgggtagcgttccatgtgctggatgtcgagtccgacctcctggagatactctaacgctttctggcggcgttcccttgcagtgtcaccgatgtggtggaccttcatcgcctcctcgatcgagtaggaagccgtttttctgggatccagggaggaatacggatcctggaagatcatctggatatccctgcgggccgcttcccggtcgtagacaggcatgttccagagatcctttccgttataggtgatcgttccgccggacggcttgtggagctttacaaggcagcggcccagtgtggactttccgcatccggactcaccgatgatccctaatgtttccccttcatagatatcaaaagacacatcgctcaacgcgtggagaagcttattcttttcccctaacttttttccgcggatcacaaaatccttactgagatgatcgacgctcatgattacatttttctgcatgtctcattcacttcccctcgtgttaatctgtgctctccgtcctgtctgtggcatgccacgaaatgtccgggagcgacctccttcagcggcggtacctgatttttacagatctccgtggcataaggacagcggttataaaagttgcagcagtaaccggtaagacggagatccggcggtgttccggggatcgtcttcaaatcctctttcgcggagctgctgagtttcggcatggagtccaaaagaccccaggtgtacgggtgaagcggctcttgataaagagtctttgtgtccgcatattctacggtatttcctgcatacatgaccatgacggtgtcacacatctcccagacaacgccgaggttgtgggtgatgagcaggatcgcggtattgagctccttctggaggtcctttaagagctcaagaacctgtgcctgtacggtcacatccagagcggtcgtcggctcgtcggcgatgatgagcttcggatgtccgcagacggccatcgcgatgatgacacgctggcacatgccgccggagagctcatgcggatacgcgtccattcgtttctctgcctccgggatgccgacaagctttaatgcctcaacggctttgttccaggcgtcctttttgctgatcttttcgtgctcccggatcatctcgaccatctggtggccgatcttgaataccggatctaaggaggtcatcgggttctggaagatcatgcagcactcatcgcctcggaatttttccatctgggattcagaaagactccggatatcaactccgtcgaagatgatggagccgtccacgatctttcctgtttttgccggcatgagccgcatgacggaggcactggtgacgctttttccggaaccggattcgccgacgatccccatggtcgttccttctttcagtgtaaagctgacgccatcgaccgctttggaaacgccgctcgcctggtagaaatatgtttttaatccatttacttttaagattgcatcgttttcactcatagcctgcacctcctactgtttcattttcggatccatgacatcgcggatcccgtcgcccaacaggttgaaaccgatgacggtcacaagaatgaaggcgcctgcagttccggctacatggggagctgttgtcagacagtcacggccgacacggagaatgctgccccaggatgcggtcggaagcgcgatgccgagtccgaggaagcttaaggaagcttcggaaatgatcgcacttgcgatacggagtgttgcgtacacgatgatctgggatacgcagttcggtaaaatatgtaagaataagagtctcaccggggagacgccgacaacgcggcaggcgttgcagtattcctcttcctttacgatcaggacctgacctctcgtgacacgggcaaatcccggaacactcgcgataccgatcgccaggatgacgttcatgacgccgtttccgagaacggtgatcaggatcatggctaacaggataaatgggaaggagaacatgccgtccatgactctcatgagaacggaatcgatccatccaccgaaatatccggcagtgagtccgatgagtacgccgatgaaagcgccgacgatcgtggcaccgacggcgacgatcatggagacgcgggagccatagatgatacgggataagatatcacgtccgagatcgtccgttccgaagagatgtcccggcgttccgatccccttaaacggcagaacaggattgatcgcattcgggtcatacggcgcgatgagaggagcaaacacggcgaggatgaccatgaaggcaacgatgaagaagcccacgagagcggtcttatttctggctaacttatgccatgcattgttggcatttcgttcttttaagagcattgcgatgttggcgtcttttccaagagcatcgccggatgtggaagaagctgcggcagcagcaggttttttcttgaagaatgtcatggcatatcaccccttttccagttttactttcggattcaggatcgcgtaagcgatatcgactaacatgttgcagaagacgaacatgatcgcggagaagagaacggttccctgaatcagggaataatcgcggttgttgatcgcggtgttgatcatggttcccatgcccggccaggagaagattccctctgtgatgatcgcaccggtaaaggttccggcgatctgaagtccgagaacggtgatcagcggcgggagtgcgttctttaatccgtggatcaggatgactttcattttccggatgccgcgggctctgagacatcggatatagtcactgctcatgatgtcgatcatgctggaacgcatggttctcgcgaaagtcgccatcgggatcgtcgcgagacagaagcccggcaggatcatgtgactcaccacatccccgatgcctttggagatgtcgcccatgcccatgacaggcaggagattcattttaacggaaaactggaggaccagcataagagccagccagaagattggcatggacacgccgacgagcgtgatgaccatgacaatgtaatcgaagatcgtattctgctttaaagcagcgatgatgccgacgctggttccgatgatgaaagcgaagaaaagtgatgtcagcgtcagagtcagtgtattcgggatcctggaagtgatgagcggaagaacgtcctggcggtaactgtaggagtaaccgaaatcaccgtggacgagtccgtttaaatagagtgcgtactgttccgggagcggtttatcgaggttcatctcggctctcatggcttcgatgtcctccgcatttgcctcaatgcccaggatcgccacagccggatcgccgggcagcattcttgtcaggcagaaggtcagtgtaacgacgaccagaagtgtggggatcgtctgcaataatcgtttgatgatgatctttcccataaaaatccaatcctttcatgactgtccggatccatcaccgggactgtgaatgggggaacagtcgatttttgcgaacatttctacagaaaaagggaaacaaatcagatttgcttcccctttctgcagattttgtaatagttttattcttcgatccagatattgttgaacggtgttgcgactaacatctggttatcagcacggagaaccgcgttatgtactttcggggatactgcccagttccggcactcgtatgcgtagtagataccggtgtattcgttcataactttctcaattgcttccatgtagtatttggcacgctcagcagtgtcagtggagccaaagcctttgttgaggaggtcatccatctccggatcattgtagccgcctgcgttggaggaagcgtggatggtctgggaactgaagaactttccaaggaaaccgtaaggatccgggttgctgttccagcttacgccgtagctgtttacggtatcagcctgccaggaatcgacaacggttgcggaccagtcggccatcgtggaggacttgatatcaagtgtgactccgatctggctccagtagtactgtaacatctgcgccatcttctcacggtatgtagtggatccgatgtaaaggctcatggtgaagccatccggataaccggcctccgcgaggagtttctttgcaccttccggatcgtaggaaggtacgaggtcattgtaggcagtgtcatatgcgaaggagtataccggtaacggctggtaagctcttgtgccctcaccgtactgataaatgccggctaccatggaatcgatgtcgactgccattgtgagagcttttctgacatctgcatttgcagtcggaccattctgcatattaaagcggacgtaggtgacagcggagcttgcggtctggagtaagagacctgcatcctgggcacgcttgatcgcttcgccctggagatacatcgcgatatcgacctcaccggtctgtactgcgttgatcgcctgattggagtcggagatgatgcggaattcaattccatcgacgttcggctcggtcccccagtaattgtcattcttctttaaaacaaccttttcatcggttaccatctcttcgagggtgaatggaccggtaccaacgatatgggaaccaaactcatctccccagccttcgacttcctctttcggaagaatgacgtttccgatctcagctaactggttgatgaacggtcctgcaacggacttcatatggatcacgacctgagtcggacttgtcacttcgcagtaatcgaagaagtcacggcagatacggtctgtggtactttcatttttgcttcgttcgagagagtacttgacgtcctctgcagtcatctttcttccgtcctggaactttcctttctggaaatagacatcgtctcttaagttgatggtgtaggtgagaccatcatcgctggcggtgtaatccgtcgcaagatatggaagaagttctttgtaatcctgatcccagataaataaagtctccatgacgttgtacatgatgtggttttcatacatcgtggagtaggatttcggatcgagagtcagcggggaagatggcatggacactaccagtgttccgccctttacggcttctccgtcggaagaaccaactgcgataccggaagcaagtgtctgatctgtggatttggcatccggagacactgcgttggatgaggcagcagccgtctcagcggtggaaccggctgttgtctgggaggtcgtctgggaaccgccgcatcctgccagggaagatgctgccataacggctgcggctgcaagtgcgatcaatcgtcttttcttcataagaatctctcctctctctttttttacgaacgatccgccggatcctggtaccggtgaaataaaaccggcagtcgctttggaagatccgggtaaaaaagaaaggcgcacttctgacagaagttatcgcctttgataaatgggggatcgttaataaaattatgtgcttaagaataaaaccagaacttaaaaaagtcaagtattttttgcctttaccttatttaattcggcgaaatgttcaaaaaataataattttgtaacttctgtatgtacataattggaaaagtcagaatattttttggcatatagtgcgatatggttactttttacgggtaggaattggagctctttgaccagcccgcgaaaaagatcacagtgatcggcggcggagcgagagagcggcgatggtgccggatcctgagcaatgtcatgggacaaaagatttttgtatacaaagatccggaccttcttccggcgctggcgatcgcttcggcggtattccttgcggaaggcgtgatcccggactatcaggcgtttatcagcacgctggagagccgcggacactgcgataccgtggaaccggatccggagatctcggcgaggtatcatgggatataccagagatataaggggatctacccactggtgcgtgagttttactcggagaaatactaataagaaattacttgcggcaggattccgccgcgattcactgaatcggaaaaatccgcgactataactgttccatacgaaattttcagtttagaaaattcctattcgcgaaaagtaacaataaatgcacaatgtggacagcagaagtcaaaatgcaaaaaatgatcgacaaagtcgatctgaaacaatatcaggctacaagaggaggaaacatctatgtcaaaaggcagatttggcgaacatggcggtcagtatattcctgagacgctcatgaatgcggtactggaactcgaagaggcatacaaccattacaaaaatgacccggaattccagaaagaactcacaacacttttaaatgaatacgcgggaagaccgtcaaggctctactacgcggagcgcatgacaaaggatctcggcggagcgaagatctacttaaaaagagaggatttaaatcataccggcgcccataagatcaacaacgtgctcggacaggtgcttctcgcgaagaagatgggaaagacccgtgtcatcgctgagacaggagcaggtcagcacggcgtggcgacagcgacagcagcagcgctcttcggcatggaatgcgaaatctatatgggcatcgaggacacgaagcgtcaggcattaaacgtatacaagatgcgtcttctcggtgcgaaggtccatgaggtgacaacaggaacgggcaccctgaaggacgccgtttcagaggcaatgagagagtggacgaaccggatcgaggacacccactatgttctcggttcctgtatgggaccgcatccgttcccgaccatcgtccgtgacttctaggcggttatctccaaggagatcaaggagcagatgttagagaaagagggatgtcttccggacgcagttcttgcctgtgtcggcggcggatccaacgccatcggcgcgttctataactttatcgatgataaagacgttcagctcatcggctgcgaggcagcaggacgcggcgtcaacacagcggagaccgctgcaacgatcgcaaccggccgtctcggcattttccacggtatgaagtcgtatttctgccaggatgagtacggtcagatcgcaccggtatattcgatctctgcaggtcttgactacccggggatcggaccggaacatgcaaatctttatgacaccggccgcgcccggtatgtggcgatcaccgatgatgaggcagtcgatgcgttcagtacctttccaggatcgaagggatcatcccggcgatcgagagtgcacatgcgatcgcatatgcgatgaaactcgcaccgacgatgggcaaggacaagatcatcgtagtcaatgtttccggaagaggagataaggactgtgcggcaatcgcaagatacagaggggaggatattcatgagtaagatcagaagcgcctttgagggcggaaataaaaaggcatttatcccgtttatcacctgcggtgacccgtctttagaggtcacggagcagcttgtatatgcaatgaaggaggcaagcgcaaacctcattgagcttgggatcccgttcttcgatccgacggcggaaggtccggtcatccaggcggcgaacatccgggcactctccggtggcgtgaccaccgacaaaatttttgcaatggtagaaaaaattcggaaaaacacacaaattccgatggctttcatgacatacgcgaacgttgtcttctcctacggaacggagcgctttatcaaaaaggcctccgagctcggcatggacggcctgatcctgccggatgtgccgtatgaggagaaagaagagtttgattcggtatgcaaaaagtacgatatggatctgatctccctcatcgcaccgacctcccacgagcgcatcagcatgatcgcgaaagaggcatccggctttgtatactgcgtatcctctctcggcgttacaggaacgagaagcgagatcacaacagacatcggtgcgatggtgaagctcgtgaaaaagtcgaaagatatcccgcgcgaggttggcttcggaatctccaccccggatcaggcaaagaagatggcaggactttccgacggtgccattgttggatctgccatcgtgaaactctgtggaacgtatggaaaggacgcggttccgtatgtaaaagaatatgtgaagtccatgtgtgacgcggtgcatgggatctaagaatcgtccaggaaacgctccgcgaggatgcaaagtgatataagccagcttcgctgaccagaatcacgcgccaagtctcacggacgttcgacttaaatgcagaagaatgttgtcgaaatggtaattgggacatgcacttttacaaggtaaagtgtttacattgtgccgtactttgtgctaaaattaaataacgaactgtcaattctgcggtgcagggactcccttgcaccgcagttacttgtgcaaaggagaaagatgcatgccggtaggaattatcatcaacgccctgtccgtcgccatcggtggtgtggtcggggctttatttgggcataagctgcccacaaggatcaattcggagctcacgaaaatctttggtgtctgctctatgggaatgggcgtgagttccatcggactcatgaaaaatatgcccgctgttatctttgcggtgatcattggaaccgcattcggtctggcgattaatctcggcgggatcatcaacaaaggcgccggatgtatggaaaaaccagtcggaaagatcttcccgaataagaacaaagatatgtcgagagaagagtatatgacgatgctcgtgacaatcatcgtgttattctgtgccagcggaacaggaatctacggttccctggattccggaatgagcggagaccacacgatcctgatctccaagtcgatcctggacttcttcaccgcaatgatctttggaggaaccctgggaatggtggtcgcggctgttgcaatcccgcagtgcgtgatctttctcgcgatcttcgctgcggcgaagttcatctttccgcttactacgccggatatgatcgcggattttaaggcctgcggcggtttcctccttctggccacaggtttccgcatcgcaaagatccacaacttcccggtcgccgatatgatccccgccatggtgctcgtcatgccggtgagctggttctgggggaatgtggttgtgccgatgctgtaaatcaaaaagctttttcagtacatgttttagaggaataaaactgatgctgaaaaagcttttttgtttgcgtggaagttcaaatagaactgcctatgtatgagaaaatgatataaaaatgggaggactcaatcgaccggaagaaattctgctgggagtatgattctttgaatcggcatatcaggatgggaaaggcgttccagaagctgctttcctgtcgcgcgccccatttcggcaactggctgcttgatcaggctcatatgctgaagaccatactgtgcctgttcactgtctttgtaaccgatcagatcaatatcatggtgggggcggattccacgctgatttaagatcatcatagtctcaatcgccataatattgttggaaataaccagagcagtacagccaagcgccagaagcgcatcgagattctcaactaccagagaagtcatagacgttccggtacggatcagggcttcagaaaagattccatgtttttccatcgtatcgcgataggcatcaagacgttcttgtgttgtggaaatgcggggaatcccggtgatgaatccgattttagaatgtcctttctttataaggtattccactccatcggacatggcctgatagtttgcggagattacggaatcatagggagcgcctaaaggggagcggtcaactaagacaataggaatactgggaggaacgattcctgaaatatcagagtagttttcaaccgtagaggccagaacaaaaccatcgacaataccgctggataaaattctcaggttgtcgatctcgcgctctttcgtttcctttgtattaataacgagaagcttgaagccttctttggagataacgttttcaacttcctcgatcattgtcgcaaagaagggatttgaaatatcaggtacaataaatgcaattaaatttctctttcccgtcttaaaacttcgtgcagtcgcatcaggactgtagtgaagttcttcgatacttttcagaacgagccgtttcgtttcttcttttacataacgggtattattgatgacatggctgacggtggcagtcgatacgccggcaagggcagcgacatcacgaatactaacttttgacatatgcatttattcccccttcgcgacattgtaaaacgtttaacataagtatatcacccaaaaatattgatgtcaattaaataaaattgagcagaatagctattggacaaaaacgaagaatatgtaaaaagtacacaaaaaagcaaaaaaacatttgtaaattagcaataattgacaacatatataaggcgggggtataatgaaaccacagaacaagttaaacgtttacgcaaacgtttgacagaacgagtaatggtccaccggggactagataacaaaaaaggagaggacgatatgaagaaaagtgcgaaacgaatttttgcgggcgctatggcagcggcaatgatgctttcgttgacagcatgcggcggaggcagttcaacggaaacaacggcggcggcaacatctgcggcagctggaactgagacagcagcaccggcaggtgatcaggagaaggttgttaaaattgcatatacttcagacccgggttcccttggaacattcgatgagggatcttccagcggacgttggacagttctggcgtatacatatgagaacctgatctatatgggtggtgatggtgagtactacggaatacttgcgaaaaactgggcaaagaacgaagcggaatctactccgacaaacgtggtatgggatatcgaactttacgattatattaaagatacagcgggaaacaatattaccgcagacgatgtagtattcagctttaacgagtgtcttgaaaatggtaaaggaaaccagcatacagcattgaccggttcccttgtatcaattgaaaagaccggcgattatacagtaaaacttgtgtgcaatagtgaggcagcaggagaagttgagaatatgctgactcaggttatgatcgtttcagagaaagcatacaaggacagcggagactgcatgagaaccatgccggttgcaaccggtccatacaaagttgagtcctgggtaacaggttcttccctcactcttgtaaagaatgaagactattggcagaaggaagatcttcgtgttgagtgtcaggagcagaatgtcgataagatcgaatattatttcgttacagagtcttctcagatcgcaatcggacttgagaccggtatttatgatgttgcgacctctctgaactattcaaatgcaagccgctttatggagggcggagagagtgctgcgaactttaatgtagaagaagctcgcgataactatattcagcagatgtggatcaaccgttctacagaaagtccgttaaacgatcttaaaattgcgcaggctgttctttacgcgattgaccagcagggactgatcaatgtggttatggaaggccatggtgagccggtttactgctatggcagtgatttaaacattggattccaggaaaaatggaaaacagaggattattataactataatccggaaaaagcaaaagaactcttaaaggaagccggagttgctgatggaagtctgaaacttacaattctttgcgatacagatgaggttcgtgtaaagactgcacagatcattcaggcatacttaaaagaagttggaattgacagtgaggttacatcctttgaacaggctctctggaatacataccagacagacccgactaagttcgatcttaatatttcttataactccgcatacggttatattacccgtatctggaaccagttaaacagcacacgttacgcagagcataacatggcaatggtaagagatgacaaactggacaatctcctgatgacagcggctgtttctcaggacgatgcggacattgatgctgcaaagcagtacatggttgaagaagcttatcattatggtctcttccataaagacaactactatattacaaacaagaataagattacaagtgcaaaatacagcatccgttccaacttccttccgggcgcatctacttacgtttggaactaagcttatggaataaaaatgaatgaaaattgcaatgcagtttttatagttacatgacaacaatcatcggcgtgcaggaaccatatatttggattcggcacgccgattcctaaaaacagaggtatttgggaggaagaagaatgatcagatttattggcaaacgaattctgcagatgatacctgtagtgttgctcgttgcgacattgatcttcggtattctgtacctggttcccggtgatccggcgcagatcatgctggggagtacagcgtcggaatatgaacttgcggagatgagagaacagcttggtttaaacagaccatttattgtgcagcttggagagttcttatcagacgtatttcttcattttgatctgggtgaatcttatctgacaggtgctccggttgcgggagaaattatgcagagacttccaagaacactgattctgggaattgcctcaatggtattagcgtttggtatcggaatcccgcttggcgtaacggcagcggttcaccagaatggctggggagacagaatcagcatgatcattgcgcttcttggcgtttcgattccgacattctggcttgcaatgctgtttgtactcttattttcattaaaacttggctggttcccggcgagcggaatcggcggttgggagtattatgtgcttccgacagtttcactttgtttcggtggtcttgccactcaggcacgacaggcgagatcaagtatgcttgaggttatccgtgcggattatgttgtcacagcgcgttcaaagggactgacccagcgagaagttatcttaaaacatgcacttccgaatgcattgaacccgatcattacattggcaggaacaaacctcgcggttatttttggtggttccattgttatcgaaaacgtattctcatttccgggaatcggccagtatatgattacagcgatcaatcagcgtgactatccgatcgttcgtggctgcgttgtcatgcttgctgtagtatttgcggtaattatgctgttagttgacctctgttatgcgtttaatgatccgcgaatcaaggcgcgttacgagaatcagggcaaaaagaagaaaccgagcaaggaggaaaaatgatggcgaaggacaatacatataaaaaagaaaatgcgtttctggtcctcgcaaaacggatgtccagaaacaaaaacgcaatgtttggtctgacattatttgtgatcctggttctggcgattatcattgtcccgatcgtttctccgtatcagtatgataagatggacgtcatggcaatcaagcagggaccgtcatctgcgcacctgtttggcacagatgatctcggaagagatatttttaccagggttttttacggcggaagatattccttaagtattagtattgcggcagtattattttcaaccgctatcggtacagtcgttggagcgattgcaggatattttggtggtgcagccgatacggtcattatgagacttcttgatgttattcaggcaattccgtcgatgcttttaacgatcattatttccgcggctctcggtgttggaattgataaaacaattattgcgattgcagtcggaacgattcctggcaatgtccgcctcttaagaggaacggttatgcagacacgtgaaaatcagtatctggaagctgccgaagcaatcggatgcagtaccgcaagaagaattatgaagtatgttattcccaacagctggtctccgttgattgtctctgcgacaatgggcgttgcaaaagcaattctggaactggcagctttgagttacataggtcttggcgtacagccgccgactcctgaatggggagcaatgctggcaggtgcaagaggattccttcgcgattatccgtatatgctgattttccctggattatttatcgcaatttcagttctctgcctgaacatgtttggtgatggactgcgcgatgcacttgatccgaagttaaaggactaaagagggggatatgttatgagcgaaaaatttttaaaggtggaggatctcgttgttgagtatcgtacaggtggaaaagttgtacatgcggtcaacaatgtttcctttgaattggaaagaggaaaaacattaggacttgtgggcgaaactggcgcaggaaagacaaccattgcgaaaacgattcttcgtgttcttccggatgctcaggcgaaggtcaagagtggaaaggtcattctggatggtgcggatcttttatctctcagcgaggcagcaatgagaaaggttcgcggcggacaggtcacgatggtgtttcaagatccgatgacagcattaaacccgatcatgaaggttggagagcagattgcggaagtaattcgaaaacatcagacaagagaagataaaaccgcaagagagatggcggaagatatgctggcaatggttggtattccaagagaacgttacggagaatacccgcatcagttctccggcggaatgaagcagcgcgttgttatcgcaatggcactggcctgcaatccacatcttcttctggctgatgaaccgacgaccgcgttggatgtaacgattcaggctcaggttctcgatatgatggatgacctgaagaagaaatacaatacagccatgatcctgatcacccatgatctcggtgttgttggaagaatgtgcgacaatgtggcagtgatctatgccggtgaagttttggaatatggttcaaaagaggagatattccttcacccgcagcatccatacaccatcggtcttttcggagcaattccggatctttctgtagatacgcggagacttgccaatattgaaggactcccaccggatccgacagatcttccgacaggatgctgttttaatccgagatgtccgcatgcgacggataaatgcagaacgataaaattcccgttgacagaagtaagaccggggcatttttgcagctgcccatattgtgaagcagcagaaaaggaggattagtatggcacttgtagaggtaaaaaacttaaaaaaatatttctatggtcccaaaggtgctgttcatgcggtagatgacgtaacgatgaatattggtgccggagagacaatgggtgttgtaggagaatccggctgtggaaagtcaactcttggaagaacgatcatccaccttcagaagagtacggggggatctgttcattttaatggaaaagatattacaaatccgacaccgcaggaactgaaaaaattgagaagtgatgttcagatcattttccaggatccgtattcgtccctgaatcctcgaatgacagtcgaggatacgattaaggaaccgctcttaattagtggaaaatgcgacaagcagaatgtagacgcagagacagaacgtctgatggatatggtgggtattgcgagacgaatcaagatgagctacccacacgaactggatggcggaagaagacagagagtaggaattgcgagagcgctggctctggatccaaagttcatcgtatgtgatgagccagtatctgcactggatgtttccattcaggcacaaattttgaatctattgatggatctgcaggaagaacatggacttgcgtatatgtttattacgcataatatgtctgtagtacgccatatttcacataatatttctgttatgtatctggggcagctggtagagacaagtccgacgaaagaattgtttgcggagccgcttcacccgtatacaaaagctcttttgtccgcaattccgacaacagatattctgcatccaaaggaaagaatcgtattaaagggagagatcacatcaccgatcgatccgccgccgggctgccggtttgcagatcgctgcgtttatgcgacagaaaactgcagaaagccacagaaacttgaggagatcaaaccaggacattttgtatcctgctgcagagtacgtgagatcaattctctttaaaagttgtgagttgagataaacagggaggtcatcatggaaaaatatcagagctttcatttcagcccgcttaataaccgttcgatgctgatgcccagaattccaaaaggaacagagtatcatgtggacagcagcaggcttgtaaacccgtttgaaccgattctggagaaagtactgaagggaagagctccatatagcctgttgaattccggatttttcaagaaggagatagaactggaaggcgcaaaacggccgtatggactttatgcaccgcagaatctttggtcaaaaggtgtctgcgcagtgatctttgcggaaagtggtgttacagcagaagaatttataaagacaggaaactggaaacaactagcagataaatatcttgtctcgctgctgatcctggagagcccgaagtgggaaaaagaacagattgaaagagaatttgactatgcatggacgactgtttatcatgaattcagtaagagaccaacggtcgatatctgtgagtcgtttttctatccgatcggtttgggggacgccgctggcatagctgccgcgtttgcgcttacatatagtgcgacatttccggcatttgcggtatgcggagactgcagcgtggatccagaactccttaatgtgttgagaaaattaccgtccgatggaattgatacatggaagaaaacagaaattgcaatgccgggatttctcattgataagaagggaaatgctgaagctgtattcgagtatataaaagagatcaaccgcgtgaaagaagaaaatctgatcaatcagtatggaagcgtatatctggagcagccgagacgcggagcttattatgtaaacgagcagccgatttcgcaggtatggcttgcggatgaaaatagtacaaagaaatttgaccagaatgaaataaatgaagcgatgcttcggtttgtccttcgtttttccctatggggcggatctggaaataaccatctgcggccgaagagaagctgggaggaaatcggagtaataagagtagagaaagaaatcgcaggactgccaaggtactgggatatctatgtaccttcctgctataggccggatgacaaaaaggaatatccgcttgttgtagcaattcatggattttcctgcagcccggaatattttgaacagacaagtgactggcaccggcttgccgaggaacgtggattttttgtagtttatccagccgcgtatccgagaaatgtagggagaagcagatttccacttccaggctggtgtgtttggccgatggatcaggaaggtgtggacgaatccgaatatttcaaggtaatgctggatgatatggaagaaaagtatccgatcgataagaaacggatttatgcagttggacattctaatggcggccggatgacacagaggctttcaaggacaatgccggaacgatttgcagcatttgggccgacgggtgcactgggcggcaagttggcggacgcaatcgaaccgatcgatgatcatatgaaatgcccaattgcgtttatgatgggcgagtatgatatggcttctccgtcagtggaggaaggaagtattgcccgagagactttgaaagcatactgccgtgcaaaccatatgacgccgcaatttgaaaactggtatgataatggaatttatcatacgttggtgatgtatgatgaggatcatgttcctatgatccgatatacgatcatgaaaggctgcccgcatacctataccggagagatggcacagcttacctgggatacattcttatgccattttacaagagaggctgacggaagtattcaatatcatggataatgactgctgcaatgcaggaagaggtaaagattatgggaaaatatgagagctttcattttagcccggaaaataaccgatcgatcttaatgccacgggcaccaagaggaacagaatatcacccgccgaaacggaacagacacagagaattgtttccgccgatcccggaagataaattaaatcatagcagcccgtattatcagtgtaatcttggaattacagaaaaaacgatcgtgataaatggccaggagagaaaatatgcaatctatgtgccggatggaatgatctcaaagggtgcggggatttttgtattcccggaaaatgggacgaacgcggaaacatttattcattctgataactggatcgcgctggcggaaaaatatcatacagctttggtagtatttgaaagcagccaatgggacagagaacagattgataaagaatttgattatgcgtgggagatcatcacattagagtttgtgcagcggctgacagtcgatatctgtgaatcatatatgtatgttatgggattcggcgctggtgcggaaattgccgcggcatttgcactgacgtacagtgcgacgtttgcagcatttgcagcggatggaaactgtgcggtagatcctgaattgctggagatactcggaaaacttccatcggatggagatttgacattaaagaaaacagatattgcgattcccggattcctgattgaccgaagtggaaaagcaaaggaaacattcgaatatatgaagacgattcttcgggctaaagaagaaggtctggcaaatgcatatggagaagtttatctggagcagccggagcgcggacagtattatgttaatgcacagcctgttgcacaggcatggcttggaaattccgagagtgtgagtgaggtatcacgggaaacacttaatgaagaaatgataaaatttgtcctgcggttttcacgctggggcagttttggaaataactgtttaaggcctatgagaacgcaggaggagattggggttgtacgagtagaacaaatcgtagaaggtctgccaagatattgggatatctatgttccgtccggatatcgatctggagatggaaaaaagtatcctctcgttgtggcgattcacggcatgtcctgcaatgcagaatattttgaacgtaccagtgactggtatcgccttgcggaagagagagatttctttgtatgctttgcgtcggcatatccttataatgatggactggcaaaatttccggttccgcactgggcgttggaatcaatgggagttccgcttcatgatgaggtgccttattttgagaaaatgctggattacatggaaaagacatattcgattgatccatccaggatctatgtgacaggacattctaacggttcacatatgacgcaggaactggcgcggaggattccggaacggtttgcagcttttgcaccaaccggagcaatggacggttgggatccacaggtacggccattggaaggctgcgcacagagaccggtatggtttatgcttggagaatatgacatcgcttccgtatcgctggatccgggcacaattgcgagtgcaacacttgaaaattactgccacagcaacggagtagaaccgaggtttgagaattggtacgataatggaaaatatcatacattggtaatgtatgatcaaaatcatgctccgatggtgtgctttacagtcattcgaagctgcccgcatacctacacagcagaaatggcgcagcttacgtgggatcactttatgtgccatttccgcagaaatgaagacggaagtatccgctatgacggctgaaacagaaaaataacagagaaggcaggctgacagagaatatagaggtgaaagtggatgggcgacaggtacatttggggagtgcagcttctggtagaagatgtgcccggtgcgaaaagatggctttgtgaaaatttgttttttgtggaagaagatcataaagggatgatttgtctgcgtaatggaaatttccggttggttttaagagaagacaaagaacatcttgcagacaaatacgggccggatgatatgtgtctgggattccgacatattgcgttggagacacatgacatcgaggcggcgattgcatattgcgaaagccggggattaaatctgcagctcggagaaaacggaggaccgcggtatagtggaaaagtatatggaacaggaatgaattatttcaacattatatcgggatacggatttacgatagaggtcagccagaagctgcacaaaaagattccgccgaacaggacaccgatctgtggtcttgaacatgtgggactacaggtttcagacctgtctgctgcaattcaattttatgagaatctgggattcaccgcgtgctttgatccggttgtaaatcatgtggacggacatacgattctctgctgtatggttgctgccggtgagacggtaattgagatttataaatttcatgatttaccggaactttctgtccagagacatccggtaattgagaggcttattctcgggggaaatgactacttgtccgggacagctctggagagagtaaaatttatggaggagaaggcatgtacgatataacagcactgggtgaaatcctgattgattttacgtatcagggaatcagcagaaacggacaaaaactatttgcacagaatccaggtggagcgccggcgaatgcgttgacatcagcggctcgttttggggcaaaaaccgcatttctgggaaaagccggaacggatatgcatggacggtttttaaaggagattttagagaaggaacagatcgatacgagaggctttattctggatgaaagatattttacaacgctcgcgttcgtggatctgtcaccggaaggagaacgtaccttctcatttgcgagaaagccaggggcagatacgcagatcacagagaaagaactggatatggaaattcttgggaacacgaagatattccatgttggttctctgtctttgacgtcggaaccggcacgcagcactacgtttgcagcaataaaggcagccaagtcagcaggcgcagtcatctcttatgatccgaactacagagcaacgttgtgggagaatgtggaaacagcaaaacgcgagatgaaaagtttgattccatttgtggatataatgaaaatttcagatgaggaaacagaacttctaacagatgagaaggaaccggaacaggctgcaaaagtgctgctggagaagggagtaaaacttgtagcagttacccttggaaaagacggctcatatatagcgaatgcaaaaggaggaaagagagttcccggatttgaaagcaatgtggtagatacgaccggagccggagatgcattttggggaacatttctttataaactcagcaagtcaaatgaatccatcgaaaaaattacattagatatggcggtagaatatgccgaatttgcaaatgcagcggcatcactatgtgtagaaaatttcggtggaattccatcgatgccgttgattgcagatgtagagaagcgaatgaaaatgaaataagaatgtttggtgcgggagtctctgaaatgtgggactcccgtttttatgcgatgagaaaatactgaaattaaaacagaagaccattttgctgatgtcagcaaaatggtcttcgctgggaagaagattttttaattgtacaaataagcgttacgactgcgcacccaaagcagtcgatcagtacgtctgtaaaccgccctgcgcggcccgggacaaagagctggtggaattcgtcggtgcaggcgtagaggaagacgatggcgagagcggtgagaagacggcgtttcatatttaatggctggtatgtaaaatggagtccaaaacggacggtgcagtaaaatacaagatattccgttatgtgggcggttttccggacggggaaactcatgagttcgatgagctcggcatattgcgtcggatccccgcggaaaaagccgaatttcgtcccgatcaggaggatcagtcggctcacggaatcgctcatttccgtggattcgacggccggctttgaggagaaccagaagatcgcggcggcgataaagagtgccgggagccagacgagcaggcgaagatagattgatcggttgttgttgaaagcattttctgatgaaaatgcaggagtcgttttaggttgtttgttattgattatcatttctatataaaatcttatttacagtctgtatcgttcgcagcaatggccttgagggcaggaaattcgaagcaatacaatggttacgttgtttcatggcagatgccagccgaggtttttgccccaattccttacagggaaacatcctccttcgcccgcgcccgtcgatccatgatcgagtggattaccgggaccatgaaaattgcaacaattccacctgcaaatccattattatataaattcatgccaccatacacaattccgacatttaaggcgacggaggagtgaaggaatccggcgagaagtccgacaaacacaccgaattctccggcgatgggtgccaatgtggtcgagaataaaagcgccaggatcggtgacggagcattgatggtccagtgtttcgtaaaacttgcgaggagaacgccgaacatgatcggagcgatgtttcggatatgttttccggttgcggagaagccgatgatcgtgaagatcccgccgatcgtcggtccgtttaactcgccgccgactccgagaacaaagattgttgcgaacagcccgttgagcgccatgttgaggacggttgcagcgccgccgttgtcacggagatagtcggttccgccgatcccggaacaggataagatcttccagtaagagtctccaacgttctttccgccaaagaggaacgcggctgcgatcatggcaataaagagaccgcagaggatcgcaaacagaagctggttgttgccctcagaccagatcaggcgggattcggtggtgatcccgaaggatttcagcacggatacgataacagtggcgatgataccggaggagaatccgacgttatagagcgagtagcccttatgcgcatagtggacatgggtggataacggcggcagcacgaaaccgatgatgagcccgaccgcgagacttgcaatgagccggactgcatagggcagatccgagatatacatgatctgcgtgatgatcggggacaggctggtgccgtaaaaaccgatgtaaatgtagctggacatgtgttttttgtgatagtgggaatagaggtatacgccgagaagaattgcccagatatttaaaaggttctttccaaaaagggaaaacccgaacatcaggcagctcgacgtgatcgtgtgtccgtccatctccattccgagaaaatagatcgtccagatgcaaagaagagtcagcagaccggcgttgataaaggaagtcccgatcccgccgatcagaaagtagtctgtgattaggaaatccggttctttgatgatcgtgatgagaccggggatgatctcagtgacaggctgcaaaaacaggccgacgatcatgaaataaatagggatcagagacagaagccggaacttctgaagtcttgtgagtgggtgggaaattgtcatgtacgtgtcctttcgagaaaataatatatgtgggagtatgtgaatgcaccatgtgtatcttgagatcatgaagaaaatctggaaaacagtgaatgcacgttttttagtataccgtaataatgggaaaataggaagagtttccgcaggggacggatggaaaatgtggatattttgctccgggtttcaaaaaacaaaaataaccgcccctgttcttagaaaacaggagcggttattttcgataaacgtgtgaaataaaataagatgccaacagaacatcaaacagagaacatcttacttgataaacagcgtattcacatccagctcgttctcgatcatgccggactcatacatgaagtcagcagtcttctggaaaccttctttgtcggcgtcggtgatctctgtggagaaatcgtagtagccgtacatctcttttacagcatccacgtcaaggtcaagtgctgcggcaacggtctccatggtctcatcctggctgtcagccatgtaggatgcgatctcgtcctgtgcagcatttaatttctcgatgacatccggatgctcatcgtaaaacttctgagttgtcgcaacagcgatcagggcgctgatcaggccttcaccgtctgcaacgaggtggtagccctgctgttctgcattgtaagcagttgcgccggcgatcagggcaacatcaacgctgccgccgtcaagacctgcctttgcgtccgggatagtcatgtttacatagtttacatcgtcaagagtcatgcctgcctgagcgaggtaggagacaaggagttcatgaaggttggtgccggttggtcctgcaatcgtcttgccttttaaactctccggagttgtcagggtctcatccttggagtacatgcagaatgccttcggggaacggctgtacatgtttaataccttgatgtcagcgccgtttgccgcggacaggatcacggatgttgcgcctactgcgtagagaacctgaacgtcgccggaagcaagagcctgtgtctggtcagcgccggaagtaagctctgcatactcaaccggaacgccgagctctttctcgaagattccctggtctttttcgatgatggtcggtacgtttaacggggatgttacataagtaacggtgagtttgtcgatggaagtcgctgtgtcagatgctgcagcggaagtttccgcttctgtggaagcagctgcggttgtctctgctgcagaagcagcctctgtctctttgcttgcggatccggagcagccagcaagggaaaatgtcatgcacgccgcaagtcctaatgcgatcagttttttcattttgtgttgtcctcctcatataagtaaaaattaaatgtatgatatgcctgagttgcaggcggatatccataagaagtcaagagatattcgcaatctgcttttgttgcttgttcataatcaaatagctgttgcgcaacttgtcagagatggcttgctccctcccgatataagtaagtccccgcccattgcttatgcaatgcagaggtgtccctgactttgttaaattgaattttatataaaatatatctaattaagaaaattcaactgctctataatctctctcttgagcgcaataaactcctcatccagcagattccgcgctccggccgctgccttcaccggatagacatgtttcacgagacctttttcgatcacaacgatctggtcacccaggatcagcgcctcatcgatgctgtgggttacaaacatgatgctggaatgttccttctgctggacgcggagaagctctttctgcatctgctctctcgtaaaataatcgagagcggcgaacggctcgtccatcaggatgaaagtcggctcataggcaagcgccctggcgatcgctgcgcgctgctgcatgccgccggagagctgggacgggtatgctttctcgaagccggaaagatttaccgtcgtgatgatgtcctgaattttagctcgatcgacctgattctttttcagcccgaaaataatgttgtcccagacgtttaaccatggcatgagccgcggttcctggaacacaaaggcggttttgtgatcgccgtcccagaggatctcgccgtcgtcggcggattccagaccgccggtgagccgcaggagtgttgtttttccacagccgctctgtccgaggatcacggtgatctttccagcagggatttcaagatcgatgccgtttaggacaggaaatgcccggccatcgacctgatatgtcttatgaatgttttttaacttaattccagccattttcaccggctcctttcagaaagatgctgatgagaagaccgaagatccggtctgtcagataacctgcgatgccgatggcgaagatgccgacgatgaccttgtcggtccgggacatctgctgggcaaacaggatcatgtgtccgagtccggtggatgccgcgaccatctccgcaccgatgatggcacgccagctgtaacccagaccgatgcgcattcccacgagaatgtccgccatggcgtagggcagcatgatgcgaaagaatttctgccggtccgtgtagccgaacatggttccaacctccagaagcttccggtcacagcccgtaaatcccttgacgatgtttaaatacatcgggaaaaaagatgccagaacgatgatgactgtctttgtagtttcaccgattccgcaccataaaataagaagtgggatcatgctgagcggcggcacgttcctgaagaactgcaccaggtactcatagtaacctgcggaggcaggaatcatcgcccgcagcatgccgaaggcaaatgccaggataaaggcgatcacaaagccttttccgacacgcaggaagctgatccttaagtcgcggaaaagctcgccgctctgcagcattttgcagaaactctggaagacccgccccggggacgggagcacataggaacttaagatgcctgcgcggcagacgatataccagacggcaaagaccgcaaggatgccgatcagcggtgggaaatattttttaaatttctgattcatcgcactccatctcctctgtggcagccctgaacacagtacaaaagctcgatcagctttgcgcttttccagtcatttccggtcacataggactcaatagccggacggccggatcggctgacaacggaaaacggcagattcttaaagaatcccggtgggatcgggcttgcgtccggcgcgggttccattggctcgccaagtgcagcgagaaagcggttccatggtacaaaatgagtgtcttttaattccaacttatttcccatgtcggctaagatccggcatggcgttgtgatgatcttttcaccgttcgcaagatccggacgttctgccagttctctcgcacagtggatcaggatcggctcaatatccgcgatccggatttcaggctgcagggaatgtaccagagatgccgctgccggacatctcgcgtccgcaaaagttccatctgcatgttccaaaagctccaggtacttccgaagcacgatctcgccccagctttcctgacagaccactcgcgtcaggtcatgcttcttaagcagcttttcaagtgccgctgccgagatcatcctctccgataccggattgatccatagatatgtcaaagtaaaattcctcccaattagctgcaactaaccaacattgtttagcatagcagattagtggggaaatgtcaattgggaatataggggagatgaaatatagaggaatagacattacatttttatagaagagattgattgtgaaagtaaaaatgggtacaatatatataagtaaaggaggggcggtcatggcaattgagatgcaaaaactgatttcggaatatgtcagagctgtgagaaaaatatatggtcatcacttaaagcaggtgattttgtatggttcatatgcgcgtggggattatacaaaagattccgatgtggatcttatgctgttggtggacctggatgaaatggaattagaaaaatattctgacgaactgtcagagttgggttttgattataatgtcgaatataatatctggatgatgcctatcgtaaaaaacaggaaaaatttctttaaatggagcgacgcctatccattctacaagaatgtaaaaacagaggggatttcattgtatgaagcagcctgaagagtttgatatgggggatcagtgggatttggtttatcaccgtttgcagattgcggaagaagattatgagaccgcagagttgttaatgcaaggtgagcgatatcgtggtgcaaataaccgggcatattattcgatttaccacacgatagatgcggtcttatcgatacatggtgttgcatttaaacgtcataaggatacattggcatattttaataagaatttcgtggcaacagaaatatttccacgatcaatggggagacagatcgttcaggcagaagaaatcaggcatgcaagtgactatgatccgttttatattgtgtcaaagacaggaacacagaaacagattgaaacggcaaagcttatgctggaatatgcaagacaatatattgatgaacagagaaataaataatattaacaattgatttctaaagaaaacagttgaaatataaggaatgcagtgatatactttcaaacgttgcaaagcccacaaaaaccaaggtcctaaagggcttttcgccgattcccggcgtaaggtcatatacttgcagtatatgccttccgcagcattcgtcagatatacatgcgagcatgtccgcctgactcattgctgcgcgaaaatgaatcgagtgttcgtgaccttccactcgtaaaacaaaactaaaggagaaactgaatatgaaaaacaacgcaacaaacagcccggtactgacacttg

SEQ ID NO: 1987 - DNA, 111734 bp, Unknown
  gut microbiota DNA sequence
ggatcatttgaattcatgaatctggggctgtcgcactaatgtgcggcagccccagattctttggtatacaagtgtggtatacaaataatcgacaaataatcgacaaatgaacgactttttattactatcccacactatgaacgacttgaaaaagtcccataaaataaggattttttagaactttccgtcatcagcagcctgctgtacggaaactgcgacagcaacggtagcgccaaccatcgggttgttgcccataccgatcagacccatcatctcaacgtgagccggaacggaggaggaacctgcgaactgtgcgtcggagtgcatacgtcccatagtatctgtcataccgtaggaagccggacctgctgccatgttatccgggtgaagagtacggcctgtgccgccgccggatgctacggagaagtacttcttgcctttctcgatacattctttcttgtatgtacctgcaaccggatgctggaaacgggtcgggttcgtggagttaccggtgatggaaacgtctacgccctctttccacatgatcgcaacgccctctgttacgtcgttagcgccgtagcagtttacttttgcacgcgggctctccggatctgtggagtagcatttacggaaaacttcctcaacttcgcctgtgtagtagttcatctttgtctcaacataagtaaagccgttgatacgggagataatctgtgctgcatcttttccaagaccgtttaagataacgcggagcggttttttacgaaccttgtttgctttctcagcgataccgatcgcgccctcagcggctgcgaaggactcgtgacctgcgaggaagcagaagcagtctgtgtcctcttccaggagcatctttccgaggttgccgtgtccgagaccaacttttctctggtcagcaacggaacccgggatacagaaagcctgaagaccttcaccgatcgcagcagcagcgtctgcggcacggcggcagttcttcttgatcgcgatcgcagcgcctactgtgtaagcccagcatgcgttctcgaaacagatcggctggatcttctttacctggtcatatacgttaaggcctgcatcctttgtgatcttctcagcttcttcaatggatgcgatgccatagctgtttaaaacggaattgatcttgtcaattcttctctcataggattcaaataatgccattgttttcttctccttccaatcattcctgacgcgggtcaatgatcttcactgcatctgctacgcggccgtactgaccttttgctttttcgtaagcagttgtcggatcgtcgccttttttgatgaagtcggtcatcttgccgaggtttacgaactggtagccgatgatctggtcatcagcgtcaagagcgataccggtaacataaccttctgccatctcgaggtaacgcggacctttctttaaagtaccgtacatcgtaccaacctgggaacgaagacctttaccgagatcctcaagaccagcgccgatcggaagaccttcctcggagaatgcactctgggttcttccgtaaacgatctggaggaagagctctctcattgctgtattgatcgcatcacagacaaggtctgtgtttaatgcttcaagaattgttctgcccggaaggatctctgctgccatagctgcggagtgagtcataccggaacatccgatggtttccacaagagcctcctgaatgataccttcctttacattcagggtcagcttacaggcaccctgctgcggagcgcaccagccaataccgtgtgtcagaccggaaatatctttgatttccttggactgtacccatttcgcttcctccgggatcggagctgcgccatggtttacgccctgcgcaaccgtgcacatctgttctacttcatgtgaataaatcatgttgagactcctttcaatatatggtttttaatgctcgttaaaaaaatcacatcatacccgttccattttctcacaaaaatgaagtttcgtccatacctttttccaaaatattcaggttttgggaaggaatttcaacagaaaaaagaacctccccgggtaggaataagaatgggatttcttattgcgaaacatattctatatagcggaaaaacgatggatcaaaccaatgaaatcctgttcatacaggagaagagaaaagagattgtaaacctgggatttcagcgttatactaaaaggaacgaaatgtgatcggggcggcggtcagatcctgcctggtgcgggaaacgatcggcggctcatgcaaaaaataacgaggtggatcaatgaaccttcatgaggatgcaaagatgaaaatcgaacggaaggaagagcaggaactggaaattctcggagagatcctggaagcgtatgtcgatacgccgatcaaaaaggatgcgtttctgatcggagatcttggtctcgattcctttctgattgtatattttatatcggaagtagacgaccgtttcggcgctgcgatcgagatgccggaacatgtggagtatatgacggtccaggatgtgctggatcagttaaactggagaaagtgaccggccaaaaaggtgtgaagccgcagccggataccggaaagcggctcgtacagcagaaccggaggacaggagaaaatacatatggaaaaaacactggaagagaaaaaagaacttgctgcgaaggtgatcgcggcattaaaaaaagagtatccggatgcggactgtacgctggattacaacgaagcatggaaacttttggtcagcgtgcgcctggcggcccagtgcacggatgcgagagtcaatgtggtcgttcaggatctctataaaaaattcccggatgtgaaatcactggcggaagcggatgtgaacgagatcgaggagatcgtccgtccctgcggactcgggaagagcaaggcgcgcgatatcagcgcctgcatgaagatcctctgggaacagtatcatggaaatgtgccggatgactttgacgcactcttaaaactcccgggcgtcggaagaaagagcgcgaatctcatcatgggtgatgtcttcggaaaaccggcgatcgtcaccgatacccactgcatccgcctgacaaacaggattggtctcgtggacgggatcaaggacccgaaaaaagttgagatggcgctctggaagatcattccgccggaggaaggaaatgatttctgccaccgcctcgtggaacatggacgggctgtctgcactgcgcgaacaaagccgtactgtgacaggtgctgcctggcggagttctgcgagaagaacggggtagagtaaagaaggtctgaactgccatgaatccgaacggaactatcggtggcagatcgtgtaaatgaatataaagaaaggtcagaatggaaaggcgtccattctgacctttttggtatcaggattcgtttttgcgatcgtgcagtgggaaatcaggaactctgacctagtttgccgtctcgttctcaaatttctccacgtatttttcctgaatcagctttacgagttccggagcttttccgccgatcggagttccgttcatctcgcaagccggagaacagaattttgtggagctggagacgatgatctcatcggcatccatgagttccgccatcgtgaacggtgtctcatcgaccgggatcccgttgtctttgcagatctggatgatatgcattcttgtgatgcccgggaggatgtagtggtcggtcgggtgagtcttgaagatcccgtctttgatgatggagacattgctgtgggcgcactcggtgacaacatcgccgcggtggaagacgcattctccgcatcccatggactcggctttctcagcagccataacgttcacaaggaggtttaaggtcttgatgttgcagtgaaggaaccgggtatcctcaacatcggtgagcttcaagcgtttgctggaatctgccggttttcccggtttcataaagatccagagattcggttttgtgcctttttccgggaactggtgctgacggatcccggttccgcgggtcatctgccagtagatgaagatatcgctgtcatccatcttcgcgagcatgtcatagaggatcgcggtcagttcttcccgtgtataaggaatctcgatcctgagaaggcccgcactgttgtaaaagcggtcgagatgttcttttaaggcgaagatctttccgtttcttgcaagtgttgcttcatatacaccgtccccgaagtagcaggcacggtcattcatcggcacggtcatctcctcgagaggaccgaatttcccattgtaatatccaagtgttttcataatgatttcctcctgaattcaagtggttgcggcacaagggcagggattgttccctttgtggtatcatagcatgaaacgcgggcgttgtaaagaatatggggtgaacagggttgtggaaacttcataaaaagttcggaaatctttcgttgtaatatggcatattttccggtataataggaatgatcatgaaaagaaaccacctgtgcagaaatgggtggcgagcataataatgaaggaaagtgcaggaaattaccaatgaacatcagtatgaacccaaatggtgaactgtaccagtcggctgtcaacgcgccgggagcgatcgatatcccggagagctttttaaatgaggcacgtcagttccgggagttaaatatgcgctacgcatgcgcgatccgggaagtgaagacgaaattggaagtattgaacgacgatcttgcagttcggaatcagagaaacccgatccagatgatcaaatcccgagtgaaaaagccggagagcatcatcgaaaaactccacagaagaggattcccgatctccgtagagtcggtgcgggaaaatctctacgatgtggcggggatccgcgtgatctgttcgtttgtggatgatatctataccgtcgccgagatgctggcgcgacaggatgatatcaacgttctcatggtaaaagactatatccgctgcccgaaggtcaacggataccgcagctaccatatgatcatcgaagttccggtattcttctccgaccggagggaaaacatgcgcgtggaggtccagatccggacgatcgcgatggacttctgggcgagtctggatcatcagatgaagtataagaaggatgtggaagatgcgagtgagatcagcgatgaactgaaagagtgtgcagaggtgatcgcacagacggatcttaaaatgctggcgctccgccggaaaatcgaagaccgtgagagcagggaaaatcccctcaagtttgataaagatctgccgtaggccgaaaagaacagccggcagcagatgcaaaaaagagaagagcgggcagacgacaaaagaaagctgaggaaaaagctgtttgtcgaatgcgtccttaatagagatagcagcacagggtttcggtgatccggaaccctgtttttttgtacagggaaagcgccgggagattgtcaccggagacctgaaggagaaccgggcgtttatgattagaagaaccggcgcaggatgaagctgggaccggggcgtcagaaacagtccgaccggtgtaaagatccgtcaggagattttcggtgtctgaaaacagtcctacaaggacagtctgtaaaaatgaggttccgtatccttttccacgctgcgatctttccacttcaaaaccgtagagatagtagtgggacgggaagacagaaaaatttacgatggcatgtccggatcgaaaacagagtgtcagggtcccgtcgatatccagagtttcgatctgaacatcggtgagaaagccggatggtgcagccgcagactccgcatggtcagttcgccggacagcagtagaaaaatcctccggcagcagctccatcatatgttcctcagagtcctgttccgctccgatcgcctcaaggacagcggcggtgttccggtctttctgatccacatagaagagcagttcggaatcctctggaagttcctggatcccctgatccagaagcgcagagaagagtccctgaccgcggaattccggatctgtaaaggcggagcactcaaacagaaggtcgtccaccggaacaaaagcgatggcggagacggtgtgcctatcgtattcagaaaaaagaaacagggatgcatcctcaaaagggaaagagagcgaggtgtgatcgtgagctgtgcatgtatttaccatggtttggatctggtctttccggaaagaatctaaagaagagacgcagtatgatttcatcataaacctcctgtaactgagtggaaaaatcggtgaaaaacattccctttcaggaacaaagtatgtggatccggcgggagttttatctgccggggataaaaatgcagaagtgaagtgcggaagagagaaaaaactcaaattccgcaccatagaatcactgccgccatcgtgttcagatgaagataagtatatacagaaaaatacttcaattcaaggaattttccgtgtttttttctattgccgccatgcaaaaggggtgataaaatggttcctagtctcaaaaatggttggaccattttatactgtctctccgcaagcctgcgaagatcgcagaaaacagagacagaatctgacaacaggaggaaaacaaaaatgaagtacgtgaaagaaattgtgatcattttcgggatcacgatggtgggggaactcttgaatatgttcattccgctgccggttcccgccggagtgtatggactgttcattcttctcggcggtttatgcacgaaagcgatctccctttccgatgtggaagtgacgggaaacctgcttctggatctgatgccggtcatgtttattccggccgctgtcgggatcatcgataagatcgaagagttaaaagtcattatgatcccgatgctcatcatcacctttgtgaccactttcatcgtcatgaccatcaccggcaagacggcagagtggatcatcaagagacagaaaaagagggagaaatagaaatgtcattgtactttggagtatttatcagtctgttcgcatacctgatcggtatgaagttaaagaaaaaattcggatggccagtgttaaacccgctgctcgtcgcgatcatccttgtgatcgcattcttaaaagcgaccgggatcagctataccgattacaacacaggtgcatcctatatcagttattttttgacaccgtcaacggtttgtcttgcaattccactgtataagcagttagaattattaaagaagaacctgacagcagtcgcagcagcgatcacagccggagtcatcggaagtgtcgtcagcgtctatgtgatgtccatgatcttccgtctggaacatgtccactatgtttccctgcttccgaagtccatcacgacagcgatcggaatgggagtatcggaggaagccggcgggatcgtgacgatgacgatcgtcagcatcatcctgacgggaatcctcggaaatatcgttgcagatggctggtttaagcttgtcggcatcaaggaaccgatcgcgaaaggactggcactcggaacttccgcgcatgcgatcggaaccgcaaaggcgctggagctcggtgaggtcgaaggtgcgatgagcagcctgtcgatcgcggtatcgggccttatgacggtcgttgcagtgccgatcatgtcaggattgctctaaaataaaaagtgcaaaaggagagaaaaccatggctgagagagtaaagaaacgttcagagatcagagaacaggatacctggaaactggaggacatgatcgcatcgccggagaaatttgaagagctcgcggacggagtggaagagcggatcccggggtatgagacataccggggaaaactcggaagttcggcagatctgcttaaaagttacctggaatttgatgaatcgatggatgagacgatctctctcctctatgcgtatgcgatgcagaaacgcgatcaggatacctctgtcagcgagaaccaggcactggtgtccagagtccagtctcttgcggtaaaagcaatggctgcttcgtccttcgcccagccggagatcctggagatcccggatgagacgatgaacggattcctggaaacggatgagttaaaggcgtataaactccagatcgaacgtctgctcgcgaaaaaaccgcatatgctttcagagaaggaggaagcaatcttagcgtctgcttccgagatcgcgcacactccgtcatcggtattctccttatttaataatgcagatctgaaatttgacccggttgaggacgagaacggggaactcgttgaggtgacccacgcgagatacgggaaactcatcgagagcaaaaagcggagtgtcagggaggcggctttccattccctctacaaaggataccgccagtttgcgaacacgatcgcggcaacctacgagggaaatgtcaagcagggaaatttctatgcgagaatgcgtcagtatccgtcggcaagagccatgtaccttgcggaaaacgagatcccggagcgtgtttacgataacctcctggaatcagtccatgacgcgctcccgctgctgcaccggtatatgggattccggaaaaaatgcctggaccttccggagctgcatatgtatgatctttacgtgccgctcacggatgagtatgagaaaacgtactcctacaaagaggcacaggaactgatcctgaaggcattaaaacctctcggagaggaatatttaaacctcttaaagaatggtttcgggaaccgctggatcgatgtctatgaaaatgaggggaagcggagcggagcctactcgaactgcgtttacggcgtgcatccgtacgtgctgatgagctttgacggaacgctggattccgtcctcaccctggcacatgagatgggacattcgatccactcctggtactccaatgccaaccagacctacacgtatgccggatataagatctttgtggcggaggttgcatcgacctgcaatgagatcctggtcttaaactatatgatcaatgagacgaatgacaggaaggagaagttttacctcatcaaccagcttgccgagcggttccgcacaacgctgttccgccaggcgatgttcgcggaatttgaggcagagacctaccggctttcctggagcgggactcctctcacaaaagatttgctctgcagtctttaccatgagctgaattcggagtattatggagaagagactgtgatcgatgaggatattgatcatgagtgggagcggatcccacacttctacatgcagttttatgtctaccagtacgcgacaggattttccgcggcgatggcgatcgcaaggcggatcctttctggggacgaaaagacaaaagaaggttatttccggttcttaaagggcggatgctcaaagacgccggtggagcttttaaagttagtcgggcttgacatggaaaagccggatgtcgtcaatgaggcgatgaaggtgtttgaaggactgatcaaagagttggaaggttccttttcatgaacggaaattttctgaactgaaaattccgtgtgatcagctgcggggcggatcttgtcagaccgtcttccggactgaattggtgaggagcggaccggagtggatggaaaaaaggaattgacagttttgccggatctggcgatcgatcatccggcatgaggggaagaggcgagcggttatgagtatttatgaggcgatttttaacagatgttcggttcgcgagtatgagatggagaaacttgcatcgggacgactggaggcgctggagcggtatctgaagaatatcgcgctcctcgatgaggagaaaacggtaaaatttgagatcatagacaattcagacggaaagcagaagatccatggtctctggaaggtcgaggcgccgtactatcttgccgtctactgcggggatgaccagctgtctgtgcggaatgccggatacgcggctgagcaggcagtcctttatctcacatcaaaggaactcggaacctgttatctcggggcgacgaaggccggagaggagaaaaaagacggcctgaaacgtttcctagtgatcgcgttcggacgggctgcgggacgcccgtcccgcgattcttccctggctcaccgcgcttcccttgcggcgctctgcgcgttcaaggacgaaccgggggagcaggtgaaggcgatcctgcgtgccgcgagactcgctccgtcctcattcaattcccagccatggcgctttgtcgtttattcggaccggatctatatctttgcgaaaaaaacactcccgttttccggaaaagaaaagcgcgcctttaaggaattcaacatcggcatcatgctctcccacatcatgctggccgccgaggagctctggatgaacatggagacccaggtggaagaccagttcgcgaagaaagattacaagaacggggaatacgtctgtacgatcgtgttccacagttgataaaagtataaaaacagagaacggcagctggcgtgggtaccaggtgcctaagatgcgcactcgcgcgaagatgaaggttgtcgcaggcgaccgcgctcggcgcgagaatgtgccgaggcacattccattttgtttagcagatgaattgaacatcataacgatgcagaaaaagacttctgtcacaacatttgaaaaaactttgcaaaatgcggaatttttttcagaacctgtatttttacttgaaacagaaaaactcttatgctaaaattgataagaataaggtgttttagaaacgtaactacatcggaggaggaaactatgatcagtcagctcatacagaagattcagaagacaaaggcaccgatctgcgtcggtcttgaccctatgttaggttatatcccgaaccatattgtccagagagcattcaaggacttcggcgagaccatggaaggcgctgccgaggctgtatggcagtttaataaagaaattatcgataacacttatgatttgattccctcagtgaaaccgcagattgcaatgtatgagcagtttggcattgagggtcttaaaatatatgcccgcacgatcgagtattgccagaacaagggactccttgtgatcggcgatgtcaagagaggcgatatcggatccacttcctccgcgtatgcagttggacatatcggaagcgtaaaagtcggaagcaacgtatgccgcggcttcaatacagacttcattaccgtaaatccgtacctcggaacagacggaatcaaaccgttcgtcaatgtctgcaacgatgaggacagaggacttttcgttctcgttaaaacctccaacccgtccagcggtgagttccaggaccgtcttgtagacggaagacctctctatgagttagtcgctgagaaggtcgttgagtggggcgaagcgagcatggacggcgattacagcaacgtcggtgcggttgtcggcgctacttatccggagatgagcaagatcttaagaaagctcatgccgaagacttatttcctggtaccgggttacggtgcacagggcggtactgcaaaagacttaatgcactgctttaacgaagatggactcggagctgtcgtaaactcctcccgtggtatcatcgcagcttataagcaggagaaatatgcgaaattcggtccggagcactttgcagaggcatccagacaggccgttatcgacatgatcgcagatatcaattctgtattataaatgaaaaaacgcaattgttcagaaaagtattgtaaccagaaaagctgtacaactgcggaatgatccacattgaaaaaataatcatcagccatggccattcgtccgtggctgatgtgttgtaataaggagggaaccatggcacagaaaaaagtaaacgctgtgatccacagccaggagaagctggcggaggggatctacagcatgtggcttgacgcaccggagatggcagaagcggctgttccgggacagtttatcgctgtttacacaaatgacccgtcaaaacttcttccgcgcccgatcagtatctgtgaggcggacaaggagaatggaagacttcggatcgtttaccgcatcgcgggagccggcacaaaggagttttccgaatgcaaggcaggcgataccctggatattatggggccgtttggaaatggattccctttaaagaagaaaaaggcattcctgatcggcggagggatcggaatcccgccgatgctggaactcgcgaagaacctggactgcgaaaagacagcagtcatcggttacagagatcaggagaccttccttgcggacgagcttcgcaaatatgctgatgttgtgatcgcaacggaggacggaagtgtcggaacaaagggaaatgtcatcgacgcgatccgcgcggagaagctcaccgcggatatcatctacgcatgcggaccgactccgatgttaaaggcactgaaagcttatgcgatggagaacgggattgagtgttacatttccctggaagagaagatggcgtgtgggatcggtgcctgtcttggctgcgtatgccacagcaaagacatcgatgagcacagcaacgtgagaaacaagaggatctgcaaggacggtccggtcttccgcgccgaagaggtagagctcctgactccggacgagcagcgcgagcgcatcgcctccggcatcatgatcaaaaaggaggaacaggcatgaatacaaaagtaacactggccggtgtggagttaaagaacccggtgatgacctgttccggtacctttggttccggtatggaatacggcgagatgatcgatcttgaccgtctcggagctgttgtgacaaagggaatcgcaaatgttccgtggccgggaaatccgactccgcgtgtgacggaagtttacggcggaatgttaaatgcgatcggtcttcagggaccgggtgttgatgttttcatgaagcgcgacgttccgtttttaagacagcatgatacaaagatcatcgtcaatgtctgcggaaagtccgagagcgactatgtggacgttgtggagcgccttgcggacgccgacgtggacatgctcgagatcaacatctcctgcccgaatgtaaaggaaggcgggatcgcgttcggtcaggatccgaaatgcgcggagcagatcacaaaggcagtcaaaaaggttgcaaagcagccggtgatcatgaaactttccccgaacgtgaccgacatcgcggagatggcgagagccgttgaggcaggcggagcggacgtggtatccttgatcaatacgatcacgggtatgaagatcgacatcaataagcggaccttcgcgttggcaaacaagaccggcggtatgtccggtccggcgatcaaaccggtcgctgtccgcatggtatatcaggttgcgaacgcagtaaagatcccggtaatcggaatgggcggcatcatgacagctgaggacgcgctggagttcatcctcgcgggcgcgacagccgtgtccgtcggaaccgcgaacttcatcaacccggatacaacgatccaggtgatcgagggaattgaggcatatatgaagaagtacggcgtggaggacatccacgagctgatcggcgccgtacactgaacataaggatcgcattcctgcacggcagggacgccatctgacaaaaagccggcagataacgatatcggaaatctgcgaaacagtatattatcttgaaaggaatggatgaaaaatggaaaagtacaagcaggaatttatcgaattcatggttgattgcggcgtattaaaatttggagacttcgtgacaaagagcggaagaaagaccccgttcttcgtaaacacaggattctatcgcacaggcgctcagcttcgcaagctcggcgagtactatgcgaaagcgatcaatgacacattcggaacagacttcgatgttctcttcggaccggcttacaagggaatcccgctgactgttgcgaccagcatggcgatcaacgagcacttcggcgcagacatcaaatactgctccaacagaaaagaagtaaaagatcacggcgacaagggaatccttctcggcagcccgatcgctgacggtgacaaggttgtgatcatcgaggatgtaacaacagcaggtacttccatcgaggagactcttccgatcatcaaggcacagggcgatgtcgatgttctcggtcttgttgtctctgttgaccgctgcgagagaggaaaaggcgagaaatccgcactcacagagatccaggagaaatacggtttccgcacaacagcgatcgtaaccatgaaggaagtcgttgagcacctttacaataaggagtacaagggaaaagtgatcatcgacgatacattaaaagcagcgatcgacgcatactatgagcagtatggtgtaaaataataaaggagcggttctatggaaaagatttataagaccatgagaaacacaggcgcagcgagcatcgcggtcggaattatcgttgcatctgtcggacttgctgccgggatcatcgcgatcgtgaacggcgcactgcttcttaagagaaaatcagatattactttctaaaaaattgatttcagggaaagatgatgcagcgggagatgcggctgaaatggcggcatctcctttcctgcttttctcccgtaaggtccggttctgcaagaaatgcgaaaagaatgcgggaaagcacccgcccgggaacgggagacaataaaaatggagaagtttgaagatgaaaaaacacagacatcggattcttggggcggtctttttcgtcctgtatctggttctgctgacatatttcctgtttttcgccgaagagatggggcgcagccccgatgcgagggccgaatattcctacaacctgaccctttttaaagagattcggcgttttattttatacagggacattcttggctggcgcgcggtatttttaaatattttcggcaacgtgctggcgtttatgccgtttggcttttttttgccggtcatctgggagcggacgagacactggtatatcaccgtgatcttaagctttgccatgagtctcaccgtggaaacgatgcagctcgtcggcaaggttggaagtttcgatgtggatgatctgctcttgaataccatcggcggttttgtcgggtatattatttttgcccttgcgaaaggcgtgtgggagagatacagtggaacgaatcggaaataaagtatcgtatataaaaaagccgctggcaaaaaacagttttgtggcggcgggacttgtgacggcggcgcttcttttttacgccgcggccatcggtttatcctatcacacccaggggaatgcgccgcttgcggcagcagctctgggtttttgcagtattatcactgcggtatcatcggtggtctacgggatcttcgcgatgatggagaaggagaaaaattacattctggcgaagatctgtctcgcggcggcggggatcctgctgctcgtgtgggcactgatgatcgtatttgcgctgtaatgaaatggaggcatgagacatggaacaagatctgatcagagagcgctatgacctttccatggcgcggatccgggattttctgacggaggagacagtaccggaagtttaccgggattattttaaaaaggtgacggagctcatcattcagtgcggcgaagtcctgaaggcaaaggaagacggaagtcttgacaagatgactctggaagaggggagagccttaaatcagaagctctatgcggacgttctcccgggagcctatgagacaagctacgcgaatccggcttatgctgtgcagacgctcggagaggagtatggaaagcttctttcttatctctatgcggagatccgtgcagacatcgtctatgcatttgaggggcgtgttctcgatctcgtgatcggaaacgaggcgctgatcgagatctacaacctgtttgagggcgaggcgcttccggcagcgaaggagatcaaggacgtcctctactggagtgcgagcgattactgtgatgtgacattgacctaccgcgtgcgggaaggcgtcgatccaacgcttgactttgcgaagaagatcatcatggagagtgagctctcggatctttcttacctataccgcttcggcgagtatatctccccggaggaggaaaagatagcggcgttcttaaacagcctgccggaggaagagatcaggaagatggcggatacctatacagacggatatatccgcggatttgaggtcatgggacgcgatctctcgaaaaagaaaacggcggcaatccgctatccggtcggaatggagcgcatggttcgccaggcggtgaagaatttcgaggtagcaggtctttccgtgatcttcccgcggggtgcggtcggcagcatcaaccggaatccggctgggcgcggcggctatacatcgtcttccccgaacagacagtatgactatgatcaccggtatgacagcgcggtctacatggacaaggcgttccgtgaccggaagatcggcgttttaaagacggcgtatgaacagtataaggaagacgcggctgtctatgcgggaccggcggtcatcgagacgttcggggagccgggatttgagccggtgaataagccggaggcatgggcatttacggagaaacagcagaatctctatctggagtaccggaatctttccatgccggtcgtgaacgagtatatccctggcgacgagacgagttttacgatcatcgcgttcccggtcccggcgatcggagagaagttcccggagatctttcaggagacgatccggatcaacacgctggattatgagctgtaccgggatatgcagcagaagatcatcgatgtacttgacaccgcaaagtatgtggaggtcatcggaaagggagagaaccggacgaacatgcaggtacagcttgctgctctttctgatccggagaagcagacgaagtttgagaactgcgtggcggatgtgaatattccgctcggcgaggtgtttacttcaccgaagcttgtagggacgaacggaatcttaaatgtgggaacggtctatatcggagatatccagtaccggaatcttctgatggagttcaaagacggacgtgtggtttcggcggtctgcgacaatttcgagaaggacgggacagtggactttgaggccggccatcgtctgatcgtgcaggggatcatgaatggtcatgaggtgcttccgctcggcgagtttgcgatcggaacgaacacgacggcgtatgcgatggcggagaagttcgggatcctggaccggctgccgatcctgatcgtcgaaaagatgggaccgcattttgcggtcggtgatacttgttacagctggtcggaggacagtccgatgtataatccggatgggaaagagatgatcgcgcgggacaatgaggtttcgatcttgcggaaggaagatgtctcgaaggcgtatttcggagtgcatacggatattacgatcccatataaggagctggagaggatttcggctgtgcgtgaggatgggacgaaggtggatctgatccttgatgggagatttgtgctggcggggctggatgagttgaacaggccgctgggggaggagtaagatcgctttttaagttgaaatgggtgcctttggaggtgcaggtgagctgcatgttcggggcgccttttttgtgatgtgattgggttggcgagggtacgcggtgagcttccgggctggagtacacagggatgcggggatgtggcaaaatctacgattcccacttgacgtgcatgggaaaaccttgtattatgattgataaggaattattgttattccaatactatatattagtgaaacttatcaatatttgttacactcataaggagaaaagacaatggcaaaagttggaattgtaatgggcagtgactctgatatgccggttatggcgcaggctgccgaggtactggaacagtttgggattgattttgagatgacgatcatttccgcacacagggagcctgatactttctttgagtatgcgaagagtgctgagagcaggggcatgaaggtgatcattgccggtgcaggtaaggcggctcatcttccgggaatgtgtgcagcaatcttcccgcttccggttatcggaatcccgatgaagacttctgaccttggcggggtggattccctctattcgatcgtacagatgccgtccgggatcccggttgcaacggtagcgatcaacggcggaaagaatgccggtattcttgctgcaaagatccttgcggcttcggatgcggatctccttgaaaagttaaaggcatattctgagaagatgaagacggaagtggagagcaaggcggagaagctcgacaagatcggatataaggagtatcttgcttccatgaagaagtgatcggatgataccaccatcccaaaccatgaataagcagccgttttgcgcaggaaaatgagcagagtatggctgttttaggaaattgcaggagcacgaagtgtggaacaatacggtatcagggggcaaaaaattttgcacacgatatcatctgatatagaaaaattaaggaaaggaaaagctatcatacatcttctggatgtctgcgatagccgggaatacatatggattacaagaaagccggagttgatattgaggctggttacaagtctgtggagctgatgaaagagcatgtgaagaagacgatgcgtgaggaagttttaggtggtcttggaggattttccggtgctttttctcttgcaaagatcaaggatatggaggagccggttcttctttccggtacggacggatgcggaacaaaggtaaagcttgcgatgatcatggacaagcacgacacgatcggtatcgatgcagttgcgatgtgtgtgaatgatatcgcatgtgcgggcggcgagccgttattcttcctggactatattgcatgcggcaagaactatccggagaagatcgcggatatcgtcaagggtgttgcagacggctgtctccagtccgaagctgctctgatcggcggtgagactgcggagcatccgggtctgatggctgaggatgagtatgatcttgccggttttgcggttggcgtctgcgataagaaggagatgatcacaggtgagaatctccagccaggtgatgtcctgatcggaatggcttccacgggtgttcattccaacggtttttctcttgtacgcaaggtttttgagaaagagatgacaaaagagggcttaaatacatattatgatgagcttggaaagactctcggcgagacgcttcttgctccgacaaggatctatgtaaaggctttaaagaacgtaaagaatgcaggtgttacgatcaaggcgtgcagccatatcacaggcggcggtttctatgagaatgttccgcgtatgttaaaggatggcgtccgcgcggtgatccacaaggacagctatctgatcccgccgatcttcccgatgatgcagcagaagggtgagatcgatgagaagatcatgtacaacacgttcaacatgggaatcggtatggtcgttgcagtcgctgaggaggatgtccgtgcggcgatggcagccatgaaggcagcgggagataccccgtatatcatcggttccatcgaggcaggagaaaagggagtgaccttatgttaagagtcggcgttctcgtttccggaggaggaacaaatcttcaggcgatcctcgatgcgatcgatgcgggtacgatccgcaatgcgaaggtggaggtcgtgatcagcaacaatgcgggtgcatttgccttagaacgcgcgaaaaagcacgggatcccggcagaatgcctgtccccgaaggagtttgcgtccagagaggaatttaatgaggcgcttgtcgcgaagatcgattcctaccatctggatctgatcgtgctggccggatacctggtaaagatcccggcggctatgatcgaaaaatacagaaataagatcatcaatatccatccgtccctgatcccgtccttctgcggtgtcggcttttacggattgaaggtccacgaggctgcgcttgcgagaggcgtgaagatcaccggtgcgacggtgcattttgtggatgagggaatggattccggtccgatcatcctgcagaaagcggttgaagtggaaaaaggcgatacgccggaggttcttcagcgccgtgtcatggagcaggcggagtggaagatccttccgaaggcgatcgacatgatcgcgaaccacgagatctgatcgtatctgtcctggctgatatgtatttttacatgttgccaggacagtcggcttatgtcatagggaagtttacaggaggaagaatagatgaaggttttaatcgttggaagcggcggaagagagcatgcgatcgcatggaaggtcgcccagagcaaaaaagtcgacaagatctactgtgcgccgggcaatgccggaatctccgaggtggcggagtgcgtgccgatcggagccatggaatttgataaattagttgcatttgcaaaagagaaagagatcgacctgaccgtgatcggaatggatgatccgctcgtcggtgggattgtggatgtcttcgagaaagagggactccgcatattcggaccgagaaagaatgcggcgatccttgagggctcaaaggcattctccaaggacctcatgaagaaatatcatatcccgacagccgcttatgagacattcacagacccggagaaggcgctggagtatcttgagacggcgaagatgccgatcgttttaaaggcggacggtcttgcgcttggaaagggcgtgctgatctgccagacattggaagaggcaaaagagggcgtgaagacgctcatgatggataagaaattcggctctgcaggggatgagatcgtcatcgaggagtttatgaccggccgtgaggtttccgttctgtcctttgtggacggaaatatcgtgaagatcatgagttccgcccaggaccacaagcgtgcaaaggacggcgaccagggcttaaatacaggcggtatgggaaacttctccccgagcccgttctacacgaaggaagtcgatgaattctgcaagaagtacatctaccagccgaccgttgatgcgatgaaggcagagggaagaccgttcaagggcgtgatcttcttcggactgatgctgacaccggagggaccgaaggtcttggagtataacgcgagattcggcgatccggaggcgcaggttgttcttccgagactggagaacgatatcgtggatgtctttgaggcgtgcatcgacggaacgctcgacaaggtagacttaaagttcgacaatgatcgtgcgacggtctgcgttatccttgcatccgacggctacccggtcgagtacaaaaagggatttccgatcgaaggacttgagaagttcaagggaaaagacgactattatgtcttccactccggaacaaaattcaacgacaaaggccagatcgtcacaaacggcggccgtgtcctcggcgtgaccgcaaccggaaaagacttgaaggaagccagaaagaaagcctatgaggcgacggagtgggtttcctttgagaataagtatatgagacatgatattggacgggcgatcgacgaggcgtaagggatccggaaaattttctggatctgcaggatcagaagaaaaatgacagattgatattgagaaaaccggcgatgaataaatcttcgccggtttttctggttgatccagatttaaggtactgcggtcactgccatatcaataaaacaattgacaggatgaaatttttgtttcatgatgttagaatattgatgtgatgaccgatgtgctcacattggcgcattgtaactgttcagtaggtctgcgcacttacgacgcattttatattcaggagtgtatccatgaaatcaatatccatctacgcactgacaagaaaacagaatatcgcctgtctttccaggttggagcatcagctgtcgggcagggaaaaacctttaaagatccggacatgggaactgaacagtatgcgggcattcgtggatcacctggaagaacatatgccggaggtgtaccggctccgcttcttttattctttccagatcccgcgtctcggaaaagagtttgacctgctccaggtgaaggaaaaacagatcgtgaacatcgagctgaagagcggcgctgtctccggggacgcgatccgcaggcagctgatccagaaccgttattacttatcggtgctggggagaccgatccggtcctatacctatatcagcagtgaggaccgtctggtccgtctgacgaatcatgataaccttgtggatgcggactgggaccggctatgtgaggagttgaaggatccgggtgaggatgagccgggagatctcgaagactgcttccgggcagaatggtatctgatctccccgctgacacagccggagcggtttttacagaaggaatatttcctgacggcccagcagaaggatattgagcggcagatcttaaagaaaatccgcgcggagcgaagcggatattactcattttccggacttcctgggacgggaaagacgctgcttctctacgatatcgcgatgaaactttccgggcgtcagaaggtctgcatgatccactgcgggacatcgggagaggagtggaagaagcttcatgagagactcaggcgaattctctggatgtcggatcgggagatcacggaggagaccggttttgaggattatggtgctgtttttgttgatgaggcgcatctgctgagtgaggagcccctaaagcggatcatacgggcagcaggaacacgtccggttatcttttccagtgactgcgaggaccagctctccccggaagaggcggaccggagtgcgaagaatgagctggaaaaacttccggggatccagcttttccgactgacaaacaggatccggacaaatgtggagctttcctcgtttatccagaatctgatgcaccttccggaccggaagaccacccggcatttcccgaatgtcacagtgctgtatgcaaatgatgagcgggaagcggaaaatctgatgttggatgcaggggaacacgggtttcagatcctttcgcgacaggaagacaacgggaagacgatggaccggttggcggtgctgttggatgagaagtattattacgatgaaaacaggtatctgcgatcgcaggatcatacggtgcgcacactgttttacaggctaaacggtgcgaaggagaagctgatgatcgtagtgaaagaaaatgctccggtttatgagagagtattggagttgttgtgaagaaatccaggctttttatcagcttgccacgaaagtcattcgatgataaaatcaatacaggttgatcgagcagttcagcgatcagaaacaatgatatttgaacttaagtgggataaaagtgcagaaactgcgattcaacagatcaaagacagaaggtatgcggactctgttctgaattatacaggcaacattctgcttgtaggaattaattatgatgcaaagacaaagaaacatgagtgcatgatcgaaaaaattcttgacaaatccgtatgacattgctattattgctttaaaccgttgaagaggaagttgtaccagaaaaaacagtctcccagagagtccggggcggtgggatccggacagagtgttgtggtaagtgggcctcagagggcaaggtgaaaaagaggaacggatcaagaggaatctttagtagccgagacgcagggtcagcgttacgagaccaggaatgtaactgcattctgtaaagagtgggtgctttgcaccaaacaaggtggtaccgcaggtatatgacagcctgtccttgaacgaagttcagggatgggcttttttgataaaaagatttcccgatcttctgaacttgaaatgtcagtcctttatgaaagccggaaactggagcggtgagaagatgcatcatgacatgcagaaacgcatagtctcccgggaggctttcgtatatgacaaaagttatgttacagaagaaaggaaggcaatcgtatgagcgaggagagaaaacttcagtttcgcggcgggatcggaatgtccctgatcccggtagtaatttatgtattcttctgcatggtgctgttcatcggctttaaggcattcaacatggaagcacttgcagtcggaggctttttatcccttttgatcggcggcgtgttctgcacgagctacagtgagttctgggagagtgcgatccggggaatttcctcgatcacgtcggtatcggtcgttgtgatcctgctgctcgtcggcatgttcagcgccctgatcaagctgtgcggtctttccggcggatttgtatggatcgccaacgcggtcggcatgaaaggcgggatcttcgttgcatttacattccttgccacatgtattgtatcgacagcgaccggttcctcgatcggaaccatgtttatcgcgttcccgatcttttacccggcggggatcatgctgggtgccaacgagatgatgatggccggcagcatcgtatccggcgcgatctttggagataacctggcgccgatctccgacacgacgatcgcttcggcttccacgcagcagtttaagaacggaaaaccggccgatatcggtggtgtcgtgtcaagccgtatcaagtattcgctggtggcaggactgattacgatcgtgatcttcgcgattttcggcggcgttggcggtacttatgagggaggttccatcgatgcggcgtccaacccggtttcgttagtcatgctgatcccggttgtcctgatgctgacggtttcgacaaaaacaagaaatatctatgaaggcatcctcgttggtcttgcagcaggaacgcttgtcggccttgcagcgggattatttactccggcgcaggtattttccaacgacgcggcaaacaacgccgcagtcggcttcctggttgacgggatcaacaatattttaccaacctgtgcgcttgtcatctccgtattcggcatcatgggagttttaagcgacgcaggcatgctgaacctgatcgccgagaagatcctcgacagtaagatggctggtacagcgaaaggtgcggagctcgtctgcatgatggggatcgcatttacaacgatcttacttggcggtgtgacgagtgcctccatcctgacattcggaccgatcttaaacaagatcggagcggcgagaaacattcacccgtaccgcagagcgaaccttttagacggaacggcaaacagtcttccggcgatcatcccgttcatgagcgtgttcgtattcatcggatccgcattgacaggtctttccccggtcatcgttgcgggcggaacgatctacggatttgtcctgttctttgtattccttggagctgtccttacgggatggggatgccagaaagaagaataggggagtggtttcccggatctggatcatgaaagctcatgaagtgtcaggatggcacagacattggaacgagtacacgagagaaaagaggttatggaaaaatggatgatacctttacattatacgatctcaaggtggaagtagtcgccggtgaccgcccgatggtgtgcagccacaaggtgggggactatttcctggtacagggagaaaacctggtgtttccgaaggaaacatcgttttccatgtattccctgagcgccatcctgccgcttcttccggcaaaagaacggccattggacccgaacgactggatgctctccgacgcggagatcgcctgcccggatccgaactgcggggcgagatttaagatcacaagagtcggaaagcggatccagagtcatgggcagtgcacggtcgtgccgctcatgagaccggatgcgggaaaatatcatgagaattagataataaggagaatcgatcatgcagaaaaaagctcagtttaaaaatggatataccttcaaccgcgtcatcaatggctgctggcagctctccgcggagcattgtcttcagggacacctggactatgacgatgcgatccgcgcgttccacgagctggtggagcagggatttacgacgtttgactgtgccgacatctacacgggcgctgaggaggtcctcggccgctttgtgacagagttaaaggcgagcggacattatcaggaggaagacatccagatccacacgaaatttgtgccggacaaggacgttcttccggtgatcaacatggagtacacggaaggaatcgtggaccgctccttaaagagaatgcaccgcgaagctctggatctggtacagttccactggtgggatttcaatgtgccgggcatgatggagacggcctttgaccttgtaaagcttcaggaaaaaggaaagatccgcaacattggtatgtgcaacatggatacaaacgccttaaagcagatggttgacgccggtatcccggtcgtatccaaccaggcgcagtattccgtctttgaccgccgtccggagagaacacttttggattacagcgcagagcacggcatctacacattcgcttacggcacactggccggtggatttctcgcggagcgctacatgggaaagacatatgaggcgccggagacccgttcccaggtgaaatacatgcagatcatcgaggattctctcggctgggacggaatgcagaagctccttccggtcctgaaagcgatcgcagacaaccacagcgtcagcatcgccaacgtggcaacccagtacatcttaaaccagaagagcgtcggagccgtcatggtcggaaccagaaactccaaacatgtaagatccaacatccagacactggaatttgatctgaccgcggaggagatgaagacgatccgcgacttcatcgatcagtacccgactccggagggagaatgctatgagcttgagcgcacctctccgagatataaggggatcattctgacggacagaaaccatgtggataagtaaaatgacatgcagggatcatggcaggagatttccagaaaagcaggatcaacgatgaaagagaatcagactgcaagaacggttcggacagttttgtgagaatatcagaaagtacggaagggacaccagagatggtgtcctgtttcgttacaggacgcagaaaaactgctgcttttcatgggaaggaatctttctctttacacataccgaattagtaggtataatggtaaaggtttcaggggcaaaatcccgtcgaatggttgttttaacagggagattgccggtgacattgcaggaaagacaggattggagatagagatgttaaatcagttctcaagaacacagctccttttgggagcagacaatatggaccgccttgcgaaggcgaaggttgcgatcttcggaatcggcggagtcggcggatatgtagcggaggcactggcgagaagcggagtcggttcctttgtgctggtggacgatgataaggtctgcctgacaaatatcaaccgccagatcatcgcgacgagaaagacagttggacagtataaggcggaagtcatgcgcgaccggatcctggatatcaatccggatgcccaggtcgaggtcagaaagtgcttttatctcccggaaaatgcggatgagttcgactttacggaatattcctatgtggtcgatgcggtggacacggtgacggcaaagatcgagatcatcatgcgggcgatcgactgtaaagttccggtcatcagcagcatgggcgccggaaacaagctggatccgacgcagttccatgtggcggatatctataagacgagcatgtgcccgctcgcgaaggtcatgcgccgcgaattaaagaagcgcggagtgaagaagttaaaagtcgtttactccacggagcagccggttgagcagcaggaagacatgagcatcagctgcagaaagaactgtatctgtccgccgggcgcgaaacataaatgcaccgagcgccgtgcgattccgggcagcatcgcgttcgttccgtcggttgccggactgatccttgcaggggagatcgtgaaagacctgacagtgatgccgccgaagaaggtggaagagcaggggcagtgatcaatgccgggagcgaataaaagattataaaaagacatcacaaaaccggaaattggagtggattccattcgaacaaggctttgtgatgtctttttactttcagggatacagaaagagctgccaatggcagccccctctgatttcagttttataatctttccaggatcgcatccacatactcttcggtacttgctgttccgtgcaggtcttttgtgaggtgttttccttctgcgagaacttcatcgacggctttgcggatccgcgctgcagtctcattttccccgaggtactctaacatcatgcaggcggaccagaggaatgcagtcgggtttgcaaggtgctttccggcgatatccggcgcgctgccgtgtacagcttcaaacatggcgtaatcggcaccgatattgctggatggaacgagtccgagaccgccgatcagaccgctgcagaggtcggagaggatgtctccgtacaggttctgcatgaccatcacgtcaaactggttcgggttcatcacgagctgcatgcaggtgttgtcgatgatcttgtcatcgctctcgatctccggatattctttcgcgatctccttgaaaatggataagaacatgccgtcggacatctttaagatgtttgccttgtggacgcaggtcacttttctgcggccgtttttctttgcatactcgaatgcgtcacggatgatgcgctcactcgcttttcttgtaacgatcttgatcgcatggacggtgtccggatcgatctgctcttcgacgccgacgtagaggccttccgtattttcacggaaaatgacgatatccacatttttgaacggtgtttttacggcatcgttggatcttaccgggcggatgtttgcgtaaagatcatattttccgcggagtgtcacgttcagggagcggaatccctttccgaccggggtcgtgatcggggattttaacagcacttttgtccgctcaaaagatgcgtaggcttcctccgggatcagtgcgccgttgcgtttccattcgtcctctccgacgttgtagatttcatattcgagaggtgcgttcgctgcctttaagatctttaacacattgtcaacaagttccggaccgattccgtcaccgcggaatactgtaattttgtaactcatatgatgattctcctttttgaatgattcgatttgatcctacagtacaaatgtcacgatcaggttatagactgcacagcagatcacactgatcggaacggcaacaaagagaagccggttaaacagatggttgcggtcttcctcgtttccacaggaaccgaggatcagacttccgccggatgagaacgggctgatcgcgctgctctgtgcgccgaggatcgtgcaggcaaagagagcggacgggttcagtccggttgtagcggcgagtcccgggatcagcgggaataatgccggtgcaacaacgccggtcgtggagctgaagaagctcataaacgcaccgacgaagctgaatgccagcgggatcagggcagccggtacattggatccgatccatgcggacagggcatcgatcgtgcctgcttttacagcgaccgcgatcagcatgccggctccggcgatcatgaggatcgtattccacggaacacgggcgatgacctctttctgaggtgccagatcaaataacagggcaatgatggtaaagcagaaagcaacgagaccgacatcaacttttcctgcgatcgttccgatcagggtattgtccggaagcgcgagctttaagagtgggaagatcaggacgatcaccatcatcagcagcatcaagtataaagtcagcttctgcttcctgtcaaacggttccggcctggagaaagtaactccttttccgatgccgcggttgctcttaaaaccgaagcggaagatcgcgatcaggatcagggagaagatgatggcgaatccaaaaatcttcatttcgtccacaaacgaattcggtgttccaaaagccggttctgactcgtaagcagtatcgatcagaccgcggaatacgacaccgagagaggctgtcggaaagtttccgcctgcaagcgcaccgcagttgatcgcgacagcgccggtcagcttgtccatttttgcttcttcgcagatcaggatcgtgatcggagccagaaatgcgagaacagtaaagtaggcagctcccattaccgagagaacaactgctacaaagaagagggcaaacggcagcatacccgggaaacggcggcacatgtagagaagacttgcagacatcttctcaagcgttccgttgacagccgcaaagttgtaaaaaagggagacggacaggatcacaaacatcgtgctgaccggccagaaactaatcagctcttttgtcttgatccccataccgaaacatccgatcaggtaagcgaacgcgatacagaagaatccggtattgatctttgtcttgtagccaagaacgacggcaactgcgatggatgcgaccagaatgatacttaacatgcggattcctcctgttcgttgatgccgagcagggatgctgggatcgtgtgagtcatatggtaaacatgttcttccggaattccgtgatcgaccagatactgcatgtattccgcaagtgcgagttcccagtgcggattttccgtctgtccgccgtcggtgtcgaccatgacatttcggtagccgacttctttgatgatctccagattgtctgcgagattgctcttatattttccgccgcccatgttctgtgcgtaacagcgctccaggatgacgttgtaatccttcacgaggcggagctggtcttcgtggctcattcccacgatccaccactccggatgggtgatcacgatattttcgactccgaggtcgcgggctgcctcgacgacggtaaagatctcatcaggtgcgatatgggcagttccaaggactgcattgtgatcgcggacaagttccagtacagagcgcagttccggaacgatctttccgtcttttacgacttccacgcactggctcagatcctggcccattttctgcatgtgattttttgcggactgtgtcgggagccagacaacttttgctccaagacgaagtgcggtatcgacggctttcggattgatcccgcctacaacgcggtttaatgtgatgcttccgtacatggtgaagttgtttgtgtttccatgtacgatctcgttgtgacggttgcagagatatgcgcggtccatggttgtcccctgatgtgtcttgatgacgatggcacgcgcgccgacgcggatcgctgcttccatgagttcgaagtcatcgtatgcgcgaaggcgcagatccggattcgtatggacatgcatgtcgatcacgcctttcatgagatcctgtttcattcaaattccctcctgtgtgtttttgctgtcttcagagacattgattttgctatggttatattttatactagtcttgatatagaagaaagtcacgatttacgataccaggtatcggtaattccgatatctgacggaggtgttttatggacttaaaagagctggattacattgtaaccgttgccgatgaggggagcatttcccgggcggcggaaaaattgtttatggcgcagtcaagtctcagtcaggctgtccgtctgatcgaacaggatctcggtacatctgtttttgtccgcactgccagaggagtccgcccgacggctgctggagaggcgtttatttctcatgccagacagatcctgcagcagtaccgggaagcgcgcagtgaggcttctgatatcgaaaacttaaaaggcgggacgatcatctttgggatcagcacctaccggggaacgtatctgctgccgccggtcctgaaaaaatttcacgagcgttatccaaaagtgcatgtggagatcagcgagatggacagtattgatctggaaaaccagatcctggagggaatcctggatctcgcactgatcgcagcacctccggtccggatcaagcatggattcgaggaactgatgagggatgagatcatgctcgtcactacgaaagagcatcctgtcatgaaatatgcacacgaatgcgagaatgatccggaagaactgtggatcgatctgaaggataccgccccgtatgaatatattttaggtccgccgaacacggtacttggccggacggcacgcgattctctgcggaaagcaggtgtggaacctctcggactcgatacatacctttctgcggcgtttgcggcagctgttgcgcgggaaggtgttgcgctggcctttacctaccggtcctgccgggtcatgcgggatggattccggtatctgcggatcggaaaagaggggattttcctggaccttgcactggtctggccggcaggaaaataccggtccagggcggcgaaagcgctcgcggatttgctccatgagatggcaccggaactgcttcaccgataggatttgacagagacacacttgtatgtgtataatagaaatcaatgcatgacaatttaacagactggcgcgtcgtggtggtgaagctttttgtcggtgccggtctggaacgacggctgtaagagggaaaatgacataacagccggaaagatcgatctgaaaaggagaaaagaaaattatggtgttagcagtcatcgaagcggtgtaccgcttcctgtggggagatctgttcacgatcccgatcggcaacggaaatgggatcggaatccctcttctcgtgttgcttttgatcccaacggggatctattttacgatccggacgaaattccttcctgtccggctgtttccggatatgatccgggcgctgggcggaaaaaagaaggaagaaggcggtctgtcaccggtgcagaccttgtttgtgtcgacagcgacccgtgtgggaatggggaatctcgtcggagttgtcgctgcgatctctgcgggcggcgcgggagccgtgttctggatgtggatctcggcgatctttggttcctccacggcatttgtggaggcagccctggcgcatctatacaaagaaaaagatccgctctacggcggatatcacggcggtccggcttattatatccacagctatgcggagcgcgtgagaaaaaagaaattgaaacactccgtcgttgctgttttgtttgcgctgtccggtctgatctgctggggtgggatcagccaggtcatcagcaattcggtggcatcggcatttaaaaatgcatttggaatctcaccaatgatcacgacggtcattcttgttgtgctttcagcggtgatcgttttaagaaagaatgcaacggtccgtgcgctggacgtgatcgttccgatcatggcgggatgttattttgtgatcaccctgttcatcatcgcgacgcatctcggaagtgttccgggcgttttcaagaggatttttgaggaggcattcggactccgccagatcgcagcgggcggttttggcgcggttctcatgaacggagtcaagcgcggtctgttctccaacgaggccggttccggttccgcaccgtgtgcagcggcagcggcggaggagagtgacccggtaaaggtcggacttgtccaggcactaggcgtatttatcgatacgatcgtgatctgcagctgcacggcgatgatcatgctgcttgtcccggaggaactgacgatgggactcgcaggaatggaccttctccagaaagtcatgagctactatatgggggagttcggagtggtctttatcgccatcacgctggcattgttcagtttctcgacattcctcgggatcctgttctatgcgcgttccaacgtggcatacctcttcggaaaccgctggtgctatcagactctttataagatcttcgccctgatcatgctgtttgtcggcggtcttcaggcctacacagtcgtctgggacctcggcgatgtcggcgtcggactgatgaccgtgttcaacctcatggtgctgttcccgctgtccggggaggcgctgcgggcgttgagggagtatgaagagaagaaaaagatgaagtgaaatgctggaaaagaatagaaaagcggcagaaatctgaaaaactgtgagcggaggaacgggacagttccatgatcgcataaaaagatccgtcaggataccggggagaagaaactttcggtattctggcggatcttttttgtttgatcatcatcccggaaacaccgcctcgatcgtcagcgacttcccatcctccgtggacgcctggatctttccgcggtgcgtgttcacgatggcttttgcgatcgcgaggccgatcccgtagccgccggtcgcggaattcctcgatcggtcggagcggtagaaacggtcaaaaaggtgcgggagctcagcaggatcgacctcagatgccgtgttgaaactgcgagaaccgacatgctggagctgatgaagaaatttccggacgatcaaaggtccggattccacgcggtccagtacatcggttccaggatcaaatcgccggagagcatgatggagaaattaaagaggaaagcactgccggagacgctggaggcggcactctgtgaagtccatgacgcggtgggggtccgggtcatctgcgcctttgcggatgatgtgttccgggtggaaaaatggctgaaaagtcaggaaaactatgaactggtcaaagaaaaggactacatttcatatccgaagccaaacgggtatcgcgggatccatctgatccttcggggaatgaccggaaaaacggcgggaacctatgtggaaatccagcttcgcacgatcgccatggatttctgggcgagcctggagcaccagctgaaatataaaaaaggagatcggacatgcggcgatgatgagtggggaattaaagcagtgcgcggatgatatcgcgtccgtagatctttcgatgcagacgatccgcgatatcatcgaggcggaagagtgagaagctctcagccgcggatccgcgcatggatcccggaagtgagattcgggtgtttcagaccgcagatccgctgtttcgggctgccgccgatgaagacgcgtttccagacattctggtccagttcatcgtcatggacatacacttcgatatcggtcatcggcgggagcggagttccgccaagagtgaagctgccggatggatcctggatcaggatcccctctttcacgacgtctttctgcatataagaagcggcaaactgagcggaggagagatgtgtgatgagttccagcatcaggtcgatcttcagactttcctcggcggacatttcctgtttattcagagcgcttgtgagtacggattcatatttttcgagaaaatttccgcatgcggattccagcgtggagagatcctgcttcagttcgtttgtgatttccataaagacatcctcctttaaatatatttgggaattgagaaacctgctccggaaacggcagcaggattatttttcatgatgataatccaataatttccacaaatgacattcactgaatgtcatcggtgtttcaataataacatatattgtttggagtgacaatcagtgaatgccaaacaaggagtgttattatatgtataaaaataaaacaatatccggcaggaacaatatctgcgggatcaaaattcatgagcttcgctgtgcgatgacgaatgtatcgcagaagcatctggcggacatgctccagctcaagggactggatcttgataagaatgcgatccagaggatcgagagcgggaagcggtttgtgaccgatattgagctgcgttatttcgcaaaggtcttaaacgtcagttatgaggcacttctggattcggatgttcctgagaatgagtaaaagcttttgtgtagtaattccccataaacagatctgaccgtgctttcgaccgtctttttgaggaaaaatcgtctttttcctggaagagaagaccgatatggtacggaaaaccgccgtcaaagatgcggtggtaggcgggacttccgtcctcacggatcaggagtgtttccagcggaacctgaaataattcaccgagtaccagcatattcgggagggaaggaaaggattccccccggagccatttatagatcgactggggactgtccagttccagcgcgtcctggagatcccgcacggtcatttttcttcttcgcatttcatcccggatcttttttccggtcagttttttcgacagatttttcatactttcaatcttatcctccatatttccaatcagaacagatcaatatcaactgtcggacataaaaaacgctgccggcagccggatgggaaagtattcaatatattttcaagggaaacggacggcggatccttgccggccggtgtgaagatctgaagcctttgttctgcaggcaggtctatcatactataaaattccggatttgtcttgaactaaaaggttaaaatgagaaattttatgaaaaaatatcagggaagtggatccggggagatgtacagcttacagcgggaaagacagaaaatgcacatttttcagatgtagtgggaaataaagacaaaaaagatggaaaacaggaatccggcaggactgtcttatccccggacaggaaccgggaaaatggtctgcagggaatctgttttccacctctgaaaaatataaatgatgttattttaattttcctggcgtgcctttaacggaaggatttctttccgatacacatagccgaggcagactgcactgaaaatgatcgcgaaaacttcggcgatcgggaatgcgaaccatacgacgtgaagtcctccgagtttcgcaaaaacaaatgcgaccgggagaagaacgaccagctgacggaacacggagatccataagctcaacatgccgtgaccaagcgcctgaaacatggaagagcagacgatggagaatccggcgaacaggaagctcagggagatggtccggagtgccgggatgccgatggagagcatggtgtcggaggcgctgaaaatcattaggagcttatccggtatgagctgaacgaccgctaaaccgatcagcatgatcgttacggcatacatggcagcgagcttcagggttcccatgatgcggtctggttttccggcgccgtagttgtaggcgatgattgggaccgttccgttgttcagaccgaagaccggcatgaacacgaagctctggagcttaaagtagatgccgaacaccgcagtcgccgtggaggagaatgcgatgaggattttgttcattccgaaggtcatgatgcttccgatggacgccatgatgatggacgggataccgactgcataaatatggctgatgatctcgccgtttggcttaaagtcacggagagagatcgtgatctcatggtttctcgtcttgttaaggaagaaaccgagacaaaaggcgatgatctgcccgatcacggtagcgccggccgcacccgcgatgccgagagcaggcgctccgaaataaccgaagatcaggatcggatccagaacgatgttgatgatcgcgccgagaccctgggtgtacatggagtagatcgtttttccggtggactgtaagagacgctcacaggtgatctccatgaaaagtccgaaggaagcgatcgtgcagactcttaaataagtagttccgagatccacgatctcctcgatatcggtctggagacggaagaactgtcttgcaaagcagaggccgaagagtgcaaatacgacatagctcaatgcagcaaggaacagagcgtgatccgcgatcttgttggcgcgttcaaagttcttttccccgaggtttctcgagagggcggcgttgacaccgacgccggttccggtcgcaacggcgatcatcaggttctgggccgggaacgccagggatacggcggtcagggcattttcactgagctgtgcgacgaacatactgtcgacaatgttataaagtgcctggacgagcatcgagatcatcatcggcacggacatggagatcagaagccggtttagcggcatgactcccatcttgttttctgttgccatagaacatgactcctttcatacatacatccctgcctgttttcagaaaagaaaaaatgtaggtaacgattcagcaggtctgcgcagttgctgcgctgaccgtaagaaagccttgacttgagggaaaaaatcccatcggcgcagccgatctggaatggatttttgctcatagcttgccatgcatccgaagggaagctccgggggaggttcatgtaggtgtgaaggtactgaacagttacaaatgtggaaagactgccgaaagtttgtactttggcagtcaggattcctgaaaaaggcatactgtctggcattatacgacaaataaaaatgttcgtcaacatagatctcataggttgccgtgccgggggaagagttttgctgatcttagcggattttgccggattgacaaaagggcgggggcggcgtatcataaaaatgatgcggtaatttttgcggacagagtgtgcccgtgtactgcagcatgaaaatttcatggtttccgtctgagaaaaacgaggaaagctgtgtacagagcagagagcggaaacttatattaatgaataggagagaaagaatgatccaggaaatcgccccacataaatttgatctgacttacggacagccgaaggcgcaggatgaggactttgtcctctttatcaagaagagcaagacacttttgagaaaaacagctgaggagaatcatgagattccgaagttttctgatttcccggaagacaaagaagcgctgaaagagaacgcgtactatctgttcgcgatcgatggaaatcattattactatgtgacagagatgccggaacatgtctccgatgcatacgagctctgcccgacagcggcatatcggaagatgcatccgatgtaccaggcgttcgcagggatcactgctacccagatccaccgctttaaggagagcagaaagtactgcggatgctgcggccacctgatggagaacagcaagaccgagcgcgcgctggtatgcccggagtgcggacagactgagtatccgaagatttccccggccgtgatcgttgcgatctccgatggggaccgtcttttgatgtccagataccgtgtgaacaacaatccgtaccgcggatatgctctgatcgccggttttgtagagatcggagagagttttgaggagacgatccaccgcgaggtcatggaggaagttggcctgaaggtcaaaaatatccgctattataagagtcagccgtgggcattctccgacacggagatgatcggattcttcgcggagctcgatggaccggacaagatcaagcttcaggaggacgagctctccgaggctggctggtaccaccgcgatgagatcccggatgagacgatgatgaacagcatcggaagtgagcttaagatgatgtttaagtacggaagtctcgagaagttctatgaggcgaccgggtatcacgacgagaattagggatatgggaatatcggatcgagagtgatcctgatgggaatcctgcagaaagaatcgatggcaggttgtaaattgaaaaaagccggagactgaatttcagattaatatgagaaattcagtttccggctttttgtaacagaaattttctgctaaaaagacagatggatcagactttgcggaatgtccggcagaattccagaaattctcgcagggtatcaggaacatcctgtggatgataacagaatccgatcacgcgtttcgggatcgggatatcaagcgggatctcgataagcgtaccgtttttcagatcatcttcgatgaagtctttgatgacgcagccgatcccgagtccgatccgggagaactcgatgaggagttccatgtcagtcgtctcgagaatctggttgatctcgatctgattgtcggacaggtaggcatcgacgtgtttccggctcatgttggagcggtttaagagcatgatatttccggtcttaaagatatccgggtcgtttccttctcttaaatgaagattctccaggtaggcaggcgtacagacgaagatatcgctgatttccatcaggggctggaagtggagtccttttctgttttttggctcagcgacaaggccgatatcgatctttctggcatcgagcatgtcgagtgtctggtaggtggactggctctcgatggcgatgtttacatgtggatattttccgataaatccttttaagtaggggagaaggacatatttacacagggtgttgctgactccgatctttaagtttccgatatggaagtcatggatccgtttgagttcgcgttcgccgtgaccgatggagtcgaaggctgtgttcacatgctggaagaggatggttccttctcttgtgagctggactccgcgggagtttcggttgaagagtctggttccgaggctttcttcaagtttgctgatggctttgctgatggcgggctggctgatgtagagttctttggcagcccgggagatgttgccgcagcgggctacctcgtagaagattttgtattgtgacagatgttgttccatgaaaataccgctgtcctgtcagggaccgcaggaacataaccccctttcatatgtagtattcgtattatttatagctattataatgaatgggggtggggatgtcaatatgaaattgatggcgaaaggtacgcgccggtcggcctccggctccgggcactcgggattttaggggcggttcctctagacttgcggaagaatgctaagggcggagaagatgggacacaactcgctgcgctcaaacaagtgtcccatctcctccaacgcattctcccgcgagccaagaggaagccaagcccctgaaatcaggcacccggatccggaggccggccggcgctgaaattggctgtgctgtgtggggatcgcaggcgctgcgctgtgcgatcctggatagtggtgatgtcagatgcggtatgttttgaagatttctgatatctggtactggactgtgtgcaatcctggcttaggcgatcgcacagaggcccagttcttttttgagaatttcatcgacggagtcgaggattccgaggtgtgtctcgagatcgagacggtccacggtcatttcattttttcgggtgcagccgtcgacgctgcctgcggctacggcgagacggagagattcggtctcttcggcgcgggtcgggagcaggcttttttcggcgaggagggagcagagggcggcgatgccgatgccccaccagttggagacgccgcttgcgagtgtgagatcggcggcttcggcggtgcagatcttatctccgaacgggacaaatgtttcgatcacattccggtaggttcccattcccatttcgtttccgccgtcaccgacggagatcgtgactgctccggcttttttagcctcagagaggaagagggcagagtcggtgatcatgtcgtcgagaacttcgccgcgcatgctgtgatagtggccattggcggcttttccggggcgttctaaggagatgaagtgggtcggggagaagtttttgatgcagcttcggatgaagtcttcggtgtctgtttttggcagcatcatgagttttgctttgggtgcgcggtagcagacgacgtcgctcacgatggagaaggcgggttcgtcggtgatcacgaggacggagacgccgagtgctgtcagggcggcggcgatatcggcgatgccgagaggtccatctgtctcacctacataggttccgtcttcaaggcggaccgggaaaccggtgagaaggatcacgcggcgggcagtggagagtgtttcaagtgtttcgcggatcgggttgtccggcagtgcttttaagagtccgcggtttccgaagtcctgtttcataatggtatccagatctttaaagaatgtcatgttcatatcctccaatagtgatcgggctgcagggaagcggagatgggatcgcctgggacggtccggggcttttgcggcagcgcgaatgtgatgagaaggggaatgcttttttcgtatcagggcaacaaaaaaagccactgatccccttgttggaagattcatggctcttatttacggtgggagcatccgggcaggagtcccgataaataaaagaatctgtttttgtatctttagtttagtggaaatgggtggaaatgtcaatggaaaaagggaaatttcggtggtataataagcagtaaagttactttttatgggtaggaattttctgaactgaaaattccgtatgatactgttatggccgcagtaaggttataagttgatcaatggaagtacagagttttgggaaaaggggaatacattatggagaacaggaacacgatcctcgtggtcggccaggcgaagccgagcaaagaggatgcgatctacaatctgcacggggaattttatatcagtctgatcgtggagcgggagactggaaaaattttagagctggactgcaatacgatcctggatgtgacaaagcggtttgtggcatcgatgtttgtcggaaaaagtttaaagacggatattccggcgatcgagaaggagatccgggagcggtattttgcgctgacgcaaaagcctctgatcgcgtgtatgaaggatgcgtgcaaccggtatctcacggcaatcggggagaattgtccgcagaagaagagctgaggagactgaaaagatgcaggaatgtctgctcaggctgagctgaacgaccggttaaaggaacttttaacagagcagaaatgagaactataacataactgtatagatctggaaacaaaagagtataaattttaacattcttaagccggagcttgcctccggttgtttttttcttgttttttccgggatggattgacaaggggaaaaaacatgataaagttatgaatgctgtttttcaaaaccccatgaaaaagcggcagatagacagaggtctggcatgaaaaaatgattccacagaaatatccgggagacaggttttctgtgatatgttgagaaacatgtgaccctgttatcatgaaaatctaaagtatgaaaaaggagtaccccacttatgagttcgtggaatgatgtaacgaaaaaggtgcgcgagatgcggaaaaatttcgcattccgctgtgcgatttcttttgtggcagttctggcatctgcccttttgcagtcttatgtgatcctggcgtttatccgtccggcgggacttttgtccagcggatttacaggacttgcgatcctgatcgaccgaattgccgagctgtacggattttccgtatcgacttccctggcgttagttgtcctgaatctcccggtcgcactcatgtgctgccgcagcattaacgtgaaatttaccgtattttcacttttacaggtatttttcgccagctttttcttaaaagtctgccattatacctcgttgtttgatgacctgaccctaaatgtgatcttcggaggtgttctttatggactctctgttgttctcgcactgaaaggaaatgcatcgaccggcggtaccgactttatcgcactttatgtctcaaataagacaggaaagtcgatctggaattacgtgttcatgggaaatgtctgcatccttgtgatcttcggatacatgttcggatggaaatatgcaggttattcgatcctgttccagttcatttccacaaagatgatctccaccttccatcaccgctacgaccgcgtgaccttacagatcacgaccgagaaggcggaggagatcatgaaaaagtacgtcagccagtaccaccacggaatttcctgtgtggaagcgatcggcggttacagccacaaaaagatgtatctgctccacaccgtgatctcttcctatgagatcaacgatatcgtccagctgatccaggatgtggatgagcatgtgatcatcaacgtatttaagacggagaacttctacggaggattctaccgggagtccctggattaagaaaatcaaaaagtaataaagtaactattcagtaggtctgcgcacttgctgcgctgaccgtaataaaacatgggacggaaggcaaaaatcccatcggcgaagccgatctggaatggatttttgctcgtaacttgccatgcatccgaagggaagctccgggggaggttcctgtaggtgtgagggtactgaacagttacgtaataaattacagacagcacacagaaccctgattgtcgacatggaaggagtacgtgtgctgtctttttatttacgcggacaacgagccaaagtccgcgcttgcgcgagaccttggcaactgtcgcgataacaaggggaaacccgcgaatcgtgtttttgtttgtttgacaggaaattcctgcgttaaatgttgcgtacattcgacttaatgatgccgcacacaccttttctccagcatcgtcaccgcctgatacagcaccgccgacagcacacacaggatcacgatggacatgatcacgaggtccagtttgaagacctggctgccgtagatgatgagaaagccgaggcctgcctgcgcggagagaaattccccgatgatgacgccgacgagacagagaccgatgttgaccttcatgttgctgatgatgagcgggacggaacctggcagcaggacctttgtgaggacatccttctgcttccctccgagcgtatagatcagccggatctgatccgggtccatggagagaaagccgttgtagagcgttaagatcgagccgaagactgccacggagacggccgccgtgatgatcgttttcatgttgttgccgagccagacgatgaggaccggggcgagggcggacttcggcaggctgttcagcatgacaagatacggctccaggatctttgccagccgcctgctggaccagagcgccaccgcaccgaagatcccgatgcatgtcacgagaaaaaagctgagcatcgtctcaagaatcgtgatccccgtgtgataaaagatcgtccggtccgccgccatggaaagaaaacaggagagcacgcgggacggagaactgaaaataaaatcattcaggatcccgatgcgggcactgacttcccaggaaacaagaaacaggatcagaaacaagacccggcaggcaaaaatctgtctgcggatccgccgttcctgttccagatagcgatgctgggcgggagagacggagagcgcttccgtagggatcgcaccccgccgccggaaaaaaagaaaagaagcgatatcatgaaatttcatccgctccacctccgatcccacatttcggtccgtcattttcatcctttagaggaacacccccatacttccgatcatttccgtccaaagccatctcatcaccttcccctgaatttccaagaatcctccacaattcattaaaataagaagaaaactccggataattccgccgcttcaaaggactcgtctcatgatccggaaaacggatcagaagctcccccttgatccgcccgggccggctcgtcaggaccaggatccggtctgccgcgctgacggcctcggagagatcgtgcgtgatcaggatcgccgtctttttccggctgcggatgatcgagctgatatcatcacagacagagagtcttgtctgataatcaagagcagaaaacggctcatcgagaagcagaagatccggttccagcgccagtgtccgaatcaacgccgcccgctgccgcatgccgccggaaagctcggacggccttgcgtcataaaaatactgaagcccatacgcatcaagaagctctctcagccgcccgatatgcccgggatcacacttcccctgaacctcaagcccgagagaagcatttgaaaaaatcgtgcgccactcaaacagatgatcccgctgcagcatatacccgatcccggacgatcccttcgcgaccgggatcccatccagaaggatctccccccgctccggcgccagaagcccggaaagcagcgaaagcagcgtagacttcccacaccccgacggcccgacaatacaaagaaactccccactgttcacatgaaacgatatatcagaaagggccttcgtctctccctccaacgtatgataggagaaatccaccccattcacttccaacttcggagtcatggacacctcacaaacagtatttattataaaatatgaatccatatctgcacacgtgaaccgttatccatcaatctttccttttgtccaccgccagcgcagaccacccatgcctggtgggtggcctgcgcgtactcctcgccaatccccccaaaaccgtaagaattccgcaagaaaaccgaaagatagaagtccccaaaacgcaagctttccctgctatactactctttattataaaaaacaacacaaacaccaagggagtaaaccatgagcagtgaagaaaaaatctcacctgatgagttcgatcaggaactggaagctctgatgagcggaaaaaaagaaccaaaaaagaaaaaaggtggaaagaaaaagaagatcgccgtttcggcagccgtcatcctggtccttggtatcgcagccggaaagatcctcggcggcggaaaagacatggtcccggtggtggacaccgtaaaccctgtgagaaaaacgatccagaaccgcctctccgtcactggcccggtatccgggaccgacagcgtggacgtcgtttccaacctccatgcggagatcctggagattccggtaaaagaaggagacaaagtcacaaaaggacagacactggcagtcctcgatgactccgatgtaagaaaaacggcagatatcgcaaaaaacgattacgatctcgcagtgagcacctgcgcggagaaagacaaagaagcacgaaacggctacgcgaaagccatacaggacctgaacaccgcacaggcgaactacgaccggacaaaagcactctatgacggcggcagcgtgccgaaagtagaccttgagaccgcggaaaacggactcaatgacgcaaaacgcgagcgggactcctataccgtgaagaatgggacagcggttgcggacgattcctaccgcctccagatcgaaaaggcaaaatatgactacgagaaagcgatggaatccctggaggacaccgtgctgaaagcgccgatcgacggcaccgtggtccgcgtaaatacgaaagtcggacgctttgccgacaagatggagaacgatgccccgctgttcgtgatcgaaaacctcgaccagctggaacttgagatcaaagtcagcgaatactcgatcggaaaagtcgcactcggacaggaggcggagatatcagcggacattttaaacggcgggacagttcacggagttgtcgactcgatctccccgaccggagaggaaaaaggcggcggttctaccgaacgcgtcatcccgacaacgatccggatcacggacagcgatacgaagctgatcgccgggatcaccgcccgcgcttcgatcgtgctggaggaatcagaaaacgccctgacagtccctgtgtcggcagtcatggagaaagacgggacagcttatgtccaggagctcacggacggggtcgtctcctgggttccagtcaccatcggcgtggaaggagatgtggaggcggagatcatccctcaggagggccatgcgctggacgaaaattcgcttctgatcgcggagccgggagagcagtatccggaaggaatggctgtcaattcagcggcaaaacagggggaataagagatgtttgaaaaatggagaggagctgcctggcttacggaaaatgtgacggacgagctgatccgcctggaaaatctcgtgaagatctatgacacgggcgcgatccgggtcctgggattaaaaaagatcaacctgacgatccgccgcggggaatttgtggcgatcatgggccattccggatcgggaaaatccaccctgatgaacatcctgggctgtcttgaccgcccgacactcggtcattactatctggatgggatcgacacggcggcgctgtcgccggatgaactctcggcggtgagaaacaaaaagatcggtttcgtattccagtccttcaatctgatctcacgcacatcggcattaaaaaatgtggagctgccgatgacttatgcgaggatcccgaagaaaaagaggacagagcgtgccatggaacttttagattgtgtgggacttggcgcacgtgccggtcacatgccgaacgagatgtccggcggacagagacagcgcgtggcgatcgccagagctctcgcaaacgaaccgccgctgatcctcgcggatgagccgacgggaaacctcgacacggcggcatcgatcgagatcatggagatctttgcggagctccacaaggctggagccacggtgatcgtggtcacccacgaggaaaacattgccgccttcacggataggatcatccacttttccgatggacagatcatcaaagatgagatcaacgagaatccgacaaaggggagcggggaactccacatgaagggcctctaccgacatttccgggaggcagccggaacagagagcggggtgagttcatgttaggggaaaatatggtcatggcgttccatgccatcatggcgaacaagatgcgttcctttctgacgatgctcggcatcatcatcgggatcggctccgtcatctcgatcgtctccatcggagataccatgcggggactgttcgcggatctctacaaggatgcgggaacgacgcaggcagtcgtgtcgatcggctactgggtcgaggacgtgcgggacagcgattatttcacattggatgacctggagaagattcgggaagtatttgcagacgagatcgcatatatcgacagttatgcgagtgtgagtccggatgtctgcgtaggtcggacttccatgaaatttgatcttcagggagtcgaccgggattatcaggaggtacagtcggtgacgatggttgccggacggtatttaaacgagagtgatatccttggaagaaagaaaaacgtggtgatggaggcggagagcgccggaaaactttttggaacggaggatgcggtcgggaagacattccggacgacgatctacggggacacggacctctataccgtagtcggcgtctataaaaaggagatgagcgcgtttcagaaactgctgatgggcggttccagcgatacagggtccgcatacattccgtacacgctgctcacctggccgaatgatacgttttattactgccgcttatatgcaaaagaaggaaccgatatggcggatctcatgtcccgcctgaccgcgtatctcggaaaattaaaagggcggaacgcaggagatttctatacgaacacggtggcggatgagatgggaagcattgacagcatgatgggaggactttccatggcggtcggcgggatcgcggcgatctccctgatcgtcggcgggatcgggatcatgaacatcatgctggtgtccgtcacggagaggacccgggagatcgggatccggaaagcgctgggcgcgaggaccagggatgtcctgatccagttcctcacggagtcggcgatcctgtccgccctgggcgggatcatcggcgtcgtacttgctgtgaccgttgtgacggcgggaggtgccgtgtttggactcccggtcgtgatccggccggggatcatcattcttgcagtgtcattttcggcggttgtcggaattttctttggaatctatccggcatcgaaggccgcaaaggcggatccgatcgacgcgctgcggtatgagtaaaaaagtctgcgatcccctttaagaatttacgcgactaatctgtttgcaagaatgttcagcgccgtgtataattatgaaatgagctgccgcctggtgttccggaccggagagagtcgggagtcatttcttgaatatgcagcgctggcagccggaaacctgatcctggacagcatgatcctcgggatccttgtgaggggaggaattcctctctacgtggcaaaggtcatgacggaatgtaccatgttcctattcagctggatcatgcagcatcagatcatattcagaaagagaggaaagcagtatgggatgggagtttgatatcttaaacgggatccagtcggtatttcagtcggatctgatggatcagatcatgcctgcagtcaccgctctcgggaacggcggcatcttctggatcgcggcaggacttgtttttactttatataaaaagacgagaacatttggaatctgtattctgacagcactggtctttgaggtactgagctgcaatgtgattttgaaacctctggtcgcaagaccgcgtccgtttacttcagatccggcgagaatccttttgatcccgagaccggaagattattcgtttccgtccggacatacggcggtatcctttgctgcagcgtcagccgcctggtttatgaagaagagaaaaacaggtgtggcttttggggccgtcgcatgcctgatcgcattttcgagactgtatctgtatgtccattatccgacggatgtattggccggggctgtcattggaatcctctgcggggcagccgcttcaaatctgacagagatggcagcggcggctcgagaggcgcgcaaaggttccggtccggaaattccggtcgggaagttatgaaagagagagaaccatggagaaaaagccgggaatgtcgctgagtttgagcttctgaggttcatgacgcagaatccgaatgtcgtattttcaaaagagcgtctctttgaggcggtctggggatacgattacgtctcggacgcggcgactgtgtcggtccatgtgaacaagatccgggagaagattgaggatgatgcgagaaatccgaagatcctcgagacggtctggggagcgggataccggctgaattcataattataacatgaaaaaaccgcttacggatttccggatccataagcggttttgatcaaatttatttacgcgaacaacgagccaaagtccgcgcttgcgcgagaccttggcgactgtcgcgataacaaggagaacctcgcgaagcgtgttttcacttgtttcttttttattctacaagagctccatttacatcaaccgtgtgtccatccggagttacacagtcaaccatgagagttcccttgaatccgtcgccttcctcatggaagtagtaccatttgccgccgatctcatgccatccggtaaagagggcgccggtctcaaggtccatgtagtaccagttgccgtcatcttttacccagccggtctgcatgatgttgtcatgaccgaaatagtaccaggttccgtcgatctccagccagtagtcagttgcttcgagaccttctgcgaaatgatatttccaggtgccgtcagcgagttcttcccacgcaccgccagccggggattttaagccgcggagacgaccgccgtttacactgcggtactgtttaggataagtcggctctgttgtgtcagcagcctgtgctgtgatcattgttccgagtgccagagttgcagcgagagctgcgatacagatctttttcatgaaaaatacctcctgggatttccttttccggtatcagactgcatataaaaaatatgaaatctgccgttttttctacgaacttatctatatcctaatatggaaacagaaaagagtcaataaaaagtggcaaaatagagagtgaaaaggcggcaaaaatgcggcgggagctctcacaggcaggaaattttggggttacttttcagaggggaaatagaaaagtgttgtcaagttttcgggtttgtgataaaatgagtggcacagttttgtggatgactcaatttcgatgaaaccggcggttttatggaattttctgcccggaataagggcagacggaccgcctttttggattcacttttgcgttgatggaggcagatatgaaatataagtgtctgatctttgatctcgatggaacactggtaaattcgatccatgcgctgacctactgcacgaacctcgctcttgagaagttcggactcggtcctctgccggagactcagatgaagacgatcgtcggggatggatataagatgcagatgaagcgttccctggccgcctgcggagatacggacgaagcgcattacgaggcaattttacctgtatatatggagattttcggaaaatactgtaactatgagatgcatccttacgatgggataatggagctcacggcgagagcgaaggaactcggtcttaagatcgcggtcgtgtccaataagccggacgctcaggcaaaaaagacggtggaatacgtgttcggaacaaactatttcgacacggtgatcggggagcaggaaggtgtcccgaagaagccggatccgtcaggggcgctgaaggcggcgaaactctgcggtgcagatccgtcggagtgcctgtattttggtgacacgaatacggatatgaaaactggaaagaatgcgaagatgacgaccgttggagttctctggggattccgggggcgtgaggaacttgccgcatttcatccggaatttctgcttgaaaagccgcaggatatcttaaaagagatagtcgggtgatgataccggaggagacagattgaaatattttaagaaaacaagacgaaaacgggtggaagcatggctcattgcagcgatgtttctttttggttccctgaccgggtgcgcttctgtcagggacacacacgggaatgtgggaactccaggagacgggaagttgaaggttgtgacgaccttgtttccgtattatgatttcgcaagacagatcgccggtgacgtcgtggatctttccatggtgattcctgccggtcaggacagccattcgtttgaaccaacgcctgcagatatccgactgatccagaatgcggatcttctgatctgcaacggcggaacgatggaacagtgggtgacacaggtgctcggatccctggatgccccggacctgaaggtcatcacgatgatggactatgtcgatgtcgttcaggaggaaatcgtggaaggaatggaagattccggcgacgatcatggacatgatcatgcgcatcatgacgaggaagacggtgaccatgcagatcatgaccacgatacggaggaccatgcagatcatgaccacgatatggaggaccatgaccatgcggacgacgaccatgcctacgagatcgagtatgacgagcatatctggacgtctccggtgaatgccatgaagatcacgcaggtgatcgcggatacgctggaggagatggatccggcggatgcggcggttttccaggcgaatgaggcggattacctcgggaagctgaagaatctcaaccaggaattccgggatgtcgtggacggtgcggatcttgacctgctcgtcatggcggataagttcccactccgctattttgcggacacctacggactccgctaccgggcagcgttttccggctgttcgtccgacacggagccgagtgcgaagacgatcgcctatctgattgacaaagtgcgggaggagcagatcccggcggtctattatctggagctttccagccaccgggtggcggagatcatcagtgaggagaccggagcgaagccgttattattccactcctgccacaacgtgacgaggagagaatttgagagcggcgttacctatctgcagctgatggaacagaatgttgtgaatttacgggaaggactttatcgatgaaccagcctttattaaaatgtgaacatgtggactttggatatgaaaattacgatgtggtgaaggacgtgtccatggagatcgttcccggggattatctctgcatcgtcggtgagaacggatccggaaagagtacgttgatgaagggccttttagggctcttaaagccgaccgggggagtcctcacgatcgcggacgagttaaaacggtccggcatcggatatctcccgcagcagacgccggcgcagaaggatttcccggcaacggtccaggaggtcgtactttccggctgtctcggaaagcgcggaaaccgcccgttctattctgcggcggagcggaagatcgcacagatcaacatggaaaagctcgggatcacggatctgaaaaaaagctgctaccgggatctctccggcggccagaaacagagaacactgatcgcgagagcgctctgcgcgaccgacaagctcctgatcttagacgagccgatcaccggtctcgatccggcatcgacccaggatttctatgcggtgatccgccatctgaacagggatgaaaaggtcgcagtcctgatggtctcccatgatatcgggaacatcgtgacgcaggcgaacaagatcttacagttgaaacagacagtccagttctacgggactgtggaagagtataaaaaatcggaatttggaagagaattcctcggaggtgagagctaaatgggacttttacaggaaatgttttcctatccgtttctggtgcgcgcgatgatcggcgggatctgtatctctctgtgcgcgtcgcttttaggcgtcagccttgtattaaaacgatattcgatgatcggtgacggactgtcccatgtatcgttcggtgccttatcgatcgcagtggcgtttaactgggcgcctctcgcggtgtcgatcccggttgtcgcagccgcagcggtcctgctccttcggatcacgggaaacggaaagatcaagagtgacgcggcgatcgcgatgatctctgcaggttccctggcgatcggtattatcgtgacctcccttacaacgggaatgacgaccgatgtgagcagctacatgttcggaagtatcctcgccatgagccgtgaggacatgtatctgagcgtggtgctctccgtgatcgtcctcggaatgtttgtgatctgctataataaggtctttgcagtgacgttcgacgagagcttcgcgaaggcgaccggcgtgcgcgtgtcggcctataaccttctgatcgcggtccttactgcgatcacgatcgtcctcggaatgcggatgatgggcgccatgctgatctcgagtcttgtgatcttcccggcgctgacttccatgcggatctttaagagctttttcggtgtggtcgtttcctccggcgccgtgtcggtggtgtgtttcttcatcggactcgttctttcctatgtatattcgatcccggcaggagcgagtgtggtggtcgtcaatctcgtgatgttcggggtgttctgcatcgtgcagatcctgaagcagaaggttcggtaagaaagatatactttcttccggtcagcgcagacagatgcgcagatctgcggaaaacttcataatgagaaaaaatctcagatactgccgctttccgaaaaacaaaggaaagcggcagtacttgactttgcgggaaaatgtgttaaagttagtaaatggtaacgaaaaatgaaagtgctatgagaagacggattcgcagtgatctgaaaactgcggcatgtgttccggtctgcggatgagaagaaacaccggaaaacagacctgtcagaactacagaaacatggcacaggtgacaagaaagaggtgtcattatgacaaagatcgatattatctccggtttcctcggagccggaaaaacaacatttataaagaagcttctgaaagaagcgatcgcgggcgagaaagtagtcctgatcgagaatgaatttggtgagatcggaatcgacggcggatttttaaaggattccggaattgagatccgtgagatgaactccggatgcatctgctgttccttagtcggggatttcggacgttccttaaatgaagtcctcacaaaatatacaccggaccgtgtcattatcgagccgtcaggcgtcggcaaactttctgatgtcatgaaggctgtatgcgacgttgcaggtgagatcgacgttgtattaaacggttctgttacggttgttgacgcacagaagtgcaagatgtacatgaagaacttcggtgagttcttcaacaaccagatcgagagcgccggaacgatcgttttaagccgtaccgatgtcgctgacgctgacaaggttgcacagtgcgttgagatgatccgtgagaagaacccgaaggcagcgatcgtgacaactccgatcgacaagctgaccggtgagcagcttcttgcgatcatcgagaaaccgaccgatgatatggctgagaagcttctcgaggaagtaaaagaaggtcatcaccaccatcatgacgacgacgaggagtgctgctgtggccatcaccatcatcaccatgacgacgatgacgatgaggacgagcatgagcaccaccatcaccacgacgatgacgaggagtgcggctgcggtcatcaccatcatcacgacgatgatgacgatgacgacgaggacgagcatgagcaccaccatcaccacgacgatgacgaggagtgcggctgcggtcatcaccatcatcaccatgacgatgatgacgacgaggatgagcacgagcatcatcatcatgacggcgagtgcagctgcggtcatcatcaccatcaccaccatgaccatgatgccgatgaggtattcacaagctggggtcttgagacaaaccgcacgatcacaaaggagaaactcgagtccctgttacaggagcttgctcattctgagaaatacggtcaggttctccgtgcaaagggaatgctcccagatgcagatggaacctggtactactttgatctcgttccggaggagacggaagtccgcacaggcgctccgatctacacaggtaaagtgtgcgtgatcggttccaacttaaaggaagacgagttaaagaaagcattcgaggcttaagagacgaatgtgcagtgtcgggcatgtgccggacacggatatgaaagaatgcccgtagctgtgagagcactgaacagttacgattacaggaaataaaaacgacaggagctttttgcgtcatcaggatctcgcgaaaagcttctgtcatacaatcagataggagaataaagcattgaaacagcaggaaaaaatgccggtatttgtcatcaatggctttctggaagcaggaaagacccagtttatcacaaataccttacagcaggactatttccaggccgacggaacaacagtcctgatcctctgcgaagagggagatacggagtatgataaggagatcttaaagaagacaagaacgaagatcgtgacggttgaagatgtctccgagatggatgaagacttctacggccggatcgaagcgctctatgacccggaccgtgtcctcatcgagtggaacggaatgtggccgcaggatcagctgcagctgccggatacctgggagctcttccagcagatcacgatcattgacggttctacctttgatctttatctgaacaacatgaagccgctccttgcgcttcttgtcaaacactccgagcttgtgatcatgaaccgctgcgatgaagtcagcgacgagaacatcacccgctaccgccgcggattaaaggctttaaacccgcaggcagagctgatcttcgaggacgcggaaggcgagatcgagcaggaagtcctggaagaggatcttccgtacgatatgaaagcggacgtgatcaagatcgacccgaaggatttcggtatctggtatatcgatgcgctggataagaaagaccgctacgagggaaaggtcgtggagtttaccggaatggtattaaaatccccggaattcccgaagaactacttcgttcctggccgtatggcgatgacatgctgcgaggcggatatgacgttcctgggcttcatttgcaaggcgcgtgaggcgagaaaccttgagacaaagcagtgggtcaaagtccgcgcgaagatcgcttacgagttctggcaggactacgacggcgtcggaccggtcctctacgcggagagcgttgagccggcggaggagatcaaggagatcgtgcagttctaagaaaatttgacagacagaaaattggattccaataaaaataaaaaacagactcttactctcgatttgcaggaggaaagagtctgttttttatgttagttcatcggtgccaccggaaccggccgctcgcggtcgaacacttccgacacatcgaagagatcgctcagatgatctttcgtcggattcgtctccgggagatcatagtacatccggtagccatcaatattccggcgtccctgacgcagataatccggtccgaactgtacccagtaccggctggagtccacgttgcagaagtagcggaaaccgagctggtggagatactcgtatttctgattttcagatgtgtacgggtgccagtcgccgacatcggagccgaacggatagagcaggatatcggtctttccgatcagggattccacgcgggacgcccatttatcggaatcggtcttcacatcttcaaaggagcgctttccgaagttgatatgtccccagctgtgggaggcgagctcccagccgttgtcgcggagacactgcgccacctggcggaccgtctccttatcggcctcatagttggggttcgtagtctcataggacgggtctgtccggtatccgaggacaccctgatatcctgtgaaagcgaggacagctcttgcacctcggtaggagaagtccgggtgctccgtgataaagtcttccagaagcgggacgagatcgtaggagccgacggacacggaaccgtcgtccatcaccatctcacaagtcggtttcccgtcttccccgacgatcatccggctcgcgaaaccgtcgccggtcatgtactcatagtagcagagatcatcctgcgacatgacgaatgggatctttccgggcggcagcaggatcgttcccggcaccatttttgcattgccgttttcatcggtctcctcatgcgcaatgtcgtgaagtttcacgaggacatagccttttgcgtacatggagtccaggatctttaagaattcactttttgtcgtcatcacctgatcgtagcctttttcatcggcatccccgtcaaacgctttggagttgtccatgatgagggaatggaaaaagatgtgggtgatcttattcacatcagcaggaaccagggtggcttttgtctcttcgcaggacgcgatcaatgcctttacatcctcgttttcggcataatctgtcgccgagttcaggatctcaagggcggcatcgtaatcgtaggtaacaaattttgcatgggcgctgtttaagatctcgtccagcgcagcatcgccggtattgtaggcggctgtcagagctgtggaggaaggcgtttcggaagatgcatctccagcggatccgctctccgccagtgaaacgtttgtctctccgtttccggaggaaggatcggaggaagtttctgtctcctttttcgcaagtccgggaagcccgccatgtttttttataaggatcccgccgccgaccagaaggaacagagccgcgaggaccataaaaaggatcgtaagataaacggtccggcgtcgtttccgcatcttttcgcggcttgaaatatatgcgcggcgtctctcaaaatcgtcgttgtattccaaagtatcacctcttgtaatcaataaggattttattacttctatcataacacaaccgcatgttcgccgctatggaaaatacaaaaattaagcattttgtaagcagtggcataataaggaatgtccgctccatattttatatggagaaatcctgcgtgagagcaggctgggcgggagaaaaagcatgagagctggaaaaaggatcttttgcgggatcatggccgggatcctggtgatgatgggaccggtaaacggatatgcggggacaggaaacagcaaaatagcggagagtggacggattatagcgaaaactgcggcgggagccgatcccggcccggagatcacagccccgtccgcgatcctcatggaggcgtccacagggaccgtgatctgtgagaagaacgcggatgagccgagaaacccggcaagtgtcacgaagatcatgacgctgatcctgatcttcgatgccctgcagtccgggaagatccacttgacggatgaggtggtgacgagcgcccacgcgaaatccatgggcggatcgcaggtgtttctggaggaaggcgagatccagacggtggagacactgatcaagtgcatcgttatcgcatcagggaacgacgcgtcggtggcgatggcggagtttgtcggcggagatgaggggacatttgtgaagatgatgaatgagcgggcgaaaggactggggatggagcacacaaaattcatcgactgctgcggactcacaaattccccggaacatgtgacgaccgcgcgggatattgcactgatgtcccgggaactcatcacaaaatatccgcagatcacgaactacacgacgatctggatggagaacatcacccatgtgaccaaacagggatcaaaggagttcggcctctccaacacgaataagcttttaaagatggcgacgaactttgaggtgacaggattaaagacggggtccacgagcatcgcgaaatactgtctctccgccacggcgaagaaagacggtgtggagcttatcgccgcgattatggcagcgccggattacaaggcacgatttaaagatgcggtgacgctcttaaattatggatatgggaactgcaggctctataaggacgagacgccgccggagcttccgaagctcccggtcaacggcggaaaagaaccggaagtggaactttcctacggggaaccttttacatatctcgggctccacggcgaggatttttccggcatggagcgggaactgacgctggaggaagacgtaaacgccccggtaaaggcgggggaccggcttggaaccttaagttaccgcctgaacggggaagaagtcggaaacatccctgtcatagcggcacagaatgtggacactgccggatttgctgattatatgaagtggatgacagggtggtggagaatgaaaggtgaagaagctggtggtacttttcacaggtagaaattttcgggattgaaaattcaatctggcggttccattttccggaaaaatattgtatgatggtaactattcagcagatcggtgcatttactgcacggactgtaaaaaacgataaagacactgcgtgcctgaaacgtgtactcgcccgaagttgaagattggcgcaggcagccgcgcccggagcgagaatgtgtcaaggcacattttttttataactgaggaagaaaaatggcggacagacaggagaataaaaagactgtggtcgtggtggatgacgaaccgatcatccggatggacctcggtcagatgctggaagagttaaattatgaggtagtagcggagggcgcggacggatttgacgcggtggaactctgcagaaagaagaacccggatgtggtcctcctggaccttgaaatgccggtatttgacggaatgacagcggcggagacgatcatcaatgagagtcttgctggatgtgtggtgatctgcactgctttcgcggatgaggattttctggaacaggccggccggatcggagtgtccggttatatcgtgaagccggtcgaagcgagaaatctgcggccgacgatcgagatggcgtatgcgcagggaagacggcttgcgaaacagaagctggcgatcggtgaggcgaacagaagactggaggagaaccgtgtgatcgaacgggcaaaaggtcttctggcgagatcaaaacatatctctgaaatggatgcgtaccggaaaatgcagaagacagccatggaaaagcgtgcaccgttagtttccgtggcccgtgcgatcatccgcgtggagtcccagagggatgaggcaaatcaggcgaagaagtggctgatgaaggagcgccggatgacagagcaggaggcgtaccgttacctcgtaaagggagcggaaaaggccgggcttacggtttccgcctttgcaaagcagctcctggaagaggaggcgtagcatgacaaaagaagaactcatgaaacgcaccggcctctcggaggaggatgcggagattttaaaacggacggaacagatgctgccgatgatggcggagcttgcgggggccgatctgtttatcgactgtatggacaaaacggatgggatcatgtttgtcgcagcccaggcaggaccgaaatatatgtcgtcagcctatcagaaaagtgttgtcggatgtgcagctgagcaaaaggacgaaccggcggtttaccgggcgctcgagacgagaactcctgtacgggatatcaaagcagtgactcaggaggaaaatacggtgcgccaggatgcagtcccgatccagggcgaggatggaagcgtcatcgggatcctgatcggcgagcgggacatcagcaaagagatccggagagaacagaaatacgaggcgatggcgagacagccggtggcgtttggttcggtcgcgtcgaggactgagagtaccgcagtccggaatgcgagacgggaagtccatcaccgggtaaaaaatcatcttcagctcatcgccagcatcatgaacatccaggcgagaaagtcggagagtgaggaagtgaagcaggcgttccgggaaaacatcgcaagagtccagagcatcgcctccatcaacgagatcctcacggcaaatgatgagggaccggcgcctctgatgccgtttctcgagaagttgaagaaccagttcctgctcctatatggggcagaatatcccattgatctgaaactttccggcgatgatctgactgtttcccaggatcaggcaacggacgtggcgctcgtggtgaatgagcttgtttcaaatgcgtacaaacacgcgtttaagggaagagagaacggggagatccgcgtgatcttaaagaacggagagcgatacgcatccgtgacagtccaggacaacgggaccggaacggaagagatccggaatgagggaaatttcggtatgatgctggtacagatgaccgtgaaagacaaattaaagggaaaagtctatgtggagagcggagagaacggaacctctgtcaccttcgattttctgattgacaaatccacggagactggaatataatagacgaagaaattgaatatttcaccgcacaacagggtacggtgtaacagcgataaggctcagagcaggaatttatttctgctctgggtcttttgttcttttctgggaaaattctgggaaaatttcggtgaacggaggtgagaatactggaacattcaaaaatgttgagcgttgggatcgatatcgggacatcgacatcgcaggtgatcttcagccacctgacgatcgaaaatacagcgggatacttctcggttccttctgtggagatcgtgggaaaggagatcatctataagagtccggtttaccggacaccgcttctggacagatccctgatcgacggagctgcgttaaagaagatcctcgaaaaagagtatcagagtgcgggcgttgtcccggcacaggtggagacgggagccgccatcattaccggtgaatcagcgagaaaagagaatgcctccatggtcctcgatgagctcagtgtgtttgccggagatttcgtcgtatcgacggcgggtcctgatctggaatctgtgatcgcgggacagggaagcggcgcctggaaatattcggaggataacggcgttgtcgttgcgaacctggatattggaggcggaaccacgaacgtggtcctctttgacggaggcgtgatcggaacgagaggctgcatggatatcggcggccgtcaggtgaccgtggatgaacatggacgaatcacttatgtgagcccaagcgccgcggcgatcgcgaaggcgctgagactttcaatcaatgagggtgacccggcagatgaggcggtcctctcgagactctgtgacggaatggcggaagttctcgaggaaatgctcggggcggcggaacccacagagcttttagaagaagtccggacagcaggttcctcaacatttgagatccccgcagaacgtccgatccggtacatctgtttttcaggcggtgtggcggaatgcatctaccacccgggaatggatgtatttgcatacggggatatcgggatcctcttagcagatgccatccggcggagccgcctgttctcaaaattccatgtgatcagcgcgcaggagacgatccgggccacagtgatcggagcgggaacttacacgacgacgatctccggaagcaccatcgcttacgcggacgggctgttcccgatgaagaatattccggtactcaaactttcggaagcggaggaaaacgactgctggctgggaaagagcgaaggactgaaagaaaagatcctctggttcttaaaacagagtgacagctcgaagatcgttctcgctgtgaacggaaagaaaaatccgggttacacggaattaaagacgttcgccgccgctctgggagatggaatgcatgcgacgatccagaccggggaaccgcttctctttgttgtcagggaggacatggcaaaggcgctgggacagcttttgagacagaggtttttaaaagaaagaaatattgtggtgatcgacgaaatccgcgtggaggacaacaacttcgtggatttcggaaagccggtgatgaacggtcttgtcatcccggtagttgtaaagacattattatttgggtaaaaggaggagaggaaaaaggaacatgggataccatacgatactttccggacaacgctttacctttgattctgtaaaagaagtgatggcgaaagccggggaacataaatccggagatgtcctggccggtgtggcggccgcatctgatatcgaacgcatcgcagcgaaggatgttctcgcaggaatgacgttgagagaactctacgagaatccggcggcgccctacgaggaagatgaggtcacaaggatcaacatcgatggattgaacaggaaaatatttggcgagatcgccggctggacggtcagcgacctcagggaatggctcctctcctatgaggcggacaatgaggcgatccaccggatctcccggggactgaccgcggagatggtcgcttccgtctgtaagctcatgacgaatctggacctgatctacgcggcacagaagatccgcgtgacggctcactgcaataccaccgtcggagagcgtgacatcatgggaacaagacttcagccgaaccatacgaccgataatgtcgaagggatcacggcatccttatttgagggactttcctacggatgtggagatgtcctgatcggactgaacccggtcaatgataccgtgtcgagtctcgcggaggtattaaagcggtttgacgaggtcaaacaccagtttgacattccgacgcagatctgtgtactgggacatatcaccacccagatcgaggcggtcaaacagggagcgccgtgtgacatgatcttccagtccatcgcgggcagcgagaaaggaaaccgtgcgtttggtttctccgcggagactgtggatgaggcgcaggagctgatgaggacgcagggtacggcggcaggaccgaatgttctctatttcgagacaggacagggaagtgaactttcctcgaacgcccactggggagcggatcaggtgacgatggaggcgagatgttatgcgttcgcaagaaaatatcacccgttcatggtcaatacagtcgtcggcttcatcggaccggagtacttatatgattccaaacaggtcataagagcaggacttgaagaccacttcatggcgaagctctccggaatcccgatgggatgtgactgctgctacacaaaccatatgatggcagatcagaacgacatcgagaacctgtccttgctcttaggggcagcgggagtcaattacatccttggcgttccgaccagcgacgacatcatgttaaactatcagacaaatgcctaccatgacatcggaacgatccgtgagatcctggggaaacatccgatcccggcattcgagcggtggcttgagaagatggggatcatggaaaacggaagacttacaaagtacgcgggagatccgacgatcttcatgaagaaagggcggtgatcggagtgctgagtaaagaagagatcgaccggatcgcggaagagatcctggccgggtttcaggcgggaaaggaagagcgaacgtccgctcccaaaacaaaaaaagaaattccggggctctccggagtcgctgatgtgaaggcggaagcttccgtgagagaaaacagaaaaaaacaggaacaggagatcctcgaggctgccgccggaagtgttccgaaggcggaaacaacggcgaaagagtcagaaagcggagaggatgagttgaaggaaaaggactggcgggcgcctctcatcgatagcccgcaggatccggatgccctgcagaggatgatggcgaagacgacggctcggattggagtcggaagatgtggtccgagattaaagacccagacgcttttaaagcttcgcgccgaccacgcggctgcgcgggatgcggtcatgatggatgtcagcgaggaacttgtctcggaactgggacttttcccggtaaagacactctgcgaggacaaaaacgtattcctcacgagaccggatctcggaagagatttctctgaggagacaaagaaggcaatctccgaacactgtgtccatgatatcgatgtccagatcatcgtgagtgacggactttcttcctcctccatcgaggcgaatgcgccgaagatcctgccgatcgtgatggaaggactaaaagagaaagggatcagtacgggaacgccgatcttcgtaaaattcggaagagtcgctgcccaggaccagatctcagagcttcttaacgcaaagatcgtctgctcctttatcggagaacggccgggtctcgcaacggcggagagcatgagcgcctacatttcctatatggcgacagtcggaatgccggaggcgagaagaaccgttgtttccaatatccacaaaaacggagttccggcggtcgaagcgggagcttacatcgttgatcttttagctctgatcctggagaaaaaggccagcggtgttgacctgaaaaaataggaggcagcatggcaggaaaacagctgaacacaaagatcctggcagtgcggatcatcccgaatgcggatccgatgctcttaaagaacctggatgtccgtcctggggataagagtctcggaatcttcaccaccgactgcgacgatgtgtcctacacggcggtggatgaagcgacaaagaaggcagatgttcatgtggcctacgcgaagagcatgtacgcgggttctggaaatgccagcacggcacttgcgggagagtttatcgggatcctttccggaccggatccggaggaagtgagaagcggacttcaggcggcattctccctgatcgagaacgacgcgcacttttatgaggcgaatgaaacgggaacggtagtctactttgcccactgtatttcccggacaggaagctacctttccagtcaggcgggagtgccggagggaacaccgatggcgtatctgatcgcaccgccgttggaagcttccgtgggactcgatgcagcgttgaaggcggcggatgtggagctttccctctactacggaccgcccacggagacaaactttgcaggcggacttctgacgggaactcaggcatcctgtcaggcggcatgcgatgccttcgcagatgcggtctgccggatcgctgaggatccgttggcatattagaaaatgagatagaactacagaacagaaaggagtggtcagatcgtgaatattgatcgtgatctgcagtcgatccaggaggtcagagacctggtcgcaaaagcaaaagaggcagaaaaaacactctgcacatttccgcaggaaaaattagatgccatctgtgcttccatcgcttccgcatgtatggatcatgcggaggagctggcgaagatggcggtccaggagaccggatttggaaaatgggaggacaaggtattaaagaacaagctcggcagcgcaattacctgggagtccgtaaagaacatgaagacggtcggagtcttaagggagaatgaggagacaaaggtgaccgagatcggcgttccgatgggcgttgtagcggcactgatcccgtccacaaacccgacttccaccgtcatgtacaagagcatcatttccatcaaagctggaaatgccatcgtgatcagcccgcatccgggagcaaaaaactgtatcacagctacatataagatcgtgaaagaggcggcggaacgcgcgggtgctccggagggaaccgtcaactgtgtgagcctcacaactgtccaggcgacggatgctctcttaaagcatccggatgtaagcatcatccttgccacaggcggcgaagcgatggtccatgcggcgtattcttccggaaatccggcgctcggcgttggtcctggaaatggtccgtcctatatcgaaaagagtgcggacatcccgatggcggtaaaacggatcatggattcgaagacctttgacaacggaacgatctgtgcatccgaacagtccatcgtcacagagactgagatcgcagagaaggtaaaagaggaattaaagaaacagggcggctatttcctgacgaaagagcagtcggataagctttccggatttcttctcagagcgaacggaacgatgaatccgaagatcgtcggaagaacggcactgaaaattgctgagatggctgggatcacggtcccggcgggaacaaaacttctcgtatccgaacaggatccgatgaatgtcagcaagaagaatccgtactccagagaaaagctctgcccggtcatcgcattcttcacggtagacggctgggaggccgcatgtgagctcagcatccgcatccttcagaatgagggcgcaggtcataccatgacactccacacaaaaaataaagatgttgtccgtgagttcgccttaagaaaaccggtatcgaggatccttgtcaacaccccgggtgcgctcggcggagtcggagcgagcacaggtcttgcaccggccctgacgcttggctgcggagcagtcggcggaagtgcaacttccgataacatcaccccgatgaatctcatcaacatccgccgtgtggcatggggactctgcgaactggaggatctgagaaaaggaagtccggtcccgaaggatgagccagcctgcgaatgcggtaccaaaacagatctgaccccggaggatatcgaggcgatcacacgtgagatcatgaaacgtctcggagcgggactcggaaaataatcaaaaaaacaagaaagaatatataatttaaactattagaacagataaaacaggaggaaatcgattatggcagcattattagcacttggaatggtagagacaaaaggtttagtaggatccatcgaagcagccgatgcaatggtaaaggcagcaaacgttactctgatcggtaaagtacatgtcggcggcggacttgtgaccgttatggtgcgcggtgatgtcggagcagtcaaggcagcgacagacgcaggcgcagcagcagcgggccgtgtaggggaactcgtatctgtacacgttatcccgcgtccgcatgcagaggttgagtccattcttccgaagcttggggaatgatcatctcagaagatctaagacacgtcacagcctgaaaaaggctgcgtgaaagatatcaggaggaaacgaacatggcatcattacaggcacttggaatgatcgaaacaaaaggacttgtcggcgcgatcgaggcggccgacgcgatggtaaaggcagcagatgttacgctgatcggcaaagagcatatcggcggcggactcgtaaccgttatggtacgcggcgatgtcgcagcagtcaaggcagccacagatgcaggcgcggcggcagcaggaaaagtcggaaatctcgtatccgtacatgtaattccgcgtccgcacggcgaagtggaatccattcttccgcacgtgagcgtagtcacagagtaaacaaaagtaaaggaaacagcgcatgaaagtactgacagaaatggagcttcgggcaaagtggaaaaccccggaggacggagtctaccatgtggaagccgggacatttgtcacgccgatggcaaaagactttctgcgggaaaagggggtgtccatggtcattgacccggaggagaagaagtccatgaccaggacgccggtaaaaaaacagggagaccacacctatatcgatgcaaaaacaggagagggataccgggagaaaccggagaacatgactcatcttcgcgggaatcttcttgtgatgaagacccatccccggatcgctttccggggaaaggtggatacgatccaggcgaaagtccttcttctgatggcggagtaccggaatgaacccgggctatataaagacctcgctgatattttaaacggtctgagggaagtcctgggatcagaagtaaaggaagaggagatcgcgggattttctctcttcggtctggatgagaaggagatccatcggatgtcccaccaggtaagggagacatttgggatggatcatccgatcccggacgcatcgatgggaaaaacggccctggaactgaaccttttgcgggcagagatccgggaagtggagcttgcggcggcaaatgcgtttgaagacgaagaaaacgactatgggatcataaaggcgttaaaccggttgagcagcggagtctatgttgtattctgccgcctgctttccggctattacgacaggatggaggaataacgtggacagagaacagattcaggagatcatcttccgcgtattgtccgaattcggaaactggatgccgggacgggaaccggaactggaatttcccgttgaggtatccgcaaaacatgtacatctgacggataaagcagtggaagtgctgttcggcaagggaaaaaagctgacgccaaagcgcccgctctcccagccgggacagttcctgagtgaggagcgtgtaactctcgtcactccaaaaggaaggatcgaaaatgtggcagtcctgggaccggagcgcccctatgtgcaggtggaactctcggcaacggatgccagaacactcggcgttaaggccccgctcaaaatgtccggggatttaaatggagccggggatgtctatatcattggaccggaaggcgtctacgacgcaaaaggaagtgcgatcgtggcacaggcccatattcatctcacaccggatgacgcagcgaaagcaggcgtttccgatggacagagagtgtcggtgacgatccgcggggagcgtccggcaacttttgaaaatgtgatctgcagagtcagctccacagcgggacttgcgatgcacattgattatgatgaggcgaacgcgtgcatgcttccaaagaatgcgactgcaagaatgcgccttcagacaccgtgctgcagcctggaaaagactccggcaaagctgcacgcggaggaaaagatcgaacagaaaccggctgtgaagacggagccggagaaagaaaacattccatgtgatgagccggtaaaaaagccggagacggtatttaacggaaagctgatcacggaagcaatcgcgaaagaactgactgcacagaaaggcggcacgctgacgataaagaaaggcgtgatcgtcactccatctgcgaaggacattttcagccgggaaaagatggaactcgtgtgggagacagggaggtaaaaaacgatgatgatctgtcaggtggtcggtcatgtctgggcgacaaaaaaagaagaaaaattaaacggacataaacttatgatcgtccgtgaggagacgacgacaacgagaaagggagcgacgtttgtcgctgcggattcggtgggagccgggatcggagagatggtccttgttgtcagcggaagtacagcgagacgggcgatcggcgaggatgacgcgcccatcgacagcgccatcgtcgggatcatcgattccatggagatttcaaaggagaagaattaacatggcaggacttacggaaatcataaaagaagccggtatcgtcggatgcggcggagcgggttttccgacccatgcaaaatactccggcggtccggtcgagacaattatcgtgaatggtgcggagtgtgagccgctcctgcagacggaccggtatctcatgagaaactgcgccagaaagctgatccggacggcagaccggatcaaggaagaaactggtgcgaaagaatttatcattgcgttaaaagcggcatatacaagggagatcgagtctctggagcgtgccattgaagagcttggctcctctgtaaaacttcataagcttcagagctttttcccggccggggacgagcagacgatcgtctatgaagtgacaggacgggtcgttcctccggctgcgatcccgctttccgtcggctgcgtggtcagcaatgtggcaaccatctacgggatcggggatgcctttgagggggaaccgtttacaagaaaattcctgaccgtgacgggagaggtcaaccatccgacgatcttaagagtgccggtcgggactccggtcagcgagtgcatcgccctggcgggcggcacgcatctttcgaggtatatcgtggtcaacggcggtccgatgatgggaaagatgatccccatggaagaggttccgaactcctatgtgacgaagactatgtcgggactcatcgtgcttccggaggattccgcgatcgcgagaagaaaccaggtgacggtaaagcacatgatcaatcaggcaaaatctgcctgcatccagtgttccttctgctctcagatgtgtccgagagcgcttttgggacatccgatccgtccgaacaagatcatgagaaaattgagctccggcactccgatcggggagatgttaaacgatccggatgtaagaaatgcggcgctctgctgtgaatgcgggatctgcgagatctacgcgtgtccgatgggactgaagccgagaaccgtgaattccatgctgaaaaaggagcttgcgaaggcggggatccgctatcagagaccggaaggcgtggaatatacagcgcgtccggagcgcgggatgagaaaagccccgacagagcgagtcgcgtcaagagccggtgtcggcgcctatgagaacctgaagatcgatgatttcttttctgtaaacccggaggaagcgggatgcgtccgcttaagcctcagacaggggatcggagcgccgtctgttccgactgtgaaggacggggatccggtgaaagcaggagagcggatcgctgcctgtccggaaaagagtctgggatcagagcttcatgcttccgtgtccggaacggtttccattgatccggatggagcgtatatcgagatccggacaggaaagagctggagttatgaaaaacaggaatcgtaaaagatgcggagacagccggcagtcaggcaggataaaggagagtggctatagtggaagcgatcggaattcttgagagtaacagcatcgcgaaaggaatcgaggcagcagatgcgatcttaaaagcagcagatacatccctgctgttttcaaaaccggtatgtccgggaaaatatacgaccctgttttacggggatgtggcggcggtccaggcgtccctggaggccggagagcgcgtgacgggagagcacacggtggattccgttgtgatcccgagagttcatccgcaggtgatccaggcgatcaacctgtcgacaacaccggaaggcgtgaatgcggtcggcgtcatggaattttacagcattacagcggcagtttatgcggccgatgcggcggtaaaagcggcggatgtcacactgatcgatgtgcgtctggggatcgggatcggcggaaaatcgttcgcggtcctgaccggggatgtggcagctgttgaggaagcagtgaagtgtggaatggcggcaggaacagagaagggattggcgctcagcagcgtagtgatcccgagcccgcgcgaggagatcttcgcggcacttttataatgagacctgagagggagaagacatcatgacagagcagaatccttttgagagtaaacagaggatcatccaggagttcgtacccggcaagcaggtcaccatggcccacctcatcgcgaatccgaacgaggatctctataaaaagctcggcgtcgtcagcaagacccgtggagctcttgggatcctgacgatcacgccgagtgaggcggcgatcatcggagccgatgtggcgacgaaggcggcagaggtggagatcgtatttgtcgatcgtttttccggctccctggtcgtatgcggggatgtagcggccgtggatgcggcccttaaggatgtactcagagtccttggagaagtccttcattttacactcacagatattacaagatcctgatgaaaatcaggatcttgtaagttgggaagaaagttactttttacgggtaggaattttctgaactgaaaattccgtataatacagtagtggtcgcagattttgccgatttggaatgcgaagcatcggcaaaatcctatgttacagtgcgcgggaggagagaagacatgaagaagatcatgatggtgggaaagatcggctgcggaaagacgacgctcagccagagactcatcggggagcaggtctcctacaaaaagacccagtcgattcaggtcatcggggatgatatcgtggataccccgggcgaatatgtcgagcagaaacagttttacagcgccctcatcgtgacagccgtggaggcggatgtaatcctgctcctctcctcggcgatcgatgagcagaatgcattttccccgcggatgggatccctgttctccggaaaacctgtgatcggggttatcacaaagacggatctgtgtgaggatcctgagctcatagaaggcgcttctgagatcctttccatggcaggggcagaaacaatcatcgaggtcggattcggggatgattcctgcctggagaagctcagggaggcaattgagacggcggagtagacattgtatatttcgctaagaaaatgcaaagatttcggtaaaaaacagttcgcttttttttattatttatgtataatagatagaaaatgcagaatttgatatctgaaagagctgcaaaaaacagaactgtaaaggtgagaagcgacagttctcaaaatatcgcagacaatgaggtgatccgatgaaaattggacagttggcaaagttatgcggtgtcagtgttgcgacggtccactactatgtaagtatgggaatgctgatcccgaatgattccagcgcccagtacgatttctccgagcgtgaagtggaggatctgaatctgatcttaaagatgcggaagcatcagtttaaactgaaagagatccagcagtatctgatcctgacgagacattccagaatgatcgagccgagtacgatcaatgcggcgctgacgatcctggagataaagcagcaggaaatattctctgaaatagaggaactgaaaaattcctaccgggagatcggggaggagatccacaatctccgggaaaagggaacagccgagaggcgtgtgacgggggtgccggtgagtgccctgcctctttttgcgtgtccgtactgcggggaatcgttaaatatcgaggatgcggagatcaagaacggatacatcatttcaggaaaactcgtgtgttccggttatgggaatggaacgtgtgaaaagaaatatgaagcgaagatcgttgacgggatcgtggagaccggaaatctttacaccggaatctatgatcatccggatctcaagcgcggactgtaccgggatatgggaccggaattcagcttttgtttccagagatgctatgaccgtgtgacagagtctctgatgaaggatgatatgaacggaaaagtctttctggaggcgaatatcaatggatatttttacatgtacaaccatctgggacttctgccggcgaacagcacgctgatcctgatcgataaatacccagagatcctcaggatgtacaaagccctgatcgaacagtgcgatatcaaatgtcagatcctctatatcgccgatgcagggacggattacccgttaaaaagcagttgtgtggaccgctacattacgttctgcggggaaggcgaatatatgctgtaccatcaaaactgttatctgatggatgctgcaaggtattttaaagaggatgtccgtgtgtacggtacatatttaagctatgaccggagcgcaaaatccagaaaaaatctcctgaccaagtatccggaaagttcaaaacgtggattccagatggaatatctgatggaggactataaaaaatgtggctatgagctgtcactcgaacagatgggagcgatcacggattgcggtgcgagagtgtatgcctttgcctgccaggtgattggggaagtcatgagaatctactcgatcacggcatggaagaaaggtcataagccagagaagatatagagaatgaaaagggatatgaaactgaaacgaagccccacacattttttttgatgtgtggggcttcgttataatagtgatcctttatccttttatcccgtcagatgtaatcccagtactatctgcaggcatcaacaaacgctttcagaagctttaactgctcctcagaatcatacatcatctccggatgccactgaactgctacagagaacggatggttcttctgtacgatcgcttccggaacaccgtctgcggatttcgcaatgatctcgatatccttgcccggatccttcacggcctggtgatggaaggagttgatgcggatctcggtttttccgtagatctcctctaagatagaacctttctcgatttttaagtcatgccacgggtagtttctcgggtacttgtccccaaagtgatgttcgaactttccttcgatctcgagatcctggtacagggttccgcctgcagccacgttcatgatctggattccgcggcagatgccgaggatcggtttcttgatctcattcatgaagtattttgccactgcgatatcgtggttatcacgctgtgggatgatggttccgcaatagcccttcgtaggtgtgttatactgctccggtcctacatcatgtccaccggagatgatcacaccatctaacttatttaagaattctttgatggattcctcatcacagtccttataaaccgggatcagtaccggaatcgcaccggctttttccagtatgtatacataatctcccgcaacaaagttccagtcctgtcccacgattcccataccggatgtcatacctacggtatcgcggtaatcatagttgcatgttacgccaatcaaaggtctcttcatattttgtataccctcctgtatatcagttctcttttttgtttttgctcattattattgccacgcctgtagttctgtgcatcgtcgtgtacacatagtatattctctcaagcattctttctgtcaatatctgtttttaacaaaaattatacaaaacctaaagtatactttacatttaataaaaattttataaaaaattcctcttgaagtcaagttgccttcatggactataatgcagacatcagcgatgcgaaagatcttttttcagaaatctttccatacgaaacttcagaaagcagacggagaacagcgaaagagatccgttcccttctgataaggaaacacaaaggaggatgtgtgtatgtttatttacaatgcagtgttggcttacaacgcatggatctggggtattccgatcctcatcatcttaatcggcggtggtctttacctttccttcgtaacaggattcgtacaggttcgtcacttcccggatgtgctcaaatcaacagtcggcggaatgttcaacaaagaggaaatgaaagaggagaccggtaagcatcacggtacaatctcaagtttccaggcagtatccgcagccctcgcggccgttcttggtaccggcaacatcgtcggtgtcggaaccgctatcgcagcaggtggtcctggcgctatcttctggatgtggatcgttggtttcgtggcaatggcattaaagtattcggaggcatgcgtttccatcgcagtccgtgaaaagaaaccggaaggcggctacaaaggcggcgccaactactacctttccaaaatcaacaaaccgttaggttttgcatggtccatcgcaatgatctatggtctgatcaccgcagccggtgtacataccggttctgttgtcacagcttgtgagagccttggcatcccgcgtctcgttgctactatcgtcgtttgtatcatcatcgccctgatcatcttcggtggtattcaggcactcgttcagatcacagagcgtctcgttccgttcatggcagcgatctacattatcgctggtcttgcagttgtagtattaaatatcggtaacctcattccggcaatcgtaagcatctttaagggtgccttcacaggtactgcagcaatcggcggcttcgcaggtgcaacgatctccgcagcgatccgcaacggctgtgcacgtggtgtttactcttccgacgccggtaacggacagtcctccatcgcatactcccagtcctccgagacagacccggttaaacagggtatgtggggtatcttcgaagtattcttcgatacgatcgttgtttgtacattcacagccctcgttatcctctgcacaggtgtttggcagacaggcgaagcaggttccacacttgcgatcacagccttcacttccgcattaggcggtgttggtaaggttatcgcatccatcggtcttatgatgttcgcaggttccacagtacttgcattctgtaccttcatcggtcttacctgtgagaacgtattcggcaagacaggccgttggatcggtcagatcggcttcgttatcctcgcatttgttggtggtatggtcggcgttgatatcctcctcggatgggctgacttcggtaactccttaacattaacattaaacattatcggtcttctttgcttcagcaaaaagattgcacagtggaccagaaactacttcgagaaaggaaactctttcgcagaataattgccggatctcctgttaccccctcggatgtggcagctttcctcactggctgtcatcggcaatttaccaatattacatctttttctcataccatgttacaaaaaggcggacaggtttcatctcctgcccgccttttttaccttgaaccgaaatgattttactaattgtcacttcagttctccggactgaaaaattccgttttttcatagccagacaatcggttccggattataatagttccgatcatccgtaaactacccgttcaatcttcatgcattaaggagattccatatggaaaaaattgttacaatcaccatgatggttttcatggtattaggcgctctggaccgggcggtattcagaaaccggttcgggcttggaaatgaatttgtaaagggattaaacagcgtcggtcccctgatcctcggtatggcggggatcatgtgcagcgcccctgtggtcggccgactgcttttaaagctcgtgacaccgcttttcagcacaatcggcgcagacccctccatcattgccggaacctgcttcggtcttgatatgggaggctattacatgacagcgtccatgacagacgatcccgcagcgatcatgctgggcggagtcattttgagtactgttctcggcgctaccatcgccttcacgattcctgtggcattgacactctgccgccctgaggacgcccccgccgtctccagaggaatcgtcttcgggatcatctccattcccttcggtactatcgcggcagccatgttttcaggtcttacgctgcgctacaccctgatcaacgcagctcccgcttttgttctggctgctctccttgcgggtggaatgattttctttcctcaaaagaccctgatcatcttccgcgcctttggaaacctcttacaggcctttatcattctggcgctcgcggccgcaggtgttgaggcaacgctggggatcaccgtgatccccgggatggatcctctggctgaccagctggagatcatctccatgatcggaatcactcttgcgggcgcttatccctttgtacatgtgctctcaaggatcctctcaccggtcctcaatatgatcgcaaggctcatgggcgtaaacggtccttccgtcaccggaatgttagcctgcttggctaacccgcttccgatgtacgacatgatcgccctgatggacgaacgaggaaaggttctggcaatggctttctgtacctgtgcaaacgccatgatcggcgaccactttgcattcatttccatcgcgtatccggagggaaccgcagccatgtttgttgtaaagatcgtcagcgccgcagttgcgctttttattgcagcgctggctacgaaaaagggcggtaaaacgtgatctatgcgttttgccgctttttttaccccaaaattgtgagaagctttttgaaaatcaggatatctcactgtcagaaaggcagaaaagatgtgtcttgcttttggtcagatggaaagaaataccaatattgaaaattgctgaaaaatagatacaatagataaaatgcactgaaaatactgaagtgtgagtaaaagaacaaagatacatttgactgatacagagttgaattgttataatgatgtagtgcgtgttggataaaatagaaaaaatgtaagaaatgataaaaaaataattgagtgaaaggagaaaaaacatgagactgacggatatcaaagaatatcttaacacattgctggcatcgttctcgtctgtactgaatctggaacttacgatcctgcagacggatccgttggagagagtcgcggctacgggttcatggtacactaaggatgtggtctgttatgaacatggaagactggttccggcgtggcagaacagctatacggttcgcgtcatcgaaacagggaaacctgttgtggcacttgatacgaaggcgtatgtgtattcgcatccgaagatgtatcagactgtagaaggacaatattattcagtccttgcatatccgatctacctgcgggatcatctggaaggtgtccttgtcatcgcttcttttgataagactcagcaccagatcattatggaaaaacaggaacaactcatggtctacctggaaaaaatcgcaggtcttatcaccagtaagctggaacaggaaactcttttggagaagaccaatatcatcaacaaccagatgagttccgtcatagaggcgatggacgacggaatcatcctgtattctccggaggagggaatcaaacagtgcaacatgtacgcggagaaatatctccactttaatgatccggagctgaaggatgcgctgctctcaaaggtattgaacgttgcaactgagacaaatgagggcaggccgttccagatccgcgagatctcggaggagattgacggcttccagtaccttctccaggtgaagacaaaattcatcgaaaacagcaacggcagcgtcctgtgtgtgatcaatccgttctcacagatccagaacagtatcacccagaatgaggagatgggaaccggagtggcgggaaaactcgtgttttcgggggagaagatgagaaaaatcgtcagccaggcgaagatcgcggcgcagcacgcctcaaatgttctgatcacgggagagagcggaaccggtaaggagatgtttgcccgtctgatccacacgtcgagtccccggagtgccaagcccttcgttgcggtaaactgcgcggcgatcccggagtccctgatggaaagtgaactcttcggatacgaggaaggcgcattcaccggcgcgagaaaaggcggaaagatcggtaagatccagctggcgaaccatggaaccttctttttagatgaggtcggagacatgccgctctatcttcaggcgaagcttcttcgtgtcctaaatgataaaaaggtggaacgaatcggaaacagctccacatccctcatcaatgtggatgtacgcatcattgcggccacaaaccagaacctggaggagatgatcgagaggaaggagttcagggaagatctctactaccgtctgaatgtagtgcctctaaggcttccgccactgcgggagcgtccggatgacatcccgtttctgatccagcactttatcaataaatacaataagatcctgggaaaagaaatccggtccgtgtcggcttctgtgatggaacttatgatggaataccagtggccgggaaatgtaagagagctggaaaattgtattgagtatatgatgacgttcgaaaagactcaggttctttccttggaggtcatgcctcaaaagattctgagtctcaaaaatgagactactctaaatgctgcctcacatattgtttcgaaaatggatgagacagaggataggcctttaaaaataaggcttcaggagaaggagcgggagatcttaaagtcgatggcggccaggtacggtggccatccgacaaaggagcaggtgaaggaaatctgcaggattctggatatcagtgtggcctcttattatcgaaaaatcgtggattgacagcgacttttgacaaaaagtctcaaatgtaagacttgagacagctgtagtctcatatttgagaccaaaaggcagagagaagtatgtatgaaaaggtatgaaatgtaaaaaatcagcacctaattggtaaaaatatacaataacagaaacaaatactgtacaacatatacaaataacggagctttttaggagtttggcacgatggttgctcattaataggtcaacaacaaataaattaaattcctgaaaggagaatgtattatggagtacaagttaagagatatgtcatggagtgagttcgcagagagaagcaaaacagcgaagacgatcatccttccgtccggtgcatgtgaggtttatggcccgcacaacccgttaggagcagatatcctcgtggctaagaaaatgtccgagatgcttgctgaacgtgtaaacggaattgttggtccgtgtctggaagttggacagtccaagagcttaacttccttcccgggaacgattgccatctccgctgagacattaaaggctgtatacagtgagatcatcgctgaattcgtccgcctcggattcaagagcttcttcatcgtaaacaaccaccttcataacacacagccgttaaacgaggttcttgaggatgcaagaatcaaatatggcatcaagtacgcccaggttggtgtatggcagtacctgccggcagtttctgataagaccggaatgtgggatacgccggctccgcatgcgcatgcaagtgaagcacagacatccgttctgatgtacttatatccggagttagtagatatgtccaaagctccgaactctccgaacaaatatccggacaagtggccagcaattatgaagagcgttccgtatgcagatatgacagacacaggtacacttggaaatgcacaggttgcaaccgttgaaaaaggtaagaaggcagttgaacttatgcttgatgagatggaagactgcgttaagaattaccttgaaaaatagttgatcaggaatttaacaaatacttccgggactctgtataggggaaaaggtacggagtccccggatttcacgaaaaggaaaaggagagcaggtatgaagagattactttctttggcaatggcagcagcaatggtaacaagtctttgcgcatgtggcggtggttccacaacaacagcgacaacagcagcagccgggaattccggtacaacagaatctggtgcgacagcagcagccgggaattccggtacaacagaatctggtgcgacagcagcgacagatggcaagaattatgataacgttacattaaaacttagctatgctaccggtgatacaggcatggatggacttacagcaatcgagtttgagcgtctggtagaggaaaagagcggtggaaaagtacagatcaaccgtttcccgaactgtcagttaagcggcggtgatatggttcgtcatgttgagatgatgatctccggcggcgcattcgaactcgcaattatctccgaaaactccttctccgacgtggatcagaccttccaggtaacttccatcccgttcgcattcaaaaattatgacgaggcatgggagaaagcagactccacaggcggagagttcgctaaaaacttattcgataaatacggcgttgtttatctgagcacattcccgaacggcatcatgcagttcgcaaacaacaagagagaactccacacaccggcagacatgaagaacttaaagatgcgtacatacggcgatcttcagatgtccttgatgcgttccctcggtgcagacccgacacagctttcctggtccgagctttattccgcacttcagacaggcgctgttgacggaaacatgaacggataccagacattatactccggttcccttcacgaggttcagccgtacatcacagaagtaaacgtaacacttgcactttatgacttccttgcaaacaaggcatcctgggaaaaattaagcccggatacacaggaactccttcaggaatgcgctacagaggctgctcagtggggacgtgactacatgtccaagacagaggctgaagttaagcagactatgatcgactacggcgtaaaagtttacgttccgacagatgaagagttacaggcattcaaagacggtgcagctccgacaatcgaagagtacaaaggtatcgttggcgaagaagcatgcaaggcatggggaatcgagtaataaagatttttatctgttgaatctttcatcttaagaagaatggagaaactctatgaagaaacataatgtgaatgttgagtcagtagtggttgcatttgtaatgctgaccatgctggtgctggtattcgtaggggttatatccagatatgtacttcacttttccttttcctttaccgaagagctggtttgcgcgatgttcgtcctcctgtctacgatgggaggcgcgcttgccagcaaggaaaacggtcactacacactggatctgatcaccggaatgatgaaaccgaaaatgaaaaaagtgtttctgttaatcgacacagctctcacatgtctggcagcaggaatcctgctctggacaggaatcggaatggttcagagccagatgaagatcggaagcctttctatagctttaaaaatcccgaactgggtatatggttctttcgtaccacttggacttgtcttcatcatcttcagaagcgttcagttcatgattagaactatcaaaacaaaagcagaggagggggacaaatgacagcgatcgtaatgcttggtgtattttccatctgcgtactgatcggcgccccgatcggaactgcgatgtgcctttccagtgtatctgcactgatcacctccaacatgggactttccatggttccattcaactattatgcatccatcagtaagttcctgcttttagcgatcccgttcttcatcttagcaggaaatattatggaaaaagctggtatttccacaaagcttatcaaatttgcccagtccttcgtagggcatatcaatggcggacttgctttagtatgtgtacttgtagcatgtttcttcgctgcgatttccggatccggtcctgcaaccgtagcagctcttgggggaatcatcattccggctatgacttccgtaggatataccaaaggagacgcatccgctcttatggcaactgccggcggaatcggaatcattattcccccgtcgatctcctttgttgtatatagctccatcgcaaatgtatctgtaggtaccctgttcatggcaggtatcattcccggtctcttaatgggcttcgcacttttcgcagcctccatgtgggtaacaagaaaagcgaaactcgacagaatgccgaaagcaactgctggtgagagaatcgcagcgttcaaagatgctttctgggggcttatgatgccggtcatcattcttggcggtatttacggcggcatctttacaccaacagaggcagcagccgttgcagcaatctatggtttattcgtaggtatctttatctacagaaccttaaagtggagagaacttctcgcgatcgttgttgactccggcaagcagacaggtgctgttatgtggacagtcggcaatgcagcccttatgagctgggttctttctgtatctggtatctccggtgcgttatccaactttgttgttgcgatctccggcggacataccgtaatcttcttaatcgttgttaatatcgtaatcctgatcgcaggatgcttcatcgatggaaactctatcatgtacatctttgttccgatcttccttccggttgctcttcagttaggatacagcccgatcgttctcggtgttgtcctcgttatgaacgttgcgatcggtatggttacaccgccggttggctgtaacttatacgttgcctgcggcgtatcgggaattcaggtcaaagagattatcaaaccggttgttccgtacatcgttgcaagctgtattaccctgttactggttacatatattccgcagattacgctgcttcttccacagattctcggacagatttaagatttgtgaggtaatgttatgaaaagtaaattcgtattagcccagttagagcagaaaggtcttccggaggaaaaccttgaaaacgcaaagaaagcagttgcagaggcaatggaactctataagccggatcttatggtatttccggaatgctttatgagtcatttcccgatgggaactgaccgtgcaacctgccttggaaccgcacagacactggatggtccgtttgtgactggcatgaaggctcttgcgaaagataatgggatctggatcatcttcggtatgaatgagaaagtggaagatccgtcagatgaccgcaattataactgtacagttgtgatcaacagcgatggtgagatcgtgtccacttaccataagacacatctttatgacgcgtttggctacaaagagtccgatgataataaaccgggagatcacttctttgagccgatcgatactccgttcggaaaaattggtctcttcgtctgctacgaagtccgtttcccggaagttgcgcgttatcagcgttccaagggagctgatattatcatcatgccgacagcatgggtaccgggaccgttaaagagcccgcagttccgtaccctgatctctgcaagagcgatcgaaaacactgtatacatggtagcttgtgaccaggttggtgcaaatgccatgggcgagagtgttgtcgtagatccgatgggtgttgttgtggcaagcgccggagaagtcgagacactgatctgtgctgagatcgatacggaccgagttgagaaagttcgtgcaaaacttccggcatataaagaccgcagaccggaactttacaccatatagaaaattcagggaagacatttgcttccactgagatacgtaagacaggatgactgcggtattccctcctcagccgcagaaaaatataattacactacttacatttgatacctcttgtaagaaaaggtgcttctgaccgtgcagaggcaccttttcttcataatatcctggaaaggagaatcatattatgaacgaattattaaaaatgacagcacatcaggtaaaagaaggaaaattcgataaggcgatcctcgcaatcggttcctgtgaagctcatggccagcatctggcagagggatgtgatacgatcgtttcctatgagctcagtaaacaggtcgcagaccgtgttccgggaatgctggtactgccgccgatcacagtcggatacagcggacattatgacacgtttccatttacgctgacctttgattatgagacgatgatccatgtgatctatgatatcgtggaatctgtgttgagaaatgggatcaacaagatttttctcatgaacggacatgatggaaacattgcaccgatcgagattgctgcgagaaagatcaaggagaaatatccggatgcaagaattgcatcgctgccggaatggtgggttatcgccggaaagcttgtaccggagggaaccttcgaggtatggaatggtctgggacatgcgggagagggagaaccttcgatcgcatatcacctgttcccacagtggtgtgagccggatcaggcgacatgtgttgtgccggatcatttgccggagcatgtggatatcaagtgggattttgcagagatcacggatactgctcagactggtgatgcgaccgtggcaacagcagagaaaggcaagcttatgaatgactgtcttgtggaagccgtcgtgaaagatattgaggcgcttgaaaagactggatggaattacaatacgagtcactgtgcgacaaagttaaaatgacaggaggaatgttttacagatacgttctcaaatatgataaaaaccgctgatggaattctcaaatatgataaaattcaagaagatccatgatatgaaatgtcgaaaaaacaagtaaaatcaaggaatttctcttttggcacgatcgttgctctatataaggtcatcaagaaaacgttgagaaacgaaaggagaaaaactatggaaagaaagttaagaaacatgtcatggacggattttgaggaactgagaaagacagcgaaaacgatcattcttccatcaggagcatgtgaggtttacggaccgcagaatccgcttggcgctgatattcttgtggcgaagaaactgtcagagatgctggcggagagagtcaatggaatcgttgctccgtgcctggaagtgggacagtcaaaatcacttacaacattcccgggaacgatcgcgatcagcgcgaacactctgaaagcagtttactcagaaattattgatgaatttgttcgtcttggatttacgcgtttcttcatcgtgaacaatcacctgcacaacacacagccgttgactgaggtgctggaagatgccagaatcgcacatgggatcaaatatggacaggttggtgtatggcagtatcttccggtcgtaacagacaagcttggaatctgggagacggaaaaaccgcatgcacacgcatcagaagctcagacgtcggttcttcttcatctttatccggagcttgttcatatggaaaaagcagtaaatacgccgatcaaaccggacagatggccgggaatcacaaaatcgatcctttacagtgagcagacagattcaggacttctgggagacggaacggttgcaactgcggaaaaaggaaaaatcgcagtggatacagcattggatgcaatggaagactttattaagaactatctggaaaaagaataagaggctcaaccggtatttccggtaacgggcatatcgactgtgaactgtgaacatctctgcgcatctatggggcagatgcgcagagatcccgtttcattactatactattagggggtacaatatatggaatggacattaacagatgtattggttgattttgcaatggtcagtgtacttttaatgattgccgcctggcttcgccgtaaaattccatttttgcagcgatattatatcccggcagcattgattgcaggacttcttggcatggtactgggaccgcaggttcttggaaaggtatcaccgatctatctgaattattcaccggcgatcaaacagtgggcaggtgttttatcagcgatcgtattctcatgttctttccttggtctcaaacttgagaaagttacaggaagtgcacttcagacatattttctggccggatcgatccaccaggcgcaggttatcatcggattgtctcttacatttctcgtgatgcttgttgtcggcggtgatctgaaatttggctttggcctgctcccggtgcttggtttttacggcggacacagcatggcgatcgccggaggcgttgttctggaagatgccggttacatggcaggagcttctgatgtcggcgcgacattcggaacgatcggtatgctctgcggtatcatttggggaatgatcatcatcaacaaagccgcagagagcggaaagacaacgatcaagatgaaacgtgaagagcttccgaagagcatgcttaccggttactatccgccgtcagagcgttccagcgtcggaaatgcagtcactgcttctgcaacactcgatccgcttgcatctcagcttatgatggttggacttatggtattctgtggatatattctcagaacagtactcatgaagatcaatccgttctttaaaaatcttccgctgtttgcatgctgcctgatcttcagcgcgatctttgcgatctgtacacagaaaaatgaaaagatcaacaatctgatcgacagacagctggttgtacgtatctctggtacagctcttgaatacatgatcgtagctgcactggcaactacaagccttgaagtgtttgcttcctacggcgtagcactcgttgttgtcagcgttggtgttgcaatcggtacctatgtatttgcatttattgttggtcagtacattcttccgaaaaacggtcgttttgagacagaacttggtttgtttggacagtgctgcggcgttcttgcgacaggacttcttctcttaaaggttgttgatccggatttcaagacgaatgcggcgacgaatattacatcatcaagtacacttggatatacttatcagctgcagtacaccctggtattcatggcattagtcatgacaaaaccattatttgtctatatttggagctggggacttctgatcctgcttcttggacttggtatttttttcggaaagagaatgagggccagaggagaatgatagctgcctgatctacatgcggagtaggactgtatcatgaaaacaaaaggaatattattaacaattttatcagcggtcttatttggattcaatccactgctgtcaaaacagatttacgcgcttggcggaaattctgtcacgttatcttttttcagaatgctgataacggcgctggccttctggatccttaatgtgatctggctccatgaggatttcagggttgacggcagggaattcagaaaattgtttttctgtgctcagggatattgcctgactccgtatcttctgtggagttcatacaattatctgccttccggacttgcaacaacgatccattttgtgtatcctgttcttgtgcttctcgggagtattatattttaccatgaaggtcttaccggaaaaaaagtggtcagctgcatattctgtgtggcagggatcatctgtctctgccacatggacggttccatcagcatgacaggattcctgatcgcattcgcatccggagttacctatacgtcatatattttacttctggatcactgcggtctggtgaatatccatccatataagctgagcttttggctttctgcgataggagcagtcgagcttttgatcatatcggttctcacccgcaattttacgctggatatcgcaccagttggatggttcctcacagtgatctttgcattgctggccggggcagtcgcatcgactgctttccagcttggaacaaaatatattggtgctcagagcgcatcgatgctctccacatttgaaccgctgacgagtgttctgatcggaattctcgtatatcatgaagttatgacgggacggacagcagtcggaattgctgccatccttctgtcagtcattattgtttcatctccggatcgaaagtccggtcgaaaggagtaagcccatgcaaagtacatttgttttagcgcagctggaagcacttccgcttccagaagataatctgaaaaaagccgcagcagcggtagaaaaagccgtgaagctgtatcatccggattttatggtatttccggaagtatttatgagccattatccggcgggaactgaccgctctgtgatcctgggtgttggagagccgttagatggaccatttgtaaaaggaatgcagaaacttgcgaaggaaaaccagatctggatggttttcggaatgcgtgaaaaggttgaggatgatgcggatgaccgaaattacaatacgacggtcatgctgaacagccagggtgagatcgttcagtcctatcgcaaaacccatctttacgatgcatttggatacaaggaatcaacgaatatcaagccgggaacaagcttttttgagccggtggagactccatttggaaagattggtctgtttgtctgctacgaagttcgttttcctgaggtggccagagatcaggtgtcaaaaggtgctgatattctgatcatgccgacggcgtgggtgaaaggtgatttaaagagccatcatttcagaacgctgatcacagcgcgtgcgatcgaaaatactgtgttcatgcttgcatgtgaccagtgtggtccaacttatctcggagagagcgttgcggttgacccgatgggtgttccgatctcctgcggaaatgagagggaagatctgatcccggttcatatcgacactgatcggatcgcggaagtgcggaagaaacttccttcctttaaagacaggaagccggaaatgtatcatgtataagtgaaaaatcatggaagaccggaattttccggtctttctttgtttctggatatgatataattatccttaacaggttttagaaaaatcatacgatgttaagaaaaacgggatacaggacttccagagtttatgaggtgggaataaaatatgagtctgatagaaatgaaagagtatctgtcaaaacttctggagaatttctcggttgtgatcgatctggaaatgacgattttaaatatcgatccatttgagcggattgcctggaccggagacttttttcagccggaaagttacaagaaaaatgaagcgatcgatgaaaaatggaaaagaagctatacaaaccaggtgatacaatctggaaagacggtgatcgcgatcgacacgagcgaatatgttgcttcgaacgtacgcctgcgcagttatgaaggcagtcaatattattctctgatcgctgcaccggtctatattgacgggaacatggaggctgtgatcgtgcttgcttcgttcacagaaaaccagcaaagaatcctgatcgagaagaaagagcaattgcttcgctatattgaaaaccttacggatctgattgccagcaagtataaagaaaaagatcttctggagcgcacgatgttgacaaaaaacagactaaatgctgtgatcgatacgatgcaggaggggatcattctctattcaaaggagcaggggatccttcacatcaacagctgtgcgaagacataccttcattatggtgatgacgaagttcagccggtacttttgcaggagctgttagctttgtcagatcacttttcagagaaagaccggtcacagatcacagagatccataaaatgatcggtgaagttcagttctctcttcaggtgcagatatattcgatcaatcagtctctggataatattctgtttattttcagtccgttttcaaagatacaaaatgatcttactcagaacacaccggatgtagcaatcgagaggcagatcattttttccagctgtaaaatgcgaaaaacgatcgatcaggcagaaatcgttgcagataattctgtgagtgtactgatcaccggagagagcggtacaggaaaagaattgatcgcaagaatgatccatgcgcatggagtacggagaaagcatccgtttatttcggtcaactgtgcagcaatcccggatacacttctggaaagtgaattgtttggctatgaagacggcgcatttaccggagcaaaaagaggcggaaagatcggaaaatttttgttggcaaatcatggaactttattcctggatgagattggagaaatgccgctataccttcaggcaaagctcctcagggttctgagtgaacatcagatcgaccgtgttggcggagaagcaccgatcgatgtagatgtgcggatcatagccgctaccaatagaaatctggaggaaatgattcaaacaaaagaattcagagcggatctgtattatcgtttaaatgttgtgccgatccatattcctccgctccgggaaagaaaagaagatatttttgttttgtgcaaatattttatcgaaaagtacaacaagatcctgaacaagaaagtgcggcggatttctgatgaagctttggcagttatgagagcatataactggccaggaaatgtgcgtgagctggaaaattgcatcgaatatatgatgacgtttgaaaagggttccattctttcggatgataatatgccttctaaaatgaaaattccggaggaacgtcatatatttgctccgggaatcaacatttatcgtccacttcgtgaaaatgttgagttattggaatcagagatcattacccgattaggtgcagaatataagaatctgccgctccgtgaccaggtacgtgagatctgtaagattctggatatcagtcaggcttcgtattatcggaaaaagggagaataaatgatattcaaaaaataaaagcagaatgttcatacactcaaaaagtgtgtcggacattctgcttttttcattgccatacttccataaagagctacggcaccaagacctttatccttggggcattccaggataggagatcttatttccccgccgccatcttcgcaaattccgtattcacaagatcttcatacggaacgcgggtatcgagttccccggcttcctccaggatattttcaaggagctcaaagctttctttctcgaaaatcgtgttctctttccaagtatcctgttctttgtaacggtcgacgatgatcgcgatcttttgcgtgtcagtctccttaaactgcggtcggatcgtctctgcgatctcttcagcggagtgggtgttcacataatcgagaccgcgctggatcgcgtttgtgaatttctggatgagctccggatttttttcgagatagctcttttttgcgctgtaggcggtgtagggaacgtagccggagtcttttccgagggaggcgacgacatagccgtttccctcctgctccagggcggtcgcgaatggctcaaactcgaccgtgtaatcggcgctgttgtttgtgaaggctgctgccgtgagaccgaaactgatgctctggtcgatggaaagatcggttttcgggtcgatcccgtttttcttcaggatatattcaaacaccatctccggcatgccgccggcccggccgccgaggaccttctttccgacgagatcttcccatttgaaatccgcttccggtgtgcgtccgaccagaaagtttccggcgcgctgggtgagctgggcgaagtttacggcataatcctcatcgccctggatataagtatagatgctggcttccgaacccatgaatccgatgtcggcatcgccggataccagagccgtcatgactttgtccgccccggcaccgtttaccagagtgagctcgatgccttcgtcctcaaaatagccgagctcgatggcggcatactggggcgcgtagaagatggagtgggcgacttcgtttaatgtgacgggtgtgagggaagaatccgcagcatgaccgcagccggagagaagcgcagcggcggtaactgcgagaattgtcgggatcatgatctttttcataacaggagatgacctctctttgcgattgacatatataggtagagtatgcggagatgggaacatacgtgaagaaagtacgggaaaataaagattgttgcaggcggctgcgcatgcttggggagtgcgtcaagcactggtggggtgacgtggagcggttctacagcaaatcaatataagtaaaacctatagcaagcattgagcacttccaattagacaggatttccaatttatggtaagattaccttgcaaccagataggaaaagttggttgataaaaacgaaaacttttacgggaatgcatcataaaaacagacatcccggtccgagataagaggaggaaaatactatggcaaagaagacaagagcagagagacatttcaaatttgagacattacagcttcatgtaggacaggaacagccggatccggtgacagatgcgagagcagtccctatctaccagacttcttcctatgtatttaaaaactgcgaacatgcagcagcacgtttcggacttaccgatgccggaaacatctacggaagactgacaaacccgaccgaggatgtatttgaaaagagaatcgcagcacttgagggcggcgttgcagcacttgcagttgcatccggtgcagcggcagcaacatatgtatttgaaaaccttgcacatgcaggcgaccacatcgttgcagcaaagaacatctacggaggaacctacaacctcctcgcacacacacttccggagtacggtgtgacagcaaccttcgttgatccgttcaactacgaggaagttgagaatgcgatccaggagaacacaaaagcgatccatgttgagacacttggaaacccgaactccgatgttgtcgatatcgagaagctcgcatccatcgctcatgcacataagatcccgctcgtagtggataacacattcgcgactccgtaccttgtaagaccgatcgagtacggcgcagacatcgtattccattccgcaacaaaattcatcggaggtcacggaaccacgatcggcggcgtgatcatcgacagcggaaactttgactgggaagcaagcggaaagtttccatccttagttgagccgaacccgagctaccatggcgtaagcttcgtaaaggcagcaggaagagcagcatttgttacaaagatccgtgcgatcttacttcgtgatacaggcgcaacgatctccccgttccacgcattcatcttcttacagggacttgagacactgtctctccgtgtagagcgccatgtacagaacgcattaaaagtcgttgagtacttaaacaaccacccgctcgtagaaaaagtaaaccatccgtccgtatccgatgatccggagcagcagagactttacaagaaatatttcccgaacggcggcggctccatctttaccttcgagatcaaaggcggtgcagaggctgcgaagaagttcattgataacctggaactcttctccttactcgcaaacgttgccgatgtaaaatcccttgtcatccatccggcatccacaacccactcccagttaaacgatgaggagcttgcagatcagggcatcaagcagaacacgatccgtctctccatcggtactgagaacatcgacgatatcatcgaggatctcgacgaggcatttaagacattacaggaataatccactgcttttacagaatggtacgggacgatgaatgcctggcaggaatcgtcccggagatcataagatccttgcaaaatactcccaatatgatattccccctcaataagtgaacgaaaaacagcagccagtgcgcaaaaaaagtgcatgtggctgctgttttgctgtggctgtataactgcaggaaaacgctggtggcaggcttatgcaaaacataagggggaacgcaggagatataagatgaaaagatgatctgtgagtgtatttctgatgggtgagagtagctgtctactgtaactgatcgaagaaaaaatagcttcgcagcagttatttcggaaggaactagctacgaagcttatatcatttggtattatgaggtggaagacctgaccgataccggcactgccaatcttatgatttgcatggccccttcacactgtttaagatctcctccgctgccagtctgtgtttctcctccagctcatgtttctggtccaggatcgtctggatcgtgatgccgtccaggtagtccatgatgacgcggtttaaaccttcccagaccgggagcgtgtcgcaggcggagcagcgctcgcagggattcggggtgtgctcgagacaggagaccggggcgagactgccctctgtggtctctaagatctcaccgaccgtacattccgacggagctttcgcgagacgatatccgccctggtatccgcgggtagtggagagcattccggtcttatttaagagcgggacgatctgctccagatatttttttgagagaccctggcgggcggcgatatcctttaaggaaataaacccatcctcggtgtgttctgccaggtcgatgaccatgcggagcgcataacggccttttgtagatattttcataattgcttcaccaatttaaacaacagcctggcatgggaaaagacagccgggcgttgaactttctgtaatattttatctcagtcagatcagacttccacctcgtttaggtgacaaacaacgcaaatcggaactggttccgattatactacaaaaaagatgggcgttcaactaaggttttggctttttctcgtggttgccagaaaaatacacatgtgataaaataaaaaagagtttccggcagagaacggaaaccgccaatagaggtcctttggaaaaaggaccagattgctgcgaaaacagaatatcagcggtggccctgaaaatgaaaagccaacaagttggttgagatgaaatcaggatcgctgcagaaatagtgagtcagaaagaaaggaaccagaaaagttatgaaaaagctggaagattatgttgtaagcattccggatttcccggagccgggaattattttccgcgatatcacctcgatcttacaggatccggatggatttaagctggcgatcgattctctccttgcgatggtgaaggacgtggatttcgatgtggttgtcggcgcggagtccagaggatttatttttggaacaccggttgcgtatgagatgggaaaatcctttgtcccggcgagaaaaccgggtaagcttccgagagagactgtttctatggagtatgccttagagtacggcaccggaacgatcgagcttcataaagattccatcaaaccgggtcagaaggtcgtgatcatcgatgatctgatcgcaaccggcggaactgtggaggcgatcgcaaagctcgtggaggaactcggcggcgaggtcgttaagatctgttttgtgatggagcttgcgggattaaaaggaagagagaaacttcagaaatatgatgtggattccgcgatcatttacgagggtaagtaataaggaaaccaggtccatgcaaatgatggtcgctggatgatacacaccttcgcagaacggttatttgaactgcagaatggattttcgttgggataggttactcagcatcttaaagagatgggagtcatgtctgactaagaaaaaagattatatgccgccagagaacgcgacaaaagcgggctggcggcatctgtttttctgtcagaagagcgtatcggaagaactgttgtatttatcaggaaaagaggataaaaatgagagagatcgtatttaaaatggagcgcccgggtctcgttgaggtcgggcaggaagtggatgtcagcgagtcggtcacaccggtcaatgtcaattacatgatcgagccggcggtggccatgtcggggctgtttcgcttcacggagcgtctgaagagcaaaaagggcatcgtgaaggatatcatccagaatgaccgcggatactatgtgacagtggagttcgacgagtagcggaatggtttgtttgacttatgcagcggagcgctgcggtttcctgtggaaaaacagcaaaagcaggaagtaagcggctgacaggatgaggatccggacggcggtgcggaaaaattccggaaaaccggacgggatcgggaagtcttccgggaacaggcggaagatccagagcgcgcatagcaggcagaataccggtttcccgatcagaatccatgcgttccattcaaacgcagtgatccttcggagtgccaggatatggagcagggcgaggagaacctcgcttgctaacatcccccagagacaggaacggatcccgaacaccgggatcccgaaccacacgaaagcgatgcggacgaggagcgagaccaggtgatggaaaaatgtgagcttcgtccttccgaggccatttaaaatgctgccggacgaggtggcaagatagagaaacgggcagagccaggcgaggatctgaatgaaagatccggcgtcctggcttttaaatatctgcagccccagagtttcgccgaagaccgtgaataccccgatgcagaagatcccgaggtagaggctgtagcggaaggacatggagatcccgtccgcgatgccggaggtgtttccggcagactggtgtctggcggttgacggcagcaggaccacagccagagagtttacgagggcagagggaaagaggacaaacggcattgccatgccggtgagagtcccatatgtactgacagcctgggaccttgtgaggccgtagacagtgagccgctccgggatcatgatcgtctcggcactctgtaagaggttcaggatcagccggttggccatgagcgggacggcgagagcgaggagagcactcatgggagacaagaaatctaggagtcccggaatatctgcggtactttgaaatttatgaggtttgtgcgcggcatgatcggagaaatttgctgaattatttccatgaaattcatgaaaaagaagaaaaaatatcaggacaaacaaagcagatccggcctctccggccaccaggccgaataccgcgagcgacaccgtgatcggaatcttcttctcgatccagatggatgccaggagaaagaccgtaaagatccggatcatctgttcaaagagctgggcggctgcagggacagacaccttttcctttccgtagtagtagccgcagatacaggcatggacggaagtgcaggggattgcaaaggccatgacggagagcagcggggcgcaccgcggttccatgaggacagatcccgcgagaaatccggaaaaatgtcggatcataagggccgcggagagtgacatggaaaaggaaaggagaaatccggaaacaagcgtccgcttcgcatgttccggctccgctgcgatgaaacgggagatcgcagtctggatcgagccggcgcacaaggagaaaaagatcccgtagaccggaaagatcatctgatagatcccgagaccttcggcgccgatcgtgcgggagagaaagatccggtagaaaaagccgaggacgcgggagaggagaccggcggctgtgagaagaattgtttcggtgatgagtggatggggcttatgggaagaaggcatggcagctccgaaatggcagaaggattcggttatatatatgtgggagaaggggaatgatatgaatccggtttatcgcagacggatgactgatatgaagactgaaatcatcacaaattctttaatacttagtgatttactgtgtatttctgaaaaaacatgagaataccggttgaaattcctgaggggtttcgtatataatgtaaaatatctgtggcctgtccgcgctttttgcggcgctgactcgcgggtcatggcataaactaatagtgttatcaggctttgaacctcttaaaacagaaaggcggaacaatgaagaaagtaatttatctcgataacgcggctacgacaaaggtacgtccggaagtcgtggaagccatgctgccgttttatacagaatattacggaaacccttctgcggtatatgagttttccacaccgtgtaaggaagcgctcgcaaaggcaagagagacggtcgcaaattctctcggcgcaaaggacaatgagatctactttacaaacggcggttccgagtccgacaactgggctttgatcgcaactgcggaggcatatgcatccaagggaaaacacatcatcacaacaaagatcgaacaccacgcgatccttcacacctgtgaatatcttgaaaagcgcggctacgagatcacatacctcccggtggatgagtacggcaccgtctccatcgacgagttaaagaaggcgatccgcccggatacgatcctgatctctgtaatgttcgcaaacaacgagatcggaacgatccagccgattaaagagatcggtgagatcgcccatgaaaacggaattatcttccacaccgacgcagttcaggcatactgccatgaaccgatcaatgtggatgagtaccatatcgacatgttaagcgccagcggacacaagttccacggaccgaagggagtcggcttcctctatatcagaaaaggcttaaagctccgctccttcatccacggtggcgcccaggagagaaaacgccgtgccggaactgagaatgtgccgggaatcgtgggtctcggaaaagcagtcgagattgcgatggcagagcttgagaataataagaagaaagagacagaactccgtgattacctgatcggacgtgtcatggacgagattccgtacacacgcttaaacggtcaccgcacaaaccgtctctccaacaacgcgaactttgcgttccagtttatcgaaggtgagtccttactcatcatgctcgatatggacgggatctgcggttccagcggatctgcatgtacatccggttccctggatccgtcccatgtgctgttagccatcggacttccgcacgagatcgcgcacggatccttacgccttaccttaagcgaggagacaacgaaggaagagatcgaccatactgtagactgccttaagaagatcgtggagaagcttcgcgcaatgtccccactctatgaggatttcattaagaagaacagaaagtaagaggaaaaataatgtattcagagaaagtaatggaccatttccagcacccgagaaacatgggagaaattgaggacgccagcggcgtaggtactgtcggaaacgcaaaatgcggcgatatcatgagaatctatctcgacattgatgacgagacacatatcatccgtgactgtaagtttaaaacattcggctgcggtgctgccgttgccacaagcagcatggcgaccgagatggtaatgggaaagacgatcgaggaagcgatggaagtaactaataaggcagttatggaagcacttgacggacttccgccggtaaaggttcactgctccctgcttgcagaggaagcgatccatgcagcactctgggattatgcagaaaagcaccatatcgagatcaaaggcttacagaagccggtgtccgatatcagtgagcatgaagaggacgaggaatattaatgaagaaaaaagtcgtggtaggaatgtccgggggcgtggattcatcggttgctgcctgccttttaaaggaacagggatacgacgtgatcggtgtcaccatgcagatctggcaggaggaggattcctgtacggttgaggaaaacggcggatgctgtgggctcagtgcggtggaggatgcaagacgcgtcgcatggacccttggaattccctactatgttatgaacttccggaaagaattccagaagaatgtgatcgattattttgtcgcggaatatctgcatggacggacaccgaatccgtgtattgcctgcaaccgctatgtaaaatgggaggcacttttggagcgcagtctggagatcggtgccgattatatcgcgaccggtcactatgcaaggatcagccagcttccgaacggccgttatacgatccggaactccgtgacggcggcgaaggatcagacttacgcgctctataacctgacccagttccagctttccaaaactttgatgccgatcggtgattacacgaaggacgaggtgcgaaagatcgccgaggaccgtggacttgccgtagcaaagaagaaggacagtatggagatctgcttcgttccggataatgattatgccggatttatcgagcgggaagccgaaagtgttccgggaagcggaaactttgtggataaaaatggtgtgatccttggaaaacataaggggatcactcattacacggtcggtcagagaaagggcttaaacctcgcgatgggccatccggtgtttgtcacaggaattcgcccggagacgaacgaggttgtgatcggcgaaggaaatgatgtattttccgatcatctgatctgcaaggatgtgaactggatggcgatcgacggacttcacggcggggaacgggaagttctcgcgaagatccgctacagccacaagggatctccgtgtatcatcagggaactcccggacggaaccgtggaatgccggtttaaagagccgcagcgtgcgatcacgccgggacaggcagttgtattttatgaaaatgaatgtgtagtcggagggggaacgatcctatgagcaggatgaaaaaggggaacggactcctccgattccttatttctgcggtcttttttgcactggtgctttccggctgcaatgggacgagaaaatatgaggcggtggatctgagcagcgagactgcggcagcggagtcagaaagcggatccggcgaggaacagggaacggaaaattccgatgaagctgatcttcaggcactgggcaatcctgccggggagatgatgagcgcagatcaggcggccgaaagctcgcaggatgcggaatcggtctccgaatcagaggagatggcttcggagatgtcggaggaggagagtgtcgcggcagcgagagagtcagcggcggaggcttatacagctgcggcgaacgatgacgcggagactgctccggaagttccgtttaacggacataccgtcgcgatcgatgcgggacaccaggcgaaagccaatacttccaaggagccgattggcccgtcctcttcgacgatgaaggcgaagatgccggaaggctcggttggaacggcgagcggcgtccctgaatatgaggtcactcttgcggtcgcaaaaaagcttgagacagagctcacaaaccgcggataccatgtcatcatgatccggacgagcaacgatgtgaacatgagcagcgcggagcggtccgtcgcagcaaatcagagcggcgcggatatcctgatccggcttcacgcggattccatggacaactctggtgtctatggggcattagcaacctgtatgacagcccagaacccttacaacgcgtctcttcatgacaagagctacaatctttccaaaaagatcgtggataccgtctgcgggacgacaggaacgaagaatcgaggcgtccaggagacggacagctcctccgatatcaactggtgcgagatcccggtctgtgtgctcgagatgggattcttaagcaatcctgacgaggacacatggcttcaggacgatggctaccggggaaagatcgcgagcggcatcgcgggagcggtggatgcgtattttgcggaggggaattaaaataaattttttaaatcctctatacaaatcgaaaaaaatatgtataataatatatagtctgctttttcaaaaagcagacaatccggagacgtagcgaagcggccgtaacgcggcgcactcgaaatgcgtttatcggttcatcccggtacgagggttcgaatccctccgtctccgctcgaaacccttgatttttcaggggtttttcttatttacgcgaataacgggtcaaagtccgcacttgcgcgagaccttggcgactgtcgcgataataaggggaaactcgcgaagcgtgttttcatttgtttaacagggaattttctgttaagcaaaagggcacgatgtgccaatgagatgcacttgtggaagaagaaaattggcgcaggcgatcgcgctcggcgtgaggaaaaggccgtccggtgaggacggctttttatgtatgaaatcgaccgtttgtcgaccagataggaaaatgttatgcttttcctggcagaacatctgccaatgtgtccgcatctatggtttggacggaattttgccacaaagtcttagatgtgtgacaacgaaaacgtaagaagttcttaataaaaaaagagggaaattgtagtatacttgtgaagacttaaagaaaactgtttgtagtcgttcagcatctttatagttacaacggtttcttgtgcagctttgaagatggaaaatatttaaaaaataaaacacgggcagagaagaaaggcggaatcagaatgtttcagaaaaaatttcgatatatggcagcagtccttgcggcactaatgatcacacagggcagttttaccacgtttgcggatgagatcggaccggggtatgatgagcagaataaggcatccacggataccagtgtaacggatcctgtaaatgcatggaaaaaggtaaatggtgtttatgtggataataatggaaaaacaatagagggagcgcttctccgcggtatcagtgttgcaaaatggcagggagatatcgactgggcgaaggttgcggcagatgatatatcattcgcttttattaagatgatgtcttacggatatgagggtggttacaccatggatccgaattatgagaaaaatatgaagggtgctttggacaacggagttcaggcagctccatatgtttatcttcagacgaaaactgtggaggaagcgaaggcggctgcaaaatatgctgtagaaaaagtatccggatacaatgtaaagtacccgatcgctgtggatgtagagtcaaaatatatcctggagctttcggttcaggagctcacggatgtggtaaacgcattctgtgatacgatcgttgcggcaggctacacaccgatcgtatacagcgactacagcaaatttacgaccgagatggacacaaagcagatccactatgatatctggcttgcgagatacggcgcggacggtacatatgagggtcgcacaatctggcagtgtacggataaggggcatgtaaacggaatcaacggaaatgtatgcctggaattcgcttacaaggattatgctccggtcactaagggaatcgcggtggataccggtgagtggaagaatgagagcggcaaatggtacttctaccgtgatggcggaagaatgagcggctgggtcaatccggatggatactggtattatctggatccgtctgagttaggtgctatggtgacaggcacgacgatgacaatcgatggcgtcagctatacgtttgatgcaaatggtatcatgcagtaaaacaggagcttccggggagcaggtggcagattagcatattttggatgctgacggtcaggaaaatggtacgttttctgcggaaatacgcagtgagcggataaaggtttcaggatagaataaaggataaaaaagaagaacggggacgcggtctcttgatgagatctgcgttcctgttcttctttttagatatacatgtagaaacaattcctgctaatggatcctacaggtgatttaacgagtgggaaaactggtacttacgatgattggtggaaaacgctgtttctattcctcccatggaagatccacgatcgtcggctcgtgatgaacagacgggagaaacttctctatgatatcggacgttttgagcttcatgcttgtggtgttgatacacggatggcagccgaaatattcgtcctttaagacgtcagaatcgatcagaagctttacatggttttccggatcattcatgagtcccatgatgctgacagatccgggagtcaggccgagatattccttcatatggtcatcatccgcaaaagaaagtctcgcggaaccgatctgtttggagagaaccttcgtcttgaatttcttatgtcccggcatcaggagaaggtagaacttcgtcttctgggcgttgcagagaaagaggttcttgcagatatggattcccaggacctcgtctgcgccggtgcaggcatcgatggtgaacgcggcctcatggtcaaagcgcatgtagggaatatttaaggagtccaggagatcgtaggtgcggatctctgtctcgattcgtccggtgacgtccttcgggcgtccggattcggcaacacgggtatttgattcattattcatgatttgttttccggcagtgtctggagtgtccagatgctgcgtcctttcttgaaaatgtgaggaacagttacaactgattttactgatgttttgtattctaagccggcaaaatctgcatgtttcatgcagtattttcagctcagaaaatgcccaactgtgtataacggccggaattgtccaagataaaaagtttcagtggaatatttcgggaaaaaacgctatactttatgtgttattataatcagccgcattacgggaatcaagcggaatgtttcagataagaatggagaaatatttattatgggatacatggaaaagaagtttaagggtgccggtgagaatggaaagaagaactggaagaaagagaacgctggcagaaacgggaataatggaagagatgtgaacggaaagaccgaaagaaatagcggaagaaaagaaacgcagaatttcgtcagcggtacagagaaaagaaactacggaaatcaggataaaagtgtagagaaaaagctgggatacattgatgaaaaattagaaaagaagtatggcggagcatggaatcatacaggagagaaaaacatgaacgctggtgataaaaagaaggctgtatccgcagcgaaacgccaggatgaccgcaaaacatcacatgttcagggaaaaaatgcatctgtccaggcagaagcaaaaacagagcggaaaaaatccctctgtccacatttcaagacctgtggcggctgtcagtatctggacatgccatatgagaagcagttagagcacaaaaagaaagaagtctccgatcttctccgcccgttctgcagggtcgaggagatcatcggcatggacgacccgttccattaccggaacaaggtccatgcagtcatggcccgcgacaggaaaggtcgtatcatctccggtgtatataaagagggaacccacacggttctcccggtggagacatgcctgatcgagaacaaaaaggcggacgagatcatcggaacgatccgtgaacttcttccctccttcaaaatgaaggtattcgatgaggataccggatacggcttcttgcgccatgtcctggtgcgcaccgcccatgccacaggggagatcatggtagtcctgatcaccgcatcaccggtgttcccgtcgaagaacaatttcgtgaaggcgctccgaaaggttcacccggagatcacgaccgtagtgcagaatgtgaatggacgtgacaccagcatggtccttggggaaaaggaacatgtgctctacggacctggatttatcgtcgatgtcctctgcggcaagaaattccggatctcctcgaaatccttttaccagatcaacccggttcagacggagaaactttacaacctggcgatcgaggcagcaggacttaccggaaaagagaccgttgttgacgcctactgcggaatcggaaccatcggaatcgtcgcagcgtctgccgcgaaggaagtcattggcgtcgagttaaacaaggatgccgtccgggatgccatcacaaacgcgaaggcaaacggcgagaaaaacatccgcttctacaacaacgatgccggaaaattcatggtccagatggcctcccagaatgcccacgccgacgtagttttcatggacccgccgagaagcggcagcaccgaagaattcatggatgctgtagcgattctgaacccggaccgcgtggtctatgtgtcctgcaatccagagacgctggcgagagatctggcgtattttaagaagaaagggtatagggcggagaaggcatgggctgtggaccagttcccggccaccagccatgtggagacggtagtactgctttcccacaaaaagccagacggacatatcaacgtaaaagttgagtttggcgagggtgagggaaaagttccgcttgataatatcgctaaaagagccgaagaatataagcccaaagaacgagtgacctacaaaatgataaaggagtacatagaagctaaatacggcttcaaggtacataccgcatatatcgcagaggtaaaaagagatttaggcttgccaatgtacgatgctcctaatgcggtagaggaattgaaacagccgaggaagcatccgacagcagagaaagtggaagccataaaggatgcgttgaagcattttgaagtgatttaatgaggataggcgtatcattagaaatagtggtacgcttatttttgtccctttttgcagatttgtcctttcccctgctttccaatataatgaagctaaagaagtggaggtgtgcttatgagagagaaatttaatcatctgtatttggatagccacgaaagaaaacttttgatacatagccttgtagagttaaaaaatcagctcatacagcaaggcagatatacggattgtattgacgagcttatttttaaggtcataaatgcaccgaccaagagaatgaaaattgaatatgtctaaggcaaattacgaagccgcttattcttattgattttaagagtaggcggcttttttgcgttctctggtactgtttacatagctaccttgacaaagtggctaaatctatgtgaaaggaggacgcatctatgtcaaattgcaaagtaattgctctgactaaccagaagggtggtgtcggaaaaacaaccacagcggtcaatttgggtgtaagtctggtgcagcagggtaaaaaagtcctgctgattgatgccgatgcacaggcaaatctcacgatggctctggggtataacagaccagacgatattcccataacgctctctactgtgatgcaaaacatcatagacgataaaacgcttgatgcttcacagggtattatccatcacagagagggcgttgacctgcttccgtcaaacattgagctgtcgggctttgaggtaaggctaatcaatgcaatgagccgtgagcgtgtgctgaaaacctatgtcaatgaggttaaaaagaattacgattatgtgcttattgattgtatgccgagcttaggcatgataaccatcaatgctctggcggcggctgacagcgtaattatcccgacacagccccactatctctcggctaaaggtctggagcttttgcttcgctccgtatcaatggtcaagcggcaaatcaacccaaagctgcgaatagacggtatcttaatgactatggtaatgccccgtaccaacatttctaaggaaattacggcaacggtcaaaagtgcatacggtaagaaaatcaaggtatttgataccgagatacctcattctatccgtgcggtggaagctaccgcagaaggcaaaagtatttttgcttacgacaaaagcggcaaggttgccgcagcctatgagcagttaggaaaggaggtggcagagattggcgagaagcagagaaaccaaaatcgagctgaccgcatacgatgacctttttcagacggacgaaagccgtgaggaagcaaagctaagcaagatacgggatattcccatatcggagattgacgagtttccagaccacccgttcaaggttttaatggacgaagatatggaacaacttgttgagagtatcaagcgaaacggtgtaatgacccctgcgacagttcgcttaaaagaggacggacggtatgagcttatcagtggtcacaggcgaaaaaaggcttgtgaacttgcaggacttgaaacgctgaaatgcgaggtcaaagagcttacccgtgatgaagccattattgtcatggtggaaagtaatctccaacgctctgttattttgccgagtgagaaagcgtttgcgtataaaatgcggttggaagctatgaaacgacaggcaggcagacccccaaaagaaaatgcgtcgccattggcgactaatttatcaaaagggcgttctgatgaggaattaggagaacttgttggagaaagcaaagaccagatacgccgctatatccgtctaacggagcttgtacccgaaatcctgcaaatggtagatgaaaggcagattgcattccgtcctgcggttgaaatttcctatctgaccgaggaacagcaatacaccctgcttgaagcaatggagtacaacgatgctaccccgtcattggcacaggctatcaaaatgaagaagtataaccaagacggcaagctcacttccgaggttatccagtccattatggaggaagaaaagcccaatcagaaggaaaaacccgctttccgtgacgagaggataaccaagctcattcccaagactgttcccagagggcaggaaacggattttgttgtcaaggcgttagagttttataaccgacacttgcag

SEQ ID NO: 1988 - DNA, 26802 bp, Unknown
  gut microbiota DNA sequence
aaatataacttaaaaatattaagcaaagttgataaaaccaatatttaattacaagacagatcatggatggaactgtttttgaaaaacttgtcacacagaactcaaaagcagaggcagttccggaactttgtgaaaagaaggcgaaccgatggacggctggtccggatataaggcagccccgtcgaagacgatcatctactggatcgttccggagtccaacacgagaaatgccggcctggaatccggacagtatgatgtgatatttaatcttccggcggatgatgtggaccgggtttccggtctgaacgatgtcacggtttactccacatagcaggggaccattacaccgatcatcaatcataaagaagggctctgcgcgaatcagtggttccgtcaggcggtcagctatgcacttgattatgaggaagtcatgacggcaacctatggggccaatggctttacgatggggtcttgctacacggatgaagcacagccgttctggtacacggatgccggatctgaggaatacaatgtacacgatccggaaaaggcgaaagagatcctgaaggaacatggatatgatggaactccgctgagactgacagcagcgaccctgaataagatggattatatggcagtggccatgcagtcggagctggaagaagtcggcatcccggtggaactgaatatcgtcgactggccgacacttcaggcacagagcaccgatccgacagcatatgatatgtatatctgcacattctcccaggtgccgatcccgtccttgaaactctattttggaccgaactacgctggctggaatgatgatgagacgcttcagagccttttaaatgacatgaacacggcaacaaacatggacgatgcgaaagcagcatgggataaagttcaggaatattcctggcagtatctggcagttctcaactttggtcattatattgcaaactatgcatggaatgatcatgtaaaaggcttaaataattacagcggactctacttctggaatgcggggtatgtagagtagatcagcacaaagatccggataaaaatacctggcagagatggatcacttcactctgaccaggtatttctgtgtctgtaactgtatgtgtatagagactggcaccgcggtaaacagcagcgccggaaagctttcgattattcgatataggcaacttttccgatccgctctttcggctggatcacagtatccggatccggatagcctaacgcagccatcccatagactacatgattggccggaacaccaaaatcatttaagatgtcacggatcgccggagtatcgcagatattttggagctggttgatccagacagagccgactccgtaggaattggcagctaaaaagatattttcgagagcgcaggcatcatcttcttttccccagttactgtcgcgcaggttggacggtatgatgatggcagccgggcagtatagatcataccccgggcggtttaatgtggttttgatcgcctcagccagacgtttgatggcatttttatttgtcacaaccgtaaatttccaggtctgctttcccatgccgctcggcgcgtggagagcagcctgtaccagatcgtccagaatctctctggagattggagtgtcggtgaatttacggatgcttcttcttgtaaggatattgttcatgacttcgttcattgagagttcctcctgtactcgcttgatgtatgcagctggtgcagcgatcgtgatcagcattcgccgcttgccggaaatctgcagacagttttccggctttcttgcgctcattatatcacgattcgcgatttcatgcattcttatcaagccatagtctgaaatattttctgatgacagaaaacggcactggcccgagatcaagaagaaatctgtgaaattcttttgcggagaaccggttcccgagtgctttttccgcctcttcccgcatttccatgatctccacgtatcccccagcgtattcgagatagttcgtgggactgtcaatcattgtctgccagagatcttctaccagatcatcgtctgcgtcaaaacaggtgcggataaacgcggcggcctgatctttggaccagccgtcgtagttgatcccgatgtccaaaagggagtgaaaacagagcgaaaaggaccgcatggcggcatgataggcgctggtttctgtggaaacaccattatcataggaccaggccagattttccacgtaagtcgcccagccttccgctgcgccggaacaggtcagcagggcggacagcggatgtttcgcatgttcccggaaatagactgtctggtagagatgtccggggaaaccttcatgggcgagcgtgggataaagttcatcctctgagctggtactgccgctattgatatagatcacattctgagcgggatcatcgagcggtgcggtgagataaaatgcaggactcaacgccgcttccagctgggccgggacatagcggatctcgtactgcctggcagcatcagacagcgccggaaagtcagaattcatctgatcctgaagatctgtaaggatctggtcaggctgtgtacaggaaaaagtgagatcggaagcggcagctttggaaaaagaggagatcgtctccagatctttttgcatccggtaagacagcgcagttttcaggtcttcgatcgtatgataagagagaccgggacctgatctcacaagatattcatagtactgctttccgttccggaatccggcgagaccgctttcgttgattccgcgcccttttaagtttgaaagcccgtcgatcagatggcgataagcgggcagaaacacgttgttgatcatgtcaagatgacgggaacgaaagtcagttttctgctgttctgtcagagtgatctcatgttccagaaatttcagacgattctcaaaggtctctgtcaggaaattatcttccggatcaatgagataactttcacaggattcgatgatccggtcgatcgaagcgtcggacaggccgagtccggcatcagacttttgctgctcaaagaaaagaatatcgccgtagtaggagtcaagctgggaaagcagagagagatagtcttcgacatcctggagagaatggaaagaatactccgacagcaggatcgggagctgcgcctggatcccgatggtgggggcaagtggctgttcgtagagctcgagaccttccgccataagagtggtgtctgttatcgcggaaagagaatcgtaaaggacctgctggtctgctgataaggagtcaggatcaaagtcgttgagtttttttcggagatcatggaggtcatggtgatttgtgatgagctcggacaggcggtaagtgccaagggagacatcccccgcgttaatcccgtaattttccgggtgaagcagagtgtagtggagatccagagtgctggaagactccatctcggtgcggaaaaggtcagagcagaatgagtcgaaatctgcctggagctttaaaaatttttcagaagtggcgggattgccggatgaaaagtcattggaagagtaagattccccggtctccgccggactggcagagaaaatccgctcatttccgcaggcagtgagaatgaacaggaaaaagagtgccagagcagctgcccaaatgtgtttccatttcataaaaagaacctcccggatgcagctgccaataggatcaatacggaagctgactggttcaatatatgaatcagatgagggaatacagaactttttttacttacaaatacaggaacttttcttttcaaggttgaaaagaagcgcggaagaggatatactgagtagtatcgcgacagaaggacaaatgtgcgatacccaagaacaaaatgcacatttggcaccagcgtctgcggatggaagacccagcagacggggatcatctaagaatgaggagaggggaacagaattatgtgtgaaagattaatgcgtcatgtatcagaatcagcagtagaacagacacagatcgttcttgcgagccatatcaacggtgccggccgacttttcggcggacagctgatggagtggatcgatatcgttgcgggtgttgtagcgagaagacattcccattgcaaccagacaacggcttctgtggacagccttcagtttaaggaagcagtgtatatgaatgatacgctgatcttattcggaaaacttacttatgtgggtcatacttccatggaggttcaggtcgatacctatgtggaggcactcgacggaacgagaaaacttgtaaataccgcatattttgtaatggtagcactcgacaagaatgatcatccgacaaccgttccgggactgatcgtggaaaccgaggaagaaaaagctgcatgggcagccggagagcgcagaaacgcgctgagaaagcagagacggatcgagaattattaaaacagtgcgcttatatccgcataaataaaggactgtgaaacacacagccaacaaaaaaggaccttaaacagatcaaaggtccttttttgctgccatgcatccgaaaggcgctgccgggcaccctttcaaaaagtccagaatgacgttcagataaaactgctttcttccaaacatggaagtatgggtagcaccgttcacaaggacgagctgcgcacgcgggatcagccgcgccatcagccgggagtgggaggttttcacgagatctcttgtccccgcaagaagaagaaccggcgcctgtatcgcatgcagctgttcttttgtcatcagcggcgagttgcagagcagggaggcgagctgctggcagcggaaaacatgagaatagaccatgtcagcaaatgcatgcccttttttctgcggatgggaagctggtgagcccacacggcgcggacgtttctgtgaaagaaaacatgtgcggaaaagcgtggacaagatccgataaaaataatacttcccaatgcagaagagccgtaccggaagaatcaacccgtccggcgtgatatttccgctgacagcgatcacagaaagtgtccgctccggaaaaagagaagcgaactccagtgcgatgttcgccccgtcactgaatccaaagaggatacacgacgggatccggagaacatccagaagcgccgccgcatcctttgccatatcggcagtcgtaaactcagcatctgcatcgcccggtttgatccgggaacgtccgtgggcacggctgtccatcaggatcacccggtagtttgcagacaattttttctcgtagaagtcaaagatcatatgcgtctccgcgttcccgtggagcatcaggatcggaactccgtgcccgctttctttataataaatccaagctttgggcgtatccgccataccctgatgacagatcattttttccatttgtgaagttccccttttaaaagcgtgagaatgtacccgcggatcccatgaggattctggatctcaacagcggcatacagcatgctcggcgtcggatatttcggaaggtacgcatagtaagacggaacccattccgtcgggctgtatttttcttttgcccggtaaagatcccggaaaccgtagcacgcgtttaaatggtcatagataaactggagcaggcgttccatcggatttttactctctgcgttcagaccggcaagtggggcgactccgagactgccgtagccgatgccctcttctttaaatacctggaacgcctcgtagatgatcgtctccatgacaccgctcggcgcatcttttccgtgtctcgtcacatcggccatgtagccgttctttccaaggaaaggaacaaaaacaataaaggcaaccatttttccatccgaattcagggcgtagaagtaacgcttgtccatcggatcatcgagtccgacggttcccatcgtaaactgaagcattccgctcttcttcccttcgagccattcgtccgtgatccggtcaaattcgcggtcgagatcaggatcccgtttctccagcactttgtattcgtggaccgtgacgccggcttttgtcgcatggttgatgttcatgcgcatcttggcgcccttcttgccgctgatctcatagtcagaaagcttaaaccgcgcttcctccccgctttttacgagaccgaatccctgcttttcatattccgacaggtagtagtcggtcagaccgagaaagaaaatattgtgggcactgttctgacagaactcgcggaattcggtgagaagagcagggaaatcttcatccttacagaccggatcgccgtttacaacgatggtatcgccgatggtgccataagggagtaccccatcgacggaatgcccgaaatacagacatttgtcatcttccaacgccaggtaggaacatggattctggctgtacaggtttaaaagtgttctggcatgctggatctcctgggctccatgagcttgtttctgaagccatggacgcagtgcgcagagaatggcggcgaggatgcagccccagctgaaccagaaaaggacaaattctgttccatgacggtctgccatggaagcaggaagatcgcccattccgaagatcatgccgatgccctgggcgaaactgtccgcaaaggagacggaggatccggcaacggtcccaacctgcatgtaatgccaggtgatcccgacattgatcaggacacctgcaatggcaagaaaagcaagtgttacggtctgcttccggttctcgcgtccggccgggatacagaaatccttccgcagggcaaaaaacagaagaaacagaacgaggtcaaagatcatgactccgttgtgcagcggatgtcccattccgatgagaccgcgcagaaaattgagcgtgaagatccccatcgcgatcatccatgcattccgctttctcttccataactgcagcgacagcacgaaaagaacaatggaaaaggcgcgctggaccatgcgccccatctcaaaagaggcttgcatggactgggtgatccttgaaaacgggaaaaaagtcagcagaaacaggaaaaaggaaaatacggcgagcagaacgatcgagatgttctccagacggatccggagctgccgtttttcatccagtcttttttgtgattcattcataagtcattcctccgaagcaaaaatcatgaatacgatctgttttatggtaacacaaagtgtagtcttttttgtgtgaaaaatcaactaaaggaagtaaagttcctgcggaaaccgacgggatgccttgacaaatttatttgaacaggatagactaaagacatcatatggaaaaagcttggaagggaagagtatgccgaaaggaagctttcagagaccccggttggtgtgaaaggggagcagaggattggcggaagatggtcccggagctgtgcaggtgaaaggaaatctttgtttagcctgtgccggaagcgcccgttagcgcgtcaggctgtttggtgacagccggtgagggcgatgaccgtgaggcatcgccgaatttaaagtggtaacacggggggactcgtctttaataataaagacgggctttttttatgtattgcggcacataacgcggcagaaaaagtccccagcgcagaaaacgtcctgtgtgccatttatgcctgaaagatacagaaaaagctgtattttgtgagcagataaccggcaggagaagagccgtaaaaagagataaaaaacaggaggaatcaatccatgtgtacaaactgtaagaaaccatactacatttccacagcgatcgcctatacatccggcaaaccgcatatcggaaacacttacgagatcgtattggcagacgcgatcgcacgctacaagagagaacagggctatgacgtttacttccagacaggaaccgacgagcacggtcagaagatcgagttaaaggctgcggacgcaggcgtaactccgaaggagttcgttgacaacgtagcaggacagatcaaggagatctgggacctcatgaacacttcctatgataaattcatccgtaccacagatgattaccatgagaaacaggtccagaagatcttcaagaaattatatgatcagggcgatatctacaaaggacattatgagggactttactgcacaccgtgtgagtctttctggactccgtcccaggtcgtagacggaaaatgcccggactgcggacgtccggtacagccggcaaaggaagaggcatatttcttccgtatgagtaaatatgctccgaagctcatcgaatatatcaacgagcatccggagtttattcagccggtatccagaaagaacgagatgatgaacaacttcctgcttccgggacttcaggatctttgcgtatccagaacctccttcaagtggggaattccggtcacttttgatccgaagcacgttacctatgtatggcttgacgcgctgaccaactatatcacgggaatcggatatgactgtgacggaaacagcgacgagaagtttaagaaatactggccggcagaccttcacctgatcggtaaagatattatccgcttccataccatttactggccgatcttcttaatggctctcggtcttccgcttccaaagcaggtattcggacatccgtggctgttacagggcgatggcaagatgagtaagtccaaaggaaacgtcctctatgcagatacgctcgttgacttcttcggtgtagatgcagtccgctacttcgtacttcatgagatgccgtttgagaacgatggcgtgatctcctgggatcttatggttgagcgcatgaactccgaccttgcaaatatccttggaaatcttgtaaaccgtaccgtttccatgacaaataaatacttcggcggtattgtcgagaataagggcgctgcagagctggttgacgaagagttaaaggcaacggttcttgagacagttaaaaaggtagacgagaagatgaacaagctccgtgtcgcagatgcaatcacagagatcttcaacatcttccgccgcagcaacaaatatatcgatgagacgactccgtggacacttgcgaaagatgaggcgaagaaagaccgtctcgcaacggttctctacaacctgacagaggcgatcaccatcggtgcatccctgctgttctccttcatgccgggaacttccgagaagatccttgcacagttaaacactgagaagagagcacttgaagacatgaacaccttcggtctgtatccgagcggaaacaaggttacagaaaagccggagatcctgtttgcccgcatggacatcaaggacgtcatggagaaggttgaggccatgaaggcagcagccgcagcagagaatcaggaagagaagaaggaagaagagaaaccgggcatggacgttgagaagaagccggagatcacatatgatgatttcgcaaagcttcagttccagatcggtgagatcgtgaagtgtgaagaggttccgaagtccaaaaaattactttgctcccaggttaagatcggttctgagacaagacagatcttaagcggaatcaaggcatggtataaaccggaagatatggtcggcagaaaggttatggtcgttacgaacttaaaaccggcgaagctcgcaggcatgttatcggaaggcatgatcctctgcgcggaggatgatgagggcaaccttgcattaatgacaccggcaaaggatatcaagtccggttctgaggtctgctaagtgaaagtgcgcttttgcttttcggcggaacagataaaaaacattgccctggtcagcatggtcatcgaccatgcggccgttgggcttattgaacagtcagaactggcttcgggcgttgcctggagtctctgtgggacagccatgcgccttgtggggcgtgtggcttttcctctctttgcgtttatgatcgcggagggtgcggcgcatacgagagaccggagatggtatgcgctgaggctgcttctgctggcagttatttcggagatcccctttgatcttgtggcggggggaacatggctttttccggcggatcagaatacggtgttcacattacttctgggacttctggcagtctgggctggagatctgatctgtgggaccggatctggagtgtcatacggaaacaggaaaaaaacaggagatggcggcaggaaggcggtaggacagaggagatttccgttggaatatgagcggtatatccgggttctggcggcggttccttttggactggcggcttattgtctgaaaacggattatggttttatgggcgtactgctgatcgttatattgtatacattgcgcacggaaccacagcttcgcacggctgtctgcattgtgtttttattttgtatgtatatggatttctatggcgctgcggcttgcgttgcaattttcctgataaaccgttacaatggagaaaaaggcagtgggagcggaagaattttctatctgttttatccgctgcatctgctggtgatccggggaatcaagatggctgtgggactgtaaaaaatgagattgtgtaaaaagtcatacagatgccgacaccggatgaaaaagaaaacgacatatgacttgaggacagaaagaatggactatatttttgacacacatgcccattacgacgatgaggcatttgacgcggaccgggaggaagtgctcacgggattaaaagaacagggagtcggaaccgttgtgaatgtcggagcgagcatcgcgtcaacaaagacaacgctggcactggccgaggcgcatcccttcatgtatgcggcggtgggcgtgcatccgaacgagacggcggagcttacggttgcggacatgaaatggctggaatctctggcagaaaacccgaaggttgtggcgatcggtgagatcggtcttgactactactgggacgaaccggaacgggagatccagaaacactggttttcggcgcagcttgaggtcgcaaagaagacgggactcccagtgatcatccacagccgtgacgcggcgaaggacacgttagatattatgaaggtggaacacaacggtgccaccggtggtgtgatccactgcttctcctatggagtggagatggcgagagaatatctgaatatgggatattacattgggatcggcggagtactgaccttcaagaacgcgaaaaagttgattgaggtggcggaatacgcaccactagacaggatcgttcttgagacggattgcccatatctggcaccggtgccgaaccgcggaaagagaaatcattccggaaatctgccgtatgtggtggagaagctggcagagatcaagggtgtttccaaggaagagatcatccgggagacgacgaagaacgctagagcgctgtatcggatcacagagtaggagtttcgggacgatcagaccgatcggactgcaatatcggaatagtatcaaattttgtatacaagatgcacctcatgcaacaagtgaaaacacgcttcgcgagtttccccttgttatcgcgacagtcgccaaggtctcgcgcaagcgcggactttggctcgttgttcgcgtaaataaaagcacctgcgcaaaagcgcagtccaaaatagaaagagagaaataaatggcgaatctgggaaacccaaagaataccatagagatcatacagaaatacgaattcatgtttcagaagaagttcggtcagaacttcttgatcgatacccatgtactggagaaaatcatctctgcagccgggatcacaaagaatgactgcgtccttgaaatcggcccgggaatcggaaccatgacccagtaccttgcggagaacgccggacatgttgtagctgtcgagatcgacaggaacctgatcccgatcttaaaggagacactggcggactacgataacgtcaccgtcatcaacgaggacatcctgagagtagatatcaaggcactggccgaggaatacaacggcggaaagccgatcaaggttgttgcgaacctgccgtattatatcacgaccccgatcatcatggggctctttgagagcggcgtgccgattgataacatcactgtcatggttcagaaggaagtggcggaccgcatgaaggaaggtccgggttccaaggattacggtgccctgtccctggctgtccagtactacgcagaacctgagatcgtggcgaacgtgccgccgaattgctttatcccgcgtccgaatgtgggatccgcggtgatccgcctcacgagacacaaggagatgccggtacaggtaaaggactccgcgctgatgtttaagatcatccgcgcgtccttcaaccagagaagaaagacgctgcagaacggtctcggaaatgcatcggagcttccatatacaaaggaacagatcgcggcagcgatcgcagagatgggactcactccgacgatccgcggcgaggcgttaagccttgcacagtttgcacagctgtcggatattcttggggcgatgaaataagaagcacagattcaagtcgaacgtccgtgagacttggcgcgtgattctggtcatgcggaaaacaagtctgtccgcagcatggactttgtatacaagccacagcgctatggtgaggctgaagaatagaatatgggacagggaggaagttttatgggatttacagaaatgtcacatgcgtttattgcggcaaaatattatgtttacctgaaggaaatcttcagtgaccgcggcgaggcggcatttttgcatgccacccgatattacggcgaacagcgtggacgtcggatggcacagcgggcgatccgggacggaaaacctctgacttatgagacatactgccagtacggtgaatgggtcaacacggaagaggtgaaagcacaaggactcggaaaccagtccgagacgacaagcttaagcccggactttcagatccacatccatgtctgtccgtggcacacccagtttaagaatatgggactcccggaagcggggcttctctattgtaaggacctggatgcgtccatttcccgaggtttcaacccagagattcgctatgaggtctcccagacactccatgaccatgattattgtatacagacgatccggaacgccggtttgacgccggagcccaatatggcaaaaaatccggcaggcctcagatctttcgagtaccactgcgctcactcctactgggcataccgggaagtttgtgaagcaatcttcggggaagaggggaaacagatcgctgaaagagtccttgatgattttgccgcagagtatggaaaaaagatggcagacacgctggcaggatatgcaaggacgaattttaacatcgcagactaagaaatcagcagctttgcaaaaagagctgctgaaatattgctgttagaaagaagaacaaggtatatcgaaatacattttgaagaatattgaggagcaacacttatgaaacagatcaacatgctggaatccccggtccgccaggtatttttcagttacctggtgccgtccatcagcgcgacgctcgtgacatctatttatattctggctgacacgatgatgatcggacgcggagtcggtggttccggtattgcggcgatgaatattttactgccgctctacaacacatatttcgggatcggaatgatgtgcggagtcggcggcagcgttctctttgggttttccagaggacgcggcgatgaaaaacgcgccagaagttattttacggcggcactctgtgtggtgcttgctctgtcagcagtctttctgatattgggaagaatctttttcaaccctctgattacttttatgggaaataccccgctcttaaatgaatacaccgtgccttacggaactgtgctcacaacagcggctcccatgtttgccctgtcttcattccttcaggcattcgtccgaaatgacggtgcgccgaagcttgccatggcgggcgtgattagtggaggcgtcaccaatgtgatcctagattatgtatatatttttatcatgaaatggggaatgggaggtgcggcgctggcgacagccaccggaacgacactcacggtgctgatcctcgcaagccattttttctcgaaagataaccacttgaagctggaatttagcgatgtgtggagacgggtgccggaggtgctcggaaatgggctcgcaagctttattctggagatttccaacggcttcgtgatgctgctgtttaaccgccagctcctcgcttacgtgggagagatgggaatcacggtctatggaatcatcacaaacaccgcgcttgtggcatcgtccatttccaacggtatcgctcaggcagtacagccgctgctttccgcgaactttggcgcgggaaacctgaagagagtcggcgaggcgagaaaactgggagtccggaccggatttgccgcaggcttcatattcactgcgatcggcatgctgatcccggtacagttgtcctatctgttcctggacccgacaccggagatcctcacaatggcggtcccggcgatccggctgtatttcctctgcttcttagtcagcgagtggaacatcatcagcggaatgtatttccagtctactgtgagaccgcggttttctttaacgatcacactgctccgcggagtgatcttaaacagcgtgttcgtgttccttctcccggcactctttggtgtagacggaatctggcttacggtgactgtatcagagttcatcacggcgggcgttgcgtttgtgcttatgaaaagggaaaaacattaatatattaaaaaatatgtaaacaacggactcagggatctttgagaaaaaggatttcggattccgttgtttcttctttcactgccgcgtccccggaagaacctgacggtggcaggttttgcaggtgtatctggaagaaacaggagacaaattcgttaaacttatttcaattgacactataacagcgtattggtaaaatgaagacagcgacattaaattaaagaaagaagaggagaacaatatgacgatcagaatcggaattatgggttatggaaatcttggacgcggcgttgagtgtgccatcaaacagaatccggatatggagcttgcggcagtatttacaagaagagatccgaaaaatgtcaggatcctgaccgaaggtgcaaaggtttaccatgcagatgaagcgaagcatatgacagataagatcgatgtcctgatcctctgcggtggaagcgcgacagatctcccggtacagacaccggagtacgcgaaatactttaccgtagtggacagcttcgatacacacgcgagaattccggagcactttgcagctgtcgatgcagcggcaaaggaagcaggaaatgtagcagtgatctccgcaggctgggatccgggtatgttctccttaaatcgtgtatacgcaaacgcaattctcccggatggtaaagactatacattctggggcaaaggcgtaagccagggacattctgacgcgatccgccgtatcaatggcgtgaaggacgcgagacagtacacagtaccggttgagagcgtgttagagaagatcagaaacggcgagaccccggaactcacaacgagagagaaacacacgagagagtgctatgttgttgctgaagagggtgctgatcttgcgcgtatcgaaaaagagatcgtaacgatgccgaactacttctccgactatgatacaacggttcatttcatcagcgaggaagagatgaagcgtgaccactccacactcccgcatggcggtttcgtgatcagaaacggaaggaccggttggaacaaggagaatgcacatgtgatcgagtaccgcctgaaactggattccaacccggagttcacttcctccgtgatcgtttgctgtgcccgtgccgcattccgcatgaagcaggagggaatgagcggatgcaagaccattcttgatattccgccggcatacctttccgcaaagagcggcgaggaacttagaaagaatctcctgtaatcataaaaagaacctttaaaggcggcgaaagagcctgcctttgatcgatcgtatttccgccctgtgtccgcagccgacagatacagatacagggcggaagtatcaattgccatgcattcagagaagaccgtaaacgggcgccatgcatggcggattttgtagagggtgaagatatgacacttaagaagaatcatccggcaggctacaacgggatcacggacggcgtgatctggcagcagctcctgctttttttcttcccgatcctgtttggaacatttttccagcagctttacaacacggcggatgccatgatcgttggaaagtttgtgggaaaagaggcactttccgcggtaggcggtacgacgggaacactgatcaacctgctggttggttttttcgtcggaatgtcctccggcgcggctgtcgttgtatcccagttctacggggcgaaagaagagcagcaggtgcgaaaatcggtccacacggcattctgcctggcattagccggcggggtgatgcttttaatcatcggtgagatctttaccccagcggcaatccgtgctatgggcgcaccggaagagatccttggatattctgtcacatacctcagaatctatttcttaggtattatcggaaacctggtctacaacatgggcgctgcgatcctgcgagctgtgggagattctaagagaccgctgtatttccttgtggcgagctgcctgaccaatattgctctggatctcctatttgtagtctgttttcatatggaagttgccggggcggcgcttgcgacgatcatgtcccagcttttatcggcagtactcgttatgataacgctgatccggacaaaagaatcttaccgttttatcccgaaggaactccgtgtggagccggtattattaaagaggatcataaagatcggtctcccggcgggactgcagtccatgatgtactcgatctccaatatcctgatccaggcaaatatcaacggatatggaacgaacacgatcgcgtcctgggcagtttatggaaagatcgacggtatcttctggatgaccatggatgctatgggaatttctgtgacgacttttgcgggacagaacttcggtgcaggaaagatcaaacgtctgaaaaagggcacctatgtggggcttctcatgtcgacgatcattacggcagtacttggtgtatttatgtttacggcaggtccggtactcatcagtctctttacgaatgatgtggatgttatggcggagagcatgagtattatccgcttcctggtgccgttctggttctgctacatctgcgtcaacgtatatccgtgtacgctgcgcggcgtgggcgatgccctgatcccgatgctgatcatctgtgttggaacatgtatcctgcgtgtgctctgggtattcggcgcgggcgcggtccatccggggctgtatacaacgctgacgagttatccgttaagctggactatcacttcgctggcattcctggtatactattaccggtttagtgcgatgagaaagttaaataaactgattgaagaataagcataactgttcggcaggtctgtgaacttattgttctgctctgctgaacaattataataagtgtaactagaatatggatgttcaatttgaatttaaagagaaaaatgggggcgcttgtgtgacaaagcttttggcaccaggcgccgtctgcgtggttccggaaagtctgggcggactcccggtgacagagctggcggacaaggtattttcggggagtgtggtggagaaagtctatctacctcggacactcacccggattggaagatatgaattttatagatgtgaggaacttcgggagattcatttttacggggcgctccgggaagtcggcggcggtgtgttcacgggctgccggaatatcaggagtctgaccgtgcatatggggatggatgaagagtcggcactcagggattttgtgacggagatcaatgagagagtcacagtgcatgtgtttatgcagggcggacaaaatcgaatgcaggacgagagagatacggactctgaacgaacagcgctggattcaagtgcttttgaggaagagaacggggagacagagactgcgcgtgtgatcttcccggaatactacgacgaggcggtggaaaatacgcccgccaggatcacggtatccaatatccacggtgcggggcagaagtaccgctattgttttgagggacgaaaattccgatttgacaggtatgataaactgtttgtgtatgaaaaagcagaggaatcagttctcatggcatcgaagatcgcagtgaaccggctgcggtatccgaaagggctgtgggagagcgcgaaaaaggaatatgaaaagttccttatggagaatctttatgaggtacttcgcggaagctttgaggacccggagaccataaaatggattgcgggacagtatttaacgccggaaaagaatccgctgacggcggaagagatgtcggggctgatcacggagatctcgaaaaagcatctgccggagctttcggggatgtttatggagatccagaggaagaagtttggcgtaaagaagaaaaagtttgattttgatttgtgaggaggtcagaaatcgtcatgagagaagatgcggcatggtcgccaatcctgagagagcagggcgcgctggaagaactggcggcgatcggcgttgagatcatacggaacgcgaggaatgagctgtatctttccatgcggtttctcgacgtggccttaaacggcctgttcccggtggcggacaacagcatcaagggaatcggaacggacggaaccttattatcatttgagacgggatacatctgcggctggtaccggagaaatcctgtttatgtaaatcgtatgatcctgcacgagaccctccactgcctttttgtccacccatggtctagaaaaaagcggacggaggaatactggaatctggcatgtgatatcgctgtggagtccctgatcgacgggatccacaagccctgcgtccacctgccaatgtccccggtgcgagtagaattctacggacggctgcagaaaaagatcaaggtactgaacgcggagagtatctaccacaccatgcagaagatggagctttcggagatcgaatatgagcggctctgccgggaattttgccgggacgatcattccagatgggagaaagaggacgagaaaaagtccccgaatcccaaccggaaccgaaaaaacgattgggatgacaagcgggagaagatgcaggcggagatggaggcgttttccaacgaggcggcggatgactccaaggagctgatggaccagcttgcggtggaaaaccgggagcggtacgattaccggaaatttttgcggaaattttcggtgctgaaggagacggttcagatcgatcccgacgcatttgactatgtgttttacaattacggcatgcagttatatggaaatatgccgttgatcgagcctcttgagacgaaggaagtccggcggatcgaggattttgtggtcgtcatcgacacttcgatgtcatgttccggggagctggtgaagaaattcctggaagagacctatggggtgttggcccaatcagagagtttctttaagaaggtcaatatccatattttgcagtgcgatgataaagtacggcaggatgtgaagatcgagagcgaggaagaccttcggaattacatggaccacatggagcttcacggtatgggagggacagatttccgcccggcattcctgcatgtggaccagatgatcaaggcgggaaaattcagcaggctgcggggactcctctattttacggatggatatgggacattcccggtgaaaatgccgccctacgacacggcattcgtgtttatgcgggacaattacaccgacgcggatgttccgccttgggcgatgaaggtgattctggacccggagtcgatggaggatgtggggaaaatattagatggaaaatgatgagtttcataggtcaggtgctggttgtaaagattatagaagcaacaggcagaaaattttaccagaataattaagttggaacgtattttgcgtgtagctgtgaaaagtctgagcagttacaatgggagaaaaaatgaacatcaagcgtgcaaaacaggaaattaaaaatacgatacaggtgtatctgacgaagaacgcacacggggaatacgagatcccgtccatgcggcagcgcccggtgctgctcatcggtccgccaggaatcggaaagacccagatcatggagcaggtggcgcgggagtgcgggatcggtctcgtctcctacacgatcacacaccatacgagacagagtgccatcggtctcccgtttatctcagagaggacttacagtgggaagaatgtccatgtgacggaatataccatgagtgagatcgtcgcggcgatctacaataagatcgaagacacaggactctccgagggacttctcttcatcgatgagatcaactgcgtttccgagacgctggctccggccatgctgcagtttttgcagtataagactttcggaaatcataagatcccggatggctggatcatcgtggcagcaggaaacccgccggaatacaataaatccgtgcgggaattcgatattgcgaccctggaccgcatcaaaaagattgatgtggaggcagattttgaggtctggaaggaatacgcgaaacaggcggatatccatccggcgatcctgtcgttcctcaccgcaaagccgcagtatttttaccaggtggagaccaccgtggacggaaaagtgttcgcgacacctcgtgggtgggaagacctctccggatttttgaaggtctgcgagaaggtggggcttacctgcgaccgggaggttgtggtacagtatatcgagcacccgcggatcgcgaaagattttgcgaactatctggaattatataagaagtatcaggcgagataccagatcgacgagatcctggaaggaaagcgggacgagcacctgatggaacaggcggcgaaagcgccgtttgatgagaagctttcgatcatcagcctgattttagcgaagctcgatgtggagttcaaggcttatgcgcagaaagaggattatctggaagtgctgtttggagagctgaaagcattcaagagaagcttggaaggtaaagcggaggccggagaaacgatagagacagtgccgcagactccgatcgccatcttttcccagcagatcgaggcattcactgcggtatccgagcagaaacagaaaaccggactcctcacgaggtcggaaaagtatcgctgtgccgatatcacagcggccatgaaccggtatctacagactgtgaaagcagaactgttatctgatggcggtgagatattcgatcggttccgggagatgtttggcgaagaacggacagaactggaaaatctgtgtgcccatgccggacaggcgctggagtacgcctttgatttcatggaaggaaccttcggcagcagccaggagatggtggtatttattacagaattgaattccagtgcctcggcagtgcggttcttacaggagaatgagtgcgaacggtattatgaatacaataaaaatctattgtttgatgaaaaacgggcagatattttgagccggttggacagattgggagcattttaattggaaaggaaagtgatcatatggaatatgaaggaaccgtataccgcccaccgagtgaggcgagaagcttaattatccaggtgactgtgggctgtgcccataaccggtgcacgttctgcaatatgtaccggacgaaaaaattccgtgtgcggacaaaagaagagatcatgaaagatctggacgaatgccgcgattattacggatcgtatgtcagccgcgtattctttgcagacggtgatgcactggtggtaaagacagaacttcttttagagcttttagcctatgtccacaaaaatttcccgtatgtggagcggatcacctcctacgggactgcaaaggatgttctggcaaagtctgaggaagatttaaaagccttagcggcagcaggactcgagatggtctatatcggagcggaatctggcgatgaccgtgttctggagcatatccataaagatgtgacggcggcccagattgcggcggcgggacagaaattgaagcgctgcggcatcaagacttctgtgacgctgatctccggcctcggtggaagaaaagggatccgggaacatgccatcaagtcggcggagctgatcaatcagatgaatccggagtatgcctccttcctgacattgcgcctctatgaggggacccagatgaatgaggaagtaaaacgcggggagatggagcttatcaccccggacgagatcgtggaggaaatggagctgtttttaacacacattgattctcccggaacgatcttccggacaaaccacgcgtccaactatgtagtgcttgcgggaacttttaacgaagatattccgaaaatgctggcacaactggaggacgcaaagaaaagacagcgttaccgccttgaagaatggcgcagacatatttaagtaagaagagcagagaaaacagtcccgcgggctttctggacgcttaaaacggcagaaaaatggctcgcgggatatgccttttcagggctttccgggacgatcccggaggggcctcttcttgtagattgtattcaaaaaacaacaagatatagttttgaatcatgaatttttcaccatatatatggttttggtatatcatatttatatagcagtactccttgcaatccgggaacaatacagttataatagaatcgttctcgcgtgagtgactaaaaataacgtggcgggaacatgacatgaccgccttaagagactcgtggcggcaggtccgacagatcaatcataaaatatctaaatcagataaaatttctgtataattctgaaaaaaacaaactgtatatacaaccaagaaaactatcagcaactgaaatgtacatgcctgaggccggccggtaaatgcgcggacctgtaggtcagctgtgttttttgacagaatagacagaagagaaaaacaggcaacggcagttgtgcgtaaagcggacaattctgccaacacaatgaaatgaaacggggaatcagggatgaagatcatcaaaagaaacggagcggaggaaagttttgacacgctcaagatcgtaaatgcggtccagaaggcgtgcaacgccacagaaaatgcctatctggcaccggaacagcttacggatatcgcggattatgtagagtataagtgcaataagctgggacgtgctgtgtctgtagaggagattcaggatatggtcgagaaccagttgatggccatcggtgcttttgcgatcgcaaaaaactatgtgcgctaccgctatgaccgctctctggtgcggaaagcaaacacgacggacaaccggatcctgtccctgatcgagtgcaacaacgaagaggttatgcaggaaaattccaacaagaatccgacggtcaacagcgtacagcgtgactatatggctggagaggtcagcaaggatctcacgagaagacttcttcttccggaagatattgtagaggcggataagcagggaatcatccacttccatgactccgactattttgcacagcatatgcacaactgcgatcttgtaaacctggaggatatgctgcagaacggcaccgtgatcagcgagacactgatcgagcgcccgcatagcttctccacagcctgcaacatcgcgacccagatcatcgcgcaggttgccagcaaccagtatggcggacagagcatcagccttgcgcatctcgctccgttcgttcaggtatcgagggtgaagatccgtcaggaagtgattggcgagatgaaggatcttggaattgctgtgacagaggatcagatcgataagctcacggaggagcgtctccgcagagagatcacgaagggaatccagacgatccagtatcaggtcgtaacactccttaccacaaacggacaggcaccgttcgttaccgtttacatgtacctcgacgaggcaaagaatccgcaggagaagaaagatcttgcgatgatcatcgaggagaccttaaaacagagatatctcggcgttaagaatgaagccggcgtatggatcacaccggcattcccgaagctgatctatgttctcgatgaggacaatatcactccggatgcgccgtattactatttaacagagcttgcggcaaaatgtaccgcaaagcgcatggttccggattatatctccgcgaagaagatgcgggagttaaagggcgatgtgtatacatgcatgggatgccgttccttcctgactccggaccgttcctacgtaaaaggaaaccttgcgaatgcaggaaactaccgggaaggcgagcgcaagtattatggccgcttcaatcagggcgttgtaacggtcaacctcgttgatatcggactcagtgcaagaaaagacatgaacaggttctgggagatctttgatgagagaatggaactctgccaccgcgcaatgcgctgccgccacgagagattaaaaggaaccttatccgatgcggctccgatcctctggcagtatggcgcgcttgcccgcttaaagaaaggtgagaccatcgacaagctcctgtacgacggatattccacactttcccttggctatgcaggcctctgggagtgtgtatacagcttaatcgagaagaaactgactgagccggaaggaaagaaactcggtcttgagatcatgcagaagttaaatgactactgtgcgaagtggaaagaggcggaaaatatcgattacagcatctacggaaccccgctggagtccacaacctactcttttgcgaagagtctccagagacgcttcggcatcgtaaaaggcgtaaccgacagaaactacatcacaaacagctaccatgtacatgtaacggaaccgatcgacgccttcagtaagttaaaattagagtctgaatttcaggcactgtccccgggcggagcgatcagctacgtggaagttccgaacatgcaggataatatcccggctgttcttcaggtcatccgttacatctatgacaatatcatgtacgcggagttaaatacgaagagcgattactgtcaggtatgcggttacgacggcgagatcaggatcatcgaggatgacggaaagctcgtatgggaatgcccacactgcggaaaccgtgaccagagcaagctcaatgtggcgagacgtacctgcggctacatcggaacacagttctggaatcagggcagaacacaggaaattaaggaaagggtactgcacctgtaatgaattacggagagatcaaaacatgtgatattgcaaacggtgagggagtccgcgtgtccctctttgtgtccggctgtacacatcactgtaaaaattgctttaatgatgtggcgtgggatttcggatacggaaagccgtttacggaagagacggaagaaatgttattaaaggcgctggagccggattttgtggatggattatcgcttctcggtggagaaccctttgagccggagaaccagcgggtacttcttccgttcttaaagaaagtgcgcgagagattcccaaagaaaaatatctggtgctataccggttatcttttcgataaagagcttctcggtgagagccgggcgagatgtgagtgtacggatgagatgttaagcctgatcgatgtcctcgtggacggcgagtttgttcaggaactttacagcgtggcactggcattccgcggttcggagaaccagaggattatcgatgtgaaaaagtctctggaaacaggggagatcgtctggcatgatctggtgagccggggaatctcgatgaagtttaattagaatataaagctatatatagaaaagatccggcagttgggttattttacagggatttttgattctgtaagacaacttgactgccggatttttttgatgtaataggaaattccgagaaattccctgtctcacaaaaggcactaacgtgccaatgatgcgcacttgcgcgaagatgtagattgtcgcaagcgactgcgcgaatgtgccagggtgcaaattccggtcgacctggggaatatgcagccaaggcacctcttttttataaaatctgtagtgcaggtaaggacatcatgtgaagaacgagatctggataaggcacctggataggcttagaatgcttagaactgccgctgctcttgactttttaagaatagtcctgtatactaatatagttctaaatagaacagttcacttttgaaccagaggtgatacacatgaaatttgttgattttatggcggacagccgggatttctatacggggctcattgatccggtctgcaaaaaatacgggctgacccagatggaattcaatattctgctgtttctcgccaacaatccggagtgcgacaccgccgcccggattatcaagaagcgggcttttacaaagtcccatgtttccatgtctgtccgctcattagaagagcgcggactgctcacaggggaatattatgggacggaccggaggacgatccatctgaaacttacagacgctgctgcgccgatggtctctgatggaaaaaacgtccagaaacgggctgctgagatcatctgccgcggattctccccggaagagcaccggatgctgttcgaacttatgaaccggatcaattcaaacatttcagattacaggaaagaaggaaaactgcatgaacaacagtaaagaatttcttgggacagagccgatcggaaagcttcttttcaagcttgccgttccatctgtcattgcacagatcgtcaacatgctgtacaacatcgttgaccggatctacattggacatatcccgggaagcggaagtctcgccctgaccggtgtcggcgtctgcctgccgatcattatgg

SEQ ID NO: 1989 - DNA, 3469 bp, Unknown
  gut microbiota DNA sequence
atcgctgggacagcgttaatgttcctgttcggctggtttttgatgaagcggctggatcgctttctggatgaaaatcagaagcgaatcgaggaagcgcccgaacaacagcagcctgagccgtgcgtgcatctggtcggaaatatttctcctgacgaacttgaggaaacgctttccctgtttcgcagcagtcatgcccatgtagaaatcgtgatctatgattcagagcaaatttcatttccaaacaacgaatccgattgggcgcagtagaaacctccacattttggtgctataatattgtttaagagggggtgaaaatgtgcagaataaaggaaacgaaatgccaaaagagcatattcttgtgtgcctgtcctcgtctccatccaatgaacgcattatacgaatggcggggaaaatggcacaggcattttgcggcagccttaccgcactctacgtgcagacccccggagacgctgatatgaacgcggaagatagcgttcgcttgcaggcgaatatgcgtctgggtcagcagcttggagcagaaattgtcacaacgcatggtgaagatgtggcaacacagatcgcggaatatgtgcggctctctgatgtgaccaaaattgtgattgggcgaagcggcgtacagcggcggcatttttggagtgaaccgacgttgacagaacggctcattacgcttgcaccggatgtagatattcatattattccggatgtggacgcctataagagctaccgcgggaaacggttgcttaccatccgtctggcatttccgaccgcctgggatctgcttctgaccattgggattctggcaactgcgacggtcatcggatgggcctttctgcgacttggctttgcaaatgccaatatcatcatggtttacctgctgggggtgcttctgacttccgcttttaccagcggttatacctgcggtgtgctgtccgcttttttgagtgtcctcctgttcaattattttctgacggaaccccggctgtctttggtagcctatggcagcaaatacccgataacctttgccgtcatgttcgcggctgcacttttgacaggtacacttgcagccaagctcaaagcccacgcgcagctatccgcacgggacgcttatcgcacgaagctcctttttgatatgaacaggcagctccaaaaggcagaaacgccggaggaggtctatcggatgaccgcgacgcagatacaaaaactcatgcagcgagacgttctgatttacccggcacagggcaacgccctgctggatggaaacatttatccggctgacggaagtagcccatacagcatccctgataccgacctggaacagaacgtggttcaatgggtctggcaaaaccgcaagcgcgccggagcaacgacgcaaaactttccaaaggcaaaacggctgtatcttgccattcgtaccgggcagcagatttacggtgttgtcgggattccgatggagaagcaaacgcagcctgacgcatttacatccagcattctgttctccatcctcggtgagtgctctctggcgctggataacctgcgaaatgccagagaaaaggaagaagctgccgttcttgcaaagaacgaacagcttcgcgccaatcttttgcgttcgatttctcatgatctcaggacaccactgacctctatttccggcaacgccgatacgctgctgcacagctatgacgtattggatgagcagacacggaaacagatttttacggacatttatgacgatgcgcaatggctgacgggactggttgagaacttactttccattacgaaaattgtagatggcagcgtaaagctgagcctttctgatcaggtcgtggatgacatcatatcggaagcactcaggcatattgaccgaagagcggcagaacatcacatcacagtagattgcggagacgtactgttgctggtacggatggacgcaggactcatcatgcaggtgcttatcaatctggtgaataacgcagtcaaatatactctagttggctctaacatccagatcacggcaatcccacgagaaaatatggctgaaatatgtgtcagcgataacggtcccggtattccgaatgaactgaaggaacgtgtttttgaaatgttctttactgggggcaatccaattggcgacagccgccgaagtcttggacttggacttacgctctgtcaaaccattgttcatgcacatcatggtgaaatgatgttgaaagacaattcgccgcatggctgcatcttttcctttacaataccgcttagtgaggtgaacttaaatgaataaaccgctcatcctcgttgtagaagatgataccccggtgcgcaatttaataacgatgacgctaaaaactcacgaatataggtatctttcggcgcaaaacggcgcaagtgccgtgatggaagcgctgtctcacaacccggacattgtactgcttgatctggggctgccggatatggacggcgtggaaatcatccaaaaaatccggtcgtggtcgaatatgccgatcattgtgatcagcgccagaacggaggattccgataaaatcggggcgctggatgctggagcagatgattatctaaccaagcctttttccgtggacgaactgttggcacgactgcgtgtaacgcagcggagactgtcgatgatgaaaacagactccgtgcaggattctccgatttttacgaatggtgcgctgaaaatcgactatgcggcaggctgcgcatatcttgacggcgcagagcttcacctgacacccatcgagtacaagctgttgtgcctactctcaaaaaatgtgggaaaggttctgactcacacctacatcacacagcagatttggggcagcagttgggaaaacgatattgcttctctgcgggtgttcatggcgaccctacgcaaaaagctggaacgcgaaaaagatgggcagcaatacatacaaacgcacattggaatcggctatcggatgctgcgggtcgaatagcagggaggctttcaaaaaatctatgaatcattatgctgttaaaaacctgtttggcatagaagggctgaacatcgcatggtacggtatcatcatcacattcggcatgatcctcggatttatgctggcacttcgccggtgcaaaaaaccggagttgaaccggatcacttatataatctcgtgctttggctgattcccgtgtgtattctctgtgccagagcatactaggtgctttttgagtgggagcagtacaaggataaccttctctccgtttttcaaatcaataagggcgggcttgccatttatggaggcatcctcggcggtgttgctgttgtactgatttactgcaaggtcaaaaagctttccttctggtcgcttgcagatacgctgattcccagctttgttcttggacaagccatcgggcgttgggggaattgagctgaccatcgttgtaatggggctgtcgcactaacaaatat

SEQ ID NO: 1990 - DNA, 15649 bp, Unknown
  gut microbiota DNA sequence
cttgaagtttcacacactttaataatttctgtatatgtaagttggtagcaagacaaaaagacctaccactgagaattatatatctcattatttcttgtaataacagcatcacatatattatctatataatttgcatagtcttccggaagaaatgggaaccaaggcgccatttttataactttataatcattactaacaaatccattttttccagtcattttaaattgtcgacaaaattctgaaaatgatccaaacagctcaaaccatgatttagaacagttaaaggcatcatacattctttcaaatctttgatttattgaaacatctttgtttaaattatcagactcaatagtcaatgcctttgcaatgaattctttcttaccttcttttagagtctcataataaatctttataagtgctaatgtccaatctattctatcgtacaaaccagcttttccagcacgtgcactatttatttttacaaaaacttctctacctctcggccatgccatgtgcccaccaatagttctgcatatacttaaaaatttaataatattaccatctgatattttccgatatctcgcccaatatacagaaggtcctatgtaatctgtcgacattaaataatcactatcatttaaaaaaatagtatagactggtgacttattgccaaactgctgtttcacattttcaacctttttaataccatgctcaatattacaatgttcatcagaaaaaaatgcctctataaaatcatcatacaactccttgcatccacatgtatcaggatcaattcgtttatcaatattgaatgacacatccaatttttcggcttttccaatcaaataattatatcctttcgctctcatatctacctcgtacgcaactctatttttatctatatcatatccatgcacaaataatcaaaaaagcaatcgtatttttttgcgattgcttttttgcttgttttacattctcaaatataattcggtctgaccaattaaaaacacctcttcagaaattcgattcctgcaattcagacatcacctcttcttatagatcaccaactccgtattctccccaccattctcatacgtactgaccagaataaaatccatattcgccagaaccccgaagcatctgtccccgccaaattccgactccagctgggttcccagatacgtcgtctgatcatccaggaatttaacattcatcccattcggaagccggtattccagattcacgtattttccgataggtgcgttgagcttttcaacctttggcattccctcgatctgaagtgcattgatctccgcgatcagcggttttttgaacgtctcaaattgtccatgatcgcagtgttcctcgtagcgtttccagtaatccagtttcgggagcagttccttcatgtaggcgcgggcttgttcttcggtaaaattttcgtttgccatgtgaccgacgcagacatcgatcagatcatccatatcgctgtatgtgtatgttccatccgcatagcaccacttgcagtaatcttcattcagcgtcccgtcgctgtcatgccccatgattgcatcatcttccagcggcattccgcagcactggcagatcagctgccgcggagccccgagcagggtattgatcgaaacatcgaattcctttgacaagagctttaaggtctctgtgttcggaactgtctcaccgttttcccatcgggacaccgcctgcctcgtgaccatgaccttcgcagccagttcgtcctgagataaacccttttttgttcgcagtctaaaaataacgtcctttgtctccatttcgtgcacctctgttaccagtatcataacagaaaaccgatactacggaaagcaacgcgctgtttcctactcctcagcctccatatcaaacagttccagtacacacgcccttttcgcctgtgtactggaactggattttgccgatgcttcgcatcctgaatcggaaaaatctgctgccgcgacagtatcatacggaattttcagtgcagaaaatccctacccttcaaaatccatatcaaacatacttatctgttccatcttgaagtccgataataccatccttttgggatcatcgcctttcacgtgggtcacgtcaactctctgcactccatttcggatgctggattcgatgagtttcagtacatagatgttgtcaaaccggttatagatggaatcgcctccgagaccggaaaggcagatcagctgcgtattcgtctttttcgccatctcgatcagcggtttcagaagatgttccgcgtttgtctgcgcaaacgggttgtccatgattaggacctttccttcctcgccggaattaaagatgtcggtctcatcccgcctcatatagcttaagagacaggtcaggatcacaaatgcggacaggaaaccttcgccgccggagtttgccgatacctcagaccaggagatcgcaacctcccgttccgcctcgattttatacaaccggatcttcacattctggattcctacgatgtcatcatacagctttttcgtcgtgatcacccgtcccaggaactccgtcagattttcattcttctcgatcgtctcgattcccattttcaccacatgttcaaaataatcatgcagcttcaggcggaaatgctctttttccgtctcccagtccggtacctggattcgcagcattttgaggcttctgccgcgcacagagatcgtagaatttttgtcaatcatgccgatattcgcattgatctgctcaatgtattccaggaacatcatttccagatttttctgctcatcatcgatatgcgcaaggtcgatcttcagtttttccagctgattttcgtatgcctggcggttcagctcaaactggcgggacagattctgcggactggcagtctgcgagagcaggctgtcaaacgttttcctgaaataatcatccgcgtactctttaccggacgcaatctcgcggatcatttctgacatgctgagtctgcattgatccagagctttggaaatctccgccatttttctgcgaatctctttctgatacgttttaacagcctcgatctccgcatttcggatatccggaatctgtgcctggatggcagtcaaggcatcctcttgcccctcttctgtctgcgtgagcatttcaacttccggaagcatctcatcctcatattccgctacaaccgcaacctgtgcagacatctggatatttctctcctgaagacgcgactgcttctgcagctctgtcctgagatcatattcttgtaaattccagcgttctttaaagtttatgtctgtaatcgtctttcgatcgaccggctgatcaaatcccgtttcctttttcaggtttttcatattggtctcgatctgatgtttcaaaacacccagttgttctcccagactgacattcttttcaactgcctgattcagctctttttctgtctgctttttctgacgtttccagctgtcatactgttcttccgggcagatcagttcccggtactcctcctccggaatccggctgtcctcatttttcttttgaatatctttctttttcccctggattcttccgatccagtcattctgcgcttttcgaagttcatcgacactatccgatatttctttcgtcagtgcataatatctcgcttccagttctgccggatccacagattcctgaccggtacgttcatgatttccggctgtttcagcaaaagtttcaaatttttctttttgtttctgcacacggtcgatctgctccgaaatttccttcaccagcgcccggagtccaatctcctgttcctgaagctttatcattctgatcttaagagcactttctttcgccgtcaattctgtattttccttgttcaggcgttccagactcgtccgctctgtctcgtactgctcatattttttgcagagaatatcaaactggtgcttctccctgttcagcttatcgatctgccgtttcaccgtctccgcaagctttttcgtctcttctttttcttcatccagtctgccctgctcccgccggatctcctggagacgttctttcactgattcactctcttttttctgatccgtaatctctttttctgtctgctgatacaaagtggtactgaacgtctgactttcaattgtactcctgtagtttcggtaagtttccaggtccgattccttgtccccgattgactttttcagactttcaatcttcctcctgatcgtctccagaatcttttccagctcctcccgatcaagaagatgtgtattgaacatgacataaaaatgcacatttccatagactgcaaatctcgcatccacagattgccgctcctgttccagttcgtcttttatgatgatcgggatcggaaagctcgtatacagttcctcctcattctttctgaaccgttcaaaatccgcccgctccatcacaacagaatacggaataaacggatttttctttacaagctccgcattctctgccgccgtccgtccgtttttcgtgagccattccattccgtataccgggtcgattccgttctgttccaggtagatcctgatattttccggaagctctgtcgtttttccttccttcagctgccggaactgtttctcctgagcagctttcttctggatcagactgtctctttccatgtccagctctttcatctttccgtccagctgatccagaatcagatttttctgatccatatgggcttcatccatgccgacatacttcatgattctcaggcgttcattcttctgtttctccagatccagaagtttcttagaaagactgtccagctgatgtgcgagatcgttggcttttaaatttccatccactatttcccgggaaagtcttttttgtgtctgttcctgctcgagaagttttccggcatattttgccgattcatttttcttttcctgaagccctgcttccatttcttttcgaaaaatctccagtgcaccatccacataaagacctacgatatttcgtctcagatctgcactgaattctctgttaaaggtgtcttccacctcatcaaagcttttcactcttgaagtcaatgcaccgatatctacgcctaattttcggatcttctgctcattttcaccgaattccttctctgcttcctttttcgtattttcagtctcgacacgattttcttcttcccgcttcttctgtttctccagcttctctgccttcccgtaatacagcgcatacagctgacttccgatctttccgatctcatcctttgattcttccgtcttctttaaaagcacctgcagctttgcatctacctcggccttctgacgttcaaaatcctttaattcctgatagagcttatgaagatcataccggtcgatctcccgtgtcaactgatttttccgataggtcagctctgtgatcgccgtctcctgctgtgttctcttcgcaaggagtgctgtcttccggtcctcatcaatgtaaattccatatgagagctcctcataaacgatccgtctctgttcccttttgatctggtctattttctcctgtccggcagcaatttccgtctccagccgcttcaattctctctgcagcgccttcacataaaggatcatctctgttctgagagccgctgcatcatgatctttctgaacataatcatcgatctggactttcaatggcttcgtgtcctcaaaatactgttcaatgatcccttttcgctgaattttcgactgattactcttgtattgttcaataaactggaatgcaagtttccggaactcatccgtcttatttttttcctggtttaatttatcttcaatagggcgaaggaaccagttttccaccagattcttctcatctttggcattctggaaaagctctgaaagtcccgactccttctggttgacctttcggatgatgctctcccattctttattgttgacctgatactcgcgaagtttattaaaatactggcctcttccataggagctggtcatgtcatacagccgaaagtttctcgactcacttttactgatctcctccaacaggtttttgcattcagaaaatcccctcaggatctttttgctaccttcctgtctgatgaccggaagattctcaatatcatagctgcaggcttttgaataattgccggtaaaagtgtacatttccagctcttccgcgtcattgtcttcccgctggcttttcctgaccatcatacctgccaggaaacgatcggctttattatccaggatccattctgtcatgataaatgtcggccggttcgtcgtaaaatagctcttaaacggccggtctccgaaatcacgatatgagcggttgacaaaaaggctcacaatcatctgtaccagcacgctttttccgccgccgtttctcagggagatgagtgtgttctgaccattgaagtcaaacatctcgtcatcaattttgatggtgttattgttatagttcaggtttaaaatacggatcctcgctatcttactcatatgtttcccctaatgcctccatgatccttgcatagttttctttattcaggatcttatactccatcacgttgtccagctttgccgtcgtcttgatcatctcatcttcccggacgaaaacgatcaacccttgccgatcgagaaactcacagataatgctcacatagccttcctttgtatactttgaccggcttcccgtttccacgctttttaaggactcataggcctcgctcatactcttgtaatccaggacattttcatacatttctgtgtaaagatttgttccatcctgttcccgctcctgttcaagcgcaagtcctgctttcagacgctctgatacgagattctgcagctccccgagttttaaaaattccctggatttactggtacttccctgtccgtcataaaattccaccaacagcgtcaggattacgaactgtgccagataataatcccggtctgtagcattcggtttacataattcttttttcaggtctgccttcgtaaaaccgaggtatttattgtcgatatccggcatcagatagatcgtcgtcccgtaccgctcgattctgcagtctgcaatttccgcctgatttttcacaagattcatgacctcttcatgttccacatacgcgcggtacagatcattgactcccgcatccaggtcactcagtgccccgtggcacagaagataataaaatattttctggctgtatgtgatcatctctgcttcgtatgccatcttctatctctcctcataccggaatcccacgttggaacatctgaaatttcttctgtttccgttttcatccattacattcttaaagtacacatgcgcactgtcttccatcgggaaaataaacatctttccgattttccggaattcccggtcttccatcagaccaagtaacatctcattcagtacaaatccatctgacgcatccataagataatccgattgttcattttgaagtgctccgatatcgattgtgcccgctgtcaggaattcgatgatcacctcgcgaaaaatctctgcagtcggaagaagctgtgtccgttcttcttctgtacacaccatatttaagatttccagcgtcatttctttatatttgagaagctgttccaggattcccttcacacagccctcatattttttcatccgttctttcctgcgctcttctttctcccggttgtactcctcttcatcaaaatccagctccacggtctcgtcttccacatccgctttttttaactttttctgatattccagcattttctccggattaaagatcttccccacccgtccggtaaataacggactaaaaattttatcaacatttttcaggagtgagacatcttttaataccttatcatacacatcgctccggaacggaaaccgctggaccagtgtcatgttcgagtaattttccagctcttcatcatataatttcttcagatcaaaatgctgaccgaggattctctggtgttcatccagagtctgcgtcagatatcttccgatcacacgaagattgttcaagttgcccttttctttttccgtgaatgtttccgcattcatctgtttttcttcaaattcttcaattttctcgtcgataaactgcctgtgaagattgaatttttctcttgtctcgactacagtgttgatgttgtcctccaccagctgcccatattcttctactgaataagccaacgcatttctccggaccgacaggattgcctcctcgatcttctggctctgttttctaagctgactgaagatatttttgatatcttccacagccctgttataatctgccttttccagatgcagcttaaagagcatttcatggaccgaaagtttcagattattttccatttccatcgtggagagcatcatattgtaaccctcgtccgtcaggtaataggatgttcttctgacgccactctccagatacacgaccttgttgtcgatataacggatgttgatttccttatatgtccgtttttcatagtcaaaagccttaaaatacatggaagaaccgctgtttccaaggatatcctccaccataaatctcgcaaagtcccgactctgctcaaagctcagctttttcgcatggtactcgtagctgatgtcttccacgaacgccgcaatatcgtccatcgtgcagttttcttcccgcaaagaatactccatgataaaaagcagcagtgtaaacaacatattcatctgctcatcccgcgtctctatgccgtaatccttccactgctgctttccaaagctgttgctgcagagcaacgcatacctcccgacaaatttcattcgctgctcaaaattctttaaaaaatctttctcgatcatcttttatcaccagttttgttcatttatcataacctttccgtatcacttctgtcggttggctaccagtcatgctcatttagaatttcctgtggaatatattttcctgctgacaggatttcatggatctgtctccttctctcctcatcaaacacatccagaaataccgttccaatattcgaattctgcttttccttcatgtcaggaagagctgaaaaaccgatctgaagcgccttatccagcatcgcctcgtatgctttccggaaaagttggatcattccggcactgccatttcccttcctgtcccattggtactctttctgctccagaagatgttcatagatcagaatcccctcataatcaagatctccgaaatagaacaattcattatccccaaggaaataggattctgccccattcacataatccgcaaacgtcttccagattccttttcctgccccgtagatcacagtaccaaactgttttccaaggatccggtcatgccccgcattcatacagcgccggatatcaaaaaatgtgtctttattctccacgatcagaatgttctgaggggtctgtttggaccgggaataataagagagcggctcagaagtctcataaaatgccagctgttcccgactgatcccaattttcctgcaaaattcgagacctccctctctctggaaaaacttttcccgacggaagatctcgaagctccgctcattcatcgtctcctcggtatcaagcagtttggaatgatctttcagataatcactcagaatctgaagtttctccttgtccgtctcatagcattccggatggttcctgtaataggaagtattgatcagaggatgatacttatacttcagttcctcatagatatccgtataatccggtttgtcttcatatttccagaagctgagcggaagcgccggtctccggccgttgctcttcgcatttttcatcggaacaagctcgtctctcctgatcagctccatcacatatgtatagaatttctgatagtcttccgactccggatactcattgagcaggtcctgcaggtatactttgtgtttcttcattcagagattcctttgcatttttctttccatattttctgaatccatcaccatctgcccgatcgagttatccgcagattcgcaggatcctatggatatttttccattggcactcagtcgtctgcttcgccattcctcttttttatacaatccgttactgcctcctgaaacagcagcacttccacaacgccgacaagaatcgcagccgcctttaaaagacgttttccgtttttgtcatcttccaggccctccgacagctttaagagcaacgccagcatcccaatatttcccactctctgcagatgccggttcatggatcgcatttcaaaataaatatccctgcatgttttgtctttttccatttcatagtcctcctattttccatatgtttgactttctgtatctctttgagacacagtatatcacattaggtgtcctataatttggtcttgcatatcgaaagcaaaaaaatttatcagatttctttctccatccacttctcaatcttccccacaactccaagatccgccggcagccaatccacgctgtatggctgccctgcagcattcttctctagtccctacaactgatcatacttcgcagacttcccccgcgccttttccaccggatactttttctcattcatccccattttcatattcacgatctcatctgcatccagccccagcttgtctaaaaggttctgtgagtagacgatcacatctgccagctcttctttcacatgctgaagatcatactcctcatcactccactgaaagcattccagaagttctgctgcctcaatgacaatggattttgccagattggcggcagaatggaactggtcccagtcgcggtcgtcggtgaattttcggatcctgtctatggtttcctgtctcattgtattgctcctctattttcgattgtgcacgcagctcccttaatcctccagcctcggtccgatctccttcgggatcgggcattcgtagatgccgtttgtctcggccagccattcgtcgtgggctttctttaagatttccgggctttccatggtctttaaggcggccaatgctatggcctcacccgcatttaacattgccttgtgggcgatctccgtgttgccgtgtgcggtcatctgccaggtgtgggcggcagtgccgagagtcgctgtcgccgtggtacacatcgccgttgggatcacatagctggcatcgccgacgtcggtggaacccgcctggacctttccagtccatacaagcggagagatccgggtgtggagcgggcgggcttcgatctcatccagatgatctgcaccgaagagtttccgcagggacgctcgctttgcctccagttcctccggcgtcgcggtctcatggaagaatctggatgccagtgcaaaatccgcctcatcgtaagccggagcgccgatctcctccatggactcatgaagaacttccgagagtacatggttcgggatgtaatcggaaagacctgcataaagctcatatgtcatctcagtccctgtcatctttgcggcgccttctgccacatcaaccacacgcctgtagatttcctttacctgccaggactttggcgcgcggatgaaatagtggacgcggctgtgtccctggacaacatttggggcgattcctccgacatcacggtacgcgtagtggatcctcgcgtcagagatgatatgttcccgaagataattgacaccgacgctcatgagttctgccgcatccagcgcagatcttccgagttccggagctgccgctgcatgggaggtcacacctttgaagttaaagaagacgctgacattcgccagagtggactccgaccagatttcgttcttatcgcccggatgccaggtgaacgccgcatccacgccgtcaaagattccctctcttgccatgatcgccttgccgtcgcctttttcctcgctcgggcatccaaaaaggaccacgcttcccgcttccggatgctcctcaagatacgctttcactgcaagcgctgccgccatggctcccgcaccgagcaggttgtggccgcagccatgtccgtccgggttctccccttcggctttctttctcatcgtgcagccgccttcctgggacagctccggaagagcgtcatattccgctaaaaatccgatcaccggcttttctgttccatatgtagctttaaatgccgtcggcatgccgccgactcccatttccacctggaatccttcttttttcagaacatcctcatagagttttgcggtcttaaattcatgaaagcctgtctccgcataatcaaaaattttgtcactcacctcgacgatcaggtcttttttgtccgcaactgcttttaaaacaaattcttttttatccatcgcttctgtccgggatccggatcttcctttcattgtttttttgtctgactgctcttcacgagcaaaaatttttcaagtcgtatttccatatgttgcagcggcagcagcagactttactgctgactttccacatctctcctatttgacagatccattgttttcgaatagacttaattatactatttttatgatttttttacaacaaaggagctacctctaaatgaatcttcaaaacatgcaatatctcctcgagatctccgactccggctctctgtcggcggccgcaaagcggctgtctgtgacccagccgtacctgagtaaagttctccgtgagacagaaaaagaatacgggatcacgatatttacccgcggaaaaacagggatcatcccgacggaatccggacgtctgtttctcgatatgagccgggatctccttgaacatgcagagcagttccgccagacattccgggagcacccggactcctgccgtcttcggattgctgcagactgctgttttcctgagaatgatgccctgagtaagacgatccatgccttttctgatcagcacgatcggacattccgccttttttaccgcgagctggcaggacacgaagtcatccgggaactcgatgccggacatgcagatatcggtttcatcgtgtatccggaatcccaaaatgaaaaggtacaggagcttctggctcttcacagtctggaagaacagatcctgtttcactctccccttcagcttttctgccggaatgcccatccggttctgaaggatccaaatgcactgactccggagcttttcgatcaatacagttttgttctgcattccgccgaagcggcatcccagatttctgcagaaagcagcattctaaacggaatccagtctcttatccgtcaggatcagctctccgggattacctatgtgaacagccgtgcttctttttacagcatcgtcgagcagacggattcgatcgggatcggcattgctccgcttcatgaccgtgaaaattcccctgagatcaccgcgcttccggttccggagtggttgtggcccgagagcgggcacgatcgtgagcttgttgcttcctgcatcttccgcaatcgtgtacgcctctccccggcagcccagatgtaccttgctgaactctcccgcctgtaaaggaaacaaagcctggcaccttcgcgtactgggtgcagtcgtttgcgataaaaaagctcccgaaaagaaccacatcatatctataacatgcggtttccatccgggagcttttcctttctgcccaagtctcactgcttttcacagccagattctcaggcactcgatcttaattgtttcgcagcatcttccctgcgcttatccccacactctgggatctcacatcatcttatccaccatgcccatcagctcatcaccgacagctttggacttcgcctcagcgtcgtccagggatgttcccttgacgccatagtagaatttgatcttcggctcggttccggacggacggatgcagagccatgcgccgtcgttcatatcatagtaaagaacattggactccggaagacctgtctcctttacttcgcccgtcgcaacctctgtgatcgtgttcttcttgtagtcacggacagaagttacctcgtaaccgccaagtgccttcggcgggttcttgcggaagttctccataatttcctggatcttcgcaagtccctcaattccttttaatccgatggattttacggtatctttatagtagccatacttctcgtacattgcgaccatcgcatcccataaggtcatgcccttttccttgtagtaagcggcagcctcacagagagcggcagttgcggagatcgcatccttatcacgggcatatgtgccgatcaggcagccatagctctcctccataccgaacatgtaggttcctttgcctgttgtctcttcttttaagatctgctgaccgatatacttgaagccggtcagaacctcgacaagcttgcagccatagtgtttcgcaacggcatcaaccagatttgtggtaacgatggattttacgacttctccgtcagccggaatctttcctgctgcctgtttctggcttaacacatagtcacataacagggagccggacatatttccggtaagcgggatatattcaccggactttgtatcttttacataaacaccgagacggtctgcatccgggtccgttgcaagaacaaggtccgcgttcttctcttttgcaagcttcaatccgagttcaaatgcctcggcagcttccgggttcggatagctgacggtcgggaaatctccgttcggaagttcctgctccggcacaacatagacattctcgaagccgatctctttcataacgcggcgggccgggatatttccggttccgtgaagcggtgtgtagacgatcgtgatgtctttctgcatgcggttgatcgcttcctggttgactacctgggcttttacctgggagatatatttgtcatcgatctcttttccgatcacctggaattttccgctctttaacgcctcttcctcggtcgtcgttttcacggtggagagatcctcgatcgcaagaacttcggccgttacccctttatcatgcggcggtgtgaactgtgcgccgtcctcccagtataccttatatccattgtattccggcgggttatggctcgcggtgatgttgatgccggcgatgcagcctaactcacggactgcgaaggacagttccggtgtcgggcgcagggattcgaatttatacgccttgatgccgtttgcggcgagtgtcattgcagcctccatggcaaattccggggacatatgacgggagtcaaacgcgatcgcaacgcccttgtctgctccgccctgtttgataatatagttggcaagtccctgagtcgcgcggcggactgtatagatattcatacggttgattccggcaccgatgattccgcgaagtcctgcggtaccaaactccagatccatatagaaacgttccttgatttcgttttcatcgttcgcgattgcgcgaagctcttctttcgtcttttcgtcaaagtacggattggcaagccattcctggtagatcttcatgtaatccttcatgttttgactcccctcatgcattatttttccggggcggaaaagataattccaaccacctgtaagataggttcattatattacatttcaaatgaaaaataaagttatttccatatcccgtttcttgataatcttcttgttttaaccccaaaaaccttctataatgaacatgtgtcgtgcaatcgaaaaatttttgtttgaaaaaatattttatattgagtg

SEQ ID NO: 1991 - DNA, 13148 bp, Unknown
  gut microbiota DNA sequence
aaaacagaaaaagaacggcaaatacaacgtgatccagatcgatccgtcctatgttccggctccgatcgagcacaagcaggtattcggcgtgaccttcgagcagggaagaaacaacttaaagatcgacaaagatcttttatccaacgttgtgacagaaaacaaggagatcccggattccgcaaagatcgaccttatgatctccctgatcaccttaaaatacacccagtccaactccgtctgctatgtaaagggcggacaggcgatcggtatcggcgccggccagcagtcccgtgtccactgtacacgtcttgcaggccagaaggcagacaactggttcctccgtcaggctccgcaggtattaaatcttccgtttatcgacaagatcaaacgtgcggaccgtgacaatgcgatcgacgtttacatcggagatgagtacatggatgttcttgctgacggcgaatggcagaaagtcttcacggagaagccgccggtattcacaaaagaagagaagcgcgcatggctcgacaagatgcaggatgtggctctcggatctgacgccttcttcccgttcggcgacaatatcgagcgcgcacacaagagcggcgtaaaatatatcgcacagccgggcggatctgtccgtgacgacaacgtgatcgaagtctgcaataagtacggaatggcgatggcattcacaggcatccgtctgttccatcactaaaactgcttgcaattttcatgttcttatgataaacttatatgcggctgttgaaatatacagccgcgaagatatgccggcgtggcggaatggcagacgcatcagactcaaaatctgacgggggtaacttcgtgccggttcaagtccggccgccggcagaaacgaaaagacatgactctcattagatggtcgtgtctttttgcgtttacgcggacaatgaaccgggatccgcgtatattcaggctgaaaggagtgtgttccatgacctgtatggaagcagaaaagatggtagttccgtatatgaaggacgaactgtccccgacggagctggaagatttcctggaccatatcaaaacgtgtgaaaactgcagggaagaactggagatccactacatggtggatgtggggttaaaaaagctggatgaagcggatggaacatatgacatcgtgggggatctgaaacgaaaggtagcggaatcctaccggtccctgtgccatatctccacattccagatcgcatcctacgcgatctcgactctgtgcggaatggcactcatcgtcatgatccttttgcagctccgcatctggacaacgatgggatatctatagattttagaggagtgaacatggaaaaactcgtattgatcgacggtcacagtatcttaaaccgcgcattctacggtgtgccgaacctgacaaattcggaaggtctccatacgaacgcggtctatggctttttaaatattttatttaaagttctcgatgaggagaaagcggactaccttgcggtggcttttgacctgaaagccccgacgttccgccacaaaatgtttgatgcctacaagggaacaagaaaaccgatgccggaggaacttcatgaacaggtaccgctcatgaaggaggtcctgaccgccatgggtgtcccgatcctcacaaaagaaggctatgaggcggatgatatcctcggaacgatcgcaaagcgggagcagaaagagggctatgaggtgacgatcctctctggagaccgggaccttctgcagctctccgacacccatatcaggatctgtctcccgaagacgagccgcgggacgacggaggtccacaattattaccctgaggacgtgatccgggaataccaggtgacaccggaacagtttatcgaagtgaaagccctgatgggcgaccagtccgacaatatcccgggcgtcccgtccatcggtgagaagacggcgacaaacctcattgtccagtaccagaacctggagaacatctacgcgcatctcgacgaagtgaaaccgccgcgcgcgaaaaaggcgctggaagagtataaggatctcgcagatctttccttaaagctcgcaaggatctgcattgacgccccgatcgaattttccatggcggatgcgaaactggaaaatctctacacgccggaagcatatgaatatatgaaacgcctggaattcaagtcgatcgcggcgagattcggcgaggagatcaaacatgaaagcggaccggagaaacagtttgttcttgtggaggatttttccgaggcggatgcgctctttgaaaaagcaaaaaaggcggaccgcatcggaatggaacttctcgcagaaaacggttccgtgacagccctcgccttatgttttgaggagaccggaagctatatcttcccggtcggcggctttatgacggagagctatatcgccggaaaatatgaggaactctgccgaacgggtcatgcctgggtcctggatctcaagcactccctgccgttcgcggatctttcctacggggacacggtctatgacgccggggttgcggcatatctcttaaacccgttaaaggattcctacggctatgacgacattgcgagagatcttctcgggatgacggtcccgtccaggccagacctgatcaaaaagctgtcctgtgaggacgcatacgcgaaggaaccggagaatttcacccgtatggcgggacttatggcctacacagcctttgcggccggggaaccgctcctggagcgtctgacggcagatggaatggaagagctgtaccgcacgatcgagctccctctgatctataccctgttccatatggaagcggaggggatcgcagtccgcagggaagaacttgccgcttacggagaaaagttaaagaaacagattgcagtcctcgagaaggagatctgggagatgaccggacaggagtttaacatcaactccccgaaacagctcggcgagatcctgttcgaaaaaatgcagatcaagggtggaaagaagacgaagaccggctactccacagcggccgatgttctggagaaacttgccccggattatccggtgattcagaagatcctggactacagacagtatacaaagctgaattccacctacgcggacggtctcggaacctatatccgggaagacggacggatccacagccggttcaaccagacgatcacggcgaccggccggatttccagcacggagccgaatctccagaacatcccgatccgcatggaactcggaagagagatccggaaagtctttgtcccgcgcgatggatttatcttcctggatgccgactactcccagatcgagctgcgcgtccttgcccacatgtccggcgatgagcgcctgatcgaggcgtataagaccgcccaggatatccacgcgatcacagcttcccaggtattccacatcccgcttgatgaggtcacaccgttacagcgacgcaacgcgaaggccgtgaatttcgggatcgtgtacgggatcagcgccttcggactcagcgaggacttgagcatctccagaaaagaggccatggattacatcgctcgctattttgagacatatccgcaggtaaaaaccttcctcgacagccttgttgcccacgcgaaggagcagggatatgtcaccacgatgttcggacgccgccgcccggtaccggagttaaagtcctcgaacttcatgcagcgttccttcggagaacgtgtagccatgaactccccgatccaaggaacggctgccgacatcatcaagatcgcgatgatccgggtggacgagcggttaagaagggaaaatctccgttccagactgatcctgcaggtgcacgatgaactcctcgtcgagacggcggaggacgaaaaagagaccgtcatgaagatcctctccgaggaaatgcaccatgcggcatccttaaaagtggagctggagatcgacatgcatgacggaaaaaactggtttgaggcgaaatagatgaaacagaagaaaattattgggatcaccggcggagtcggagccggaaagagcagtgtgctcgcggtactgaagaacgatttcggggcgaagatcattctcgcggatcttgtggcccacgatctcatggagccgggaagtctgggactcagaaaggtcacagaggcgcttggaacgtcatttctcaccccggacggagccgtggaccgaaaagcgctggcggacctgatcttccgggataaagaagcattaaagacgatgaactccatcatccatccgttagtctggaagacgatgaaggaagaggcggaggccgccagtgaaaacctcgtgatcatcgaggcagcagtctttgacactgcgccgaagaacttctttgacgagctctggtacgtctacacgacaaaagagaaccggatcgtccgcctgatggaaaaccgcggctacagccgtgaaaaatgcgaggacatcatcggaaggcaggcgtcggaggaggaataccgcgcgctctgcagccgtgtcatcgacaacaacggggacgaatccgatatcaaacgacagctgaaggagatccttgaccatgagatttgttagtattgccagcggaagcagcggaaactgcatctacacagggacggaggagagccacgtcctgatcgacgccggcatcagcgcaaagcggatcgagcagggccttaacgaggtcggcttaaagacgagcgaactggacggcatctgcatcacccacgaacattccgaccatgtaaagggactgggcgtccttgcgagaaaatatgaagtcccgatctacgccacagaagggacactcgacgagatccggaagatcaaaggcctcggcgaatacccggaggagctgctgcacccgatcctgccggacaccgaattttccctcggggatctgacgatcaagccgttccacatcgaccatgatgcggccgacccggtcgcttaccggatccagtcgggaaataagtctgtggcagtcgcaacggaccttggacatttcaaccagtacacgatcgaccatctcctcgatctcgacgcggtgctcttagagtccaaccatgaccttcggatgctggagacgggaccgtacccatactacttaaaacgccgaatcatgggagatttcggccatctctccaacgagaacgccggacgcctcttaaactgcatcctgagcggccgattaaagcacatcctgctgggacatctgagcaaggagaacaacatgccggagctggcctatgagaccgtccggctggagatcgacatgggagactgcccataccatgcggatgattttcacctggcagtcgcaaagagagacgagatgtcggagatcatcagtctgtagcagattttgctgatgctgcgaaaaaacacttgcatcttaccggctgtaatgatatattttaagaaaattttacgctttatcactgcataaagctacctttccccgggatccatatgttccggcaacgatctcagtccggacggatccggatcacaatacgcggaaggcacaacacaaggaggaaaatttccatggataaagttattatcaccgtagtaggaaaagacaccgtaggcatcatcgcaaaggtatgtacatatcttgcggaccataaaattaacatccttgatatttcccagaccatcgtccaagaatacttcaacatgatgatgatcgtggacggaagcggagcaaacgtttccttcgatgaaatgtcttccggactcgatgagatcggcgccgggatcggcgtcaacatcaagtgccagcgtgaagagatctttacaaaaatgcatcgtatctaatgacagcttgaggagagggaaacaattatgattacacatctggaagtcaacgagactaacaatatgatcgagcacgagaacctggatgtccgcaccatcactcttggcatcagccttttggactgctgtgactccgatctcgaaaaattaaacgaaaagatctacaacaagatcacgacactcgcaaaggacctggtcccgaccggaaaacagatcgagcgcgatttcgggatcccgatcgtcaacaagcggatctccgtgacaccgatcgcccttgtcggcggagcagcctgcaagagcccggaggactttgtgacgattgcaaagaccctggaccgtgcggcaaagactgtaggcgtcaactttatcggcggatattccgctcttgtatccaagggcatgacaacagctgatgagaacctgatgcgctccatcccgcaggcgttaaaagaaaccgattttgtctgcagctccatcaatgtcggctccacaaagaccggtttaaatatggatgcagtccgcttaatgggcgagatggtcgtaagaaccgcagagtacacgaaagacaacgactgcttaggctgcgcaaagcttgttattttctgcaacgcacctgacgacaacccgttcatggcgggagcattccacggcgttacagaggcagacgcgatcatcaacgtcggcgtctccggaccgggcgttgtaaagacggctctccagtctgtccgcggcgctgatttcgaaactttatgtgagacgatcaaaaagacggcattcaagatcacccgtgtcggccagctcgtagcgaaagaggcatccgcgcgtctcgggatcccgttcggcatcatcgacctgtccctggctccgacaccggctgtgggcgattccgttgctgagatcttagaggagatcggtctggaacgcgcaggtgccccaggtacaacagccgctctcgccatgttaaatgaccaggtaaagaaaggcggcgttatggcttcctcctacgtcggcggactttccggcgcctttatcccggtcagcgaagaccagggaatgatcgatgcggtcaacgagggcgctcttacgatcgagaaactggaagcgatgacctgcgtatgctctgtaggccttgacatgatcgcagttccgggagacacgagcccagcgacgatctccggcatcatcgcagacgaggcggcgatcggtatggtcaaccagaagacgacggcagtccgcctgatcccggtgattggaaagggcgtcggcgagacggtcgagttcggcggtcttttaggacatgcgccgatcatgccggtcaactcattcagctgtgagaaatttgtgaacaggaccggaaggatcccggcaccgatccacagctttaagaactaaacaggagaaactatgagaatctatctgatccgtcacggcaggcagaacagcccgctttgcaacgtaaatgtgccgctttccgatgcaggaaggcggcaggccgagctcctcggcgagagactgaaaaaggaatccatcgacgccgtctggtccagcgacctgatccgcgcccgtgagaccgccgatatcatcaatgagaagatccgggcgccgaggtttatccgggaaggactccgtgagatctctttcggtgatcttgagggactttcggacgatgtgatcatggagcgctacgcggactttttcgctgcaagagcgtccatgaaacaggatcttccatatccgggcggagagagtgcggcggacgtgatccgtcgtgccgttccggtcatggacgaaatcgcaaagtccggtgcggagacggtcgctgtcgtcacccacggaggcgtgatccggagtcttgtgacccactatcttcacatggacggggcgtatgttccgctccttgcgagacatctggaaaactgcggcatcacggagttttattaccgggaatccgacggcgaaatgctgttaaaccgttttaacgattttgcccatctgacggatcatccggaacttttgcgcggcggctggggagagaaaaagtgatggaaaagagagaacttcacagtgtactcactgattttttaaatgagaacctgatccaggcgactgccagcggtcaggcggagaaaaatgattttctgaaggcacggatccgcccgatactggtaaagggcgtcctgcattttcaggcggaggaatttatcggaaaacaggctttccacaaaaatctgacagccgaagaagcggctgcctatctggaaggtctcatggaaacaagtttccgccagctccagctcgaggcgagagataagagcggttccgttcttgtgagcaaaaagggaaaggtgactgttaaggtaaagaaaaagccggtttctgggaatacctccggaaatggggcatcagcttccggaacaaatggttccgacgcttccgacgcggctcttcaggctgcctgggcgaacggactttcccataaccggaagaagcgctacatcctcgaagaggggatcccggtcccgttcctcgtggagctcggtgtccagacgaaggacggggcgatcgtccacgcgaagtacgacaaattccgccagatcaaccgtttcctcgaatttatcgaggacgtgctcccgaagcttgataagaataaagagacgaggatcatcgatttcggctgtggaaagtcttatctgacgttcgcgatgtattattacctcaaggtcttaaagggatacccggtgcggatcaccggtctggatctgaaaacagacgtgatcgagcactgctcgcagcttgcaaagaaattcggctatgactccctggaattccttcacggcgatatcgcttcctacgagggcactgaccaggtggatatggtcgtgacgttgcatgcctgtgacacagcgacggactacgcgctggaaaaggcagtccgctggaacgcaaaggtgatcttatctgttccctgctgccagcatgaggtcaataagcagatgaagagcgatctttttgccccggtattccgctacgggatcatcaaagagcgcatggccgccctctacacagacgccctgcgcgcggagatcctcgaggccatggggtaccgggtccagatcctggaattcatcgacatggaacacacgccaaagaacctcctgatccgggccgtaaagcagggaaagaagaaggagaaccggaaggagatcgaagcgatcctggaggcgatccatgcggagccgacgctttaccggcttttattagaaaagaacccaaacgcataactgccgccggcagctcaaaaaagccgcagataccttttcatggtgctgcggcgcattttttatcctctgatttcaaatccctgcatgatcgcatgtttcaatataatattaggatattgacagaaaaaggagtaccaattactatggaacgtttgtatcagtatgatgtcgttgttgttggaggcgggacagccggagtgtctgctgcggtcggcgctgcgaaaaccggagcgaaaacacttttgatcgagagaaacgcttatcttggcggagaggcgacccattccggggtcagcaccttctgcggcttttttacctgcggaaagaatccggttcgtgtcgttgagggcgtagggcagctcgtgttagatgagatgggggcacttgggccgaccgtggactatgtcatttccgcgaccggaaactacaatgtcaatttccagcccgaatacttaaaatgtgcgatggacaatctgttggaaaaagaacatgtggattactttttgcatacatacatgaccagtgcgaaggtagaagatggatccattgtttctattcagtgttctgatgatgagggaagttttaccgtaatggcaaaaacctttgtggatgcatccggagatgcgaatctcactcatcgctccggggcaaaactgatatggggcggagacgacggacacccgcaggcggcaaccatgccattccggttaagcggtgtcaacacgaactgcgacatgtcacctgaagctgtggggcgtgcagtaagaaaggccaaggaggcaggaatcccgaaccttacaagagaaaagggatttatcctgaaaaaagagtattctgatattgtcagtgtgcttcttccgagtgtaattccggagggactgacagccgcagaccttacccatatggagcgggaaaccagaaaacaggtactcagttatgtacaggccttaaaaacctacatgcctggcatggagcacgcagagttagcggtcatcggaccgtccatcggttttcgggaaacgagaagaatggtcggaaaagaaacccttaccgtggatgatgttcttaccggaaaaaagtgccagaacagtgtagcccgctgtggatggaaaccggagatccataaagatgttgacaagatggcaacttatctggatgtgaaggaaggaagctatttcgacattccacttggtgcactgcagtcagaaaacatcgaaaacctatacggtgcaggccgcatgatttcttccgatgaagcagcatttgcggcagtccgcgtcatgggaacctgctttgcaaccggacatgccgccggagttgccgccgcatgccatgccctggagggaacggcagagataaaacacgttcaggaggttttgaaaaaacagggggcattggtataggatgcgtagagaatatccgaaaaacggtatcaatttttgaaatgcgtcttgaagacgtttttcgatttctgaaatgcatctcgaaaaagacagaagtctaaaagaagacgtaatgatcagaaatacggaaaaacccggatactcacagaatatccaggttcttcacactctttctccggtcttcctcgatcgccgcatagaattttcttgtaatatttacatcattatggcccagaatatctgcaaccaggtagatatcgttggtctccttataaacagcgctgccatagctgctccgcagcttgtgcggcgttattttctttttcggtgcgatgatcgatgcgtatttctttacaaggtattccacgctccgcaccgtgatccgctgattgcgcagggagagaaacagggcatttttgtgttccagcaatgtctcgatgccggtccggaccgccaggtactcattcaggcgccttgccacctccgcattgaaatacacggtcgtctccttgccgccttttctgcggatatggatcccgctttctttcatgtccacatcatccagattcagtccgacacattccgatacgcggatcccggttcccagcatcagtgccaggagagcgctgtcgcggagtctggtccgttcatgaaacgctttctgtctgcctgacaggccggatccgctgtcaacttccgccagcagctccttcatttcctccgaattgagccggacgatctctttggcatgagtccgcggcatctgcatggaaagtgtcggatttaccgttaaaagtcccacgcggcaaagatatccaaagaaactcttcagtgaaaagaacttccgtttaatcccctgttccctgttcatattcttgtgttccggatcatttgggcggtatttgagatcttccaggtaacgctcgatatcctgcacggaaatctgcgagagagcttccgtctgcagctgctccaacggaatttctttccattcctcctttatctccttcagaaaatgaaaaaacatcgtcagatcatacgcataggacagccgggtcatggaagatgtcgacggctcgatcccgcgaaaaaagtctgtacagcaggatggaagagcagagagcattgctttcagcttttcttcatttttctgatcccgctgtgcaaagtactgcgactcactcatactgtctgctccttaatattccctgaatttttgccggaagaagcatcagctgatacccggaaatgttcaagttccgcgatgaggcgggcattttcccggtcaagcttgcggaattcttcctgcatttcccgttctttggctgcaacagcccgttccatcgcaagatccgcctgcatctgtgcctgctttaaacggttctgacagtccgtctcttgttcctttaactggctgtttaacccggcaagctgcattttattttcagcagccgcatgttccagctcccggaccatggctgtaagtttcccggtctgctcttcgtaatccttttttgccgcagtttcattcgcgagctgacgggagagttcttcctgctgcctgctcagctgttcattttctgatttgatcgccgcactgatcttaacgatctcgtcataatgggccgcctttttctgaagctgttccacctggtctctcagcacatggttcagttcttccagatcattggctgacttccgggcagcctccatcgcctgtttcatactgagagcattttcttcgatttgttttttctcctcgttcaacgcctcaaacgatccggcaagtttctctttttcgttcacagcctggtcggccttttcccgcagttcatcgatcgtccggtctttccgctgcagatccgttttaaaacgctccgccacgcgggcctccgtcgtgtttccaagttcaagacttgtgagatatgcggcaagaagatcttttgtcaaccgctcaaaattttctatctcaacggcacgccccggggtcgctgcctttgcgttatttaactccaacacctggatcagatgatcgaatccctgtgcctgattcattccatttgcagtgcagaacgacctgaacgcgtccgcagacgcctggtcgatacgaaaattgacctgccggatctctttttcattcttttctgtgctcattttaccgtacctcctgaattgtccttagtatagcatggcatgggagaggagtcaacttgatcatgcgaatgatatacatgttatacatagatattgctatacatagctattaaggggcaaaaaccagagaaaaagcaggcaaaagcggagagaacagagttgaatacagggaaaaggtgtgaaaaagcagataaaacgtcagaaaattcaagagtgcgcgcacacaattaaaacaatttggctcagaacccgccgaaacggcacgtattatttcgcaaaacccgagttttacgcaataatatggggtgagagatacagaacaatggaagatgcaagttgactatacttttattgaaatagagcgtcaattttaagaaaaatagctgcttgcattgtaatagtagagttattattgtgaattagtcctattaaatataaaaaacagtttaaagtttgctataaaacactattttattaaattgagagatatttt

SEQ ID NO: 1992 - DNA, 2490 bp, Unknown
  gut microbiota DNA sequence
ccctgtccgtgtacaggaattgcgtttgcgaattcttttattttcctgtataatatccttatctatcataacgtcggagactctgtttgtcaaataagtctcctgagaaaatatgccgttaatatcacggcgtggattttccggactgaaaatcccccgcgttgcagaggcggctttaaagaaagtgaggaatttacatgaacgtactgatcaccgggttcgaccccttcggcggagaaccgatcaatccggcatgggaagccgtaaaagccatgaaagacgagatcgccggggcaacgatcacaaagctgcagatcccgaccgtagtcgctaaatccattgcgaaagtccatgaaaaaatgcaggagctccacccggatatcgtcatcagcatcggtcaggccggcggacggttcggcgtgactccggagcgtgttgcgatcaatgtaacagatgcaagaatcccggataacgaaggaaaccagcccatcgatgagccgatctttgcagacggagatgctgcctatttctccaatcttccggtgaaggcgatggttcaggagatcaggaacgccggttatccttctaccctctccaacaccgcaggaacctatatctgcaaccatgtcatgtatggaattttatactatatccaaaaggaatttccaaatgtacgcggtggctttatccacgttccgtatgctgtttctcaggttgtcaataaaccggcgaccccgtctatggccattgcggatattacggctgcattggaggcggcggtgaaggccgctgttgaatatgagcaggatatcaaagtgattggaggagaaacacactaaaaaatcatttctgtcgcataaaacagaatcctgctttgcaggattctccgcctgcggcgggtcgcgttagcgacatcattccattccgccgcagtgcgatccccccggagggattttttgctctataggaatcactgctttcacgctttaatgtaacgtactctttcctatagagcaaaaaaacttcatcttcggaagcttttcaggctgtgataccggtctgaacaactccaaggatgaagttttcttttatccggatcccaggctgccttcaaagcacctacccggaatccggttttctgattattcttttgttcctctctccgcagacgcgttgagttttccgtcgaccacgtcgatcttgatcgtatctccggtatggacaccatccgacaggatcaggcgggctgccagagtctccacgttcttctgcagatatctcttaagcggtcttgcgccgtataccggatcataaccgttgtccacgataaactgctttgcagaatcggaaagtgcaaccacaagctctttatccgccagacgcttgttgatatcggcaacaagcagatcaatgatgcttccgatgttgttctttgtaagcggcttgaagaggatcgtctcatcaagacgattcaggaactccggacggaagtgggcacgcagatcgttcataacctctgcctttgcctccggcttaatatcaccgttctcgtcgataccgtcgagcaggtactgggaaccgatattggaggtcaggataatgatcgtgttcttgaaatccacggtcttacccatggaatctgtgatacgtccgtcatcgaggacctgaagcagaacattgaatacatccggatgtgccttctcgatctcatcgaacaaaacgacacaatacggttttctgcggactgcctctgtgagctgaccaccctcatcgtatccgacatatcctggcggcgctccgatcaggcgtgatacggagtatttctccatgtattcactcatatcgatccggaccatgttgttctcatcatcaaacagacttgccgcaagcgtctttgcaagctctgtcttgccgacaccggtaggtccgaggaacaggaaggaaccgatcggttttgtcgggtccttgatcccggccttggaacggatgatcgcgtctgtaaccttctcgactgcctcatcctgaccgacaacacgtttgtgaagctcatcgtccagatgaagggtcttatttctctcgctctccgtgagttttgcaaccgggataccggtccagcgggagatgatccttgcgatctcatcttcggtaacgctttcatggacaagactcagatctgcgttctttaccttctcctcctcttccttcaactctttttcaagctgcggaagcttgccgtactggagctctgctgccttattcagatcatatttctgctgtgcatcctgaatctgacgatggactgcctcgatctcctcacggatggaggaaagcttatcaaccgtcgccttctcattctgccactgagctttctgagtcgcgaactggtcatggagctccgcaagttccttctgaagatccgcaagacgttcctgacttaaatggtctgtttctttcttgagagctgcctcctctatctcaagctgcatgatc

SEQ ID NO: 1993 - DNA, 18898 bp, Unknown
  gut microbiota DNA sequence
aatagaaaaggaacgtcattttaggcgttccatagtctatgaaatattcaattttttgttgtttcaatacggatgtgctgtaccatatctttgcatatctaagaaaacttgcgtatcaaggctcattctttagtagtaaataagtagtaaattgatgtgtttgttttcttgaaaatgctgatagatactgtgttttagcggataatcagatttttattgtgttttttgaatgaaaaatatcatgtatttcatgttggagacagcaagatcctgctgatagatgatcgcgtctcacagattacgaaagacgaggtatcggttgtcgagcgggatggaaagttgaagacattattggcaaattttatggggaaggtcgaagaattgtggatgaatcagtcaagcggaagtcttgttccgggagagacatttcttgtggggtccgacggactttttaagagactccgggaagatattctgtttgatgtgatcagaaggaagaatgtgcagagtgatacagaggcagaggacgtgctgaaatatctgatccggtatgtcatggagatgggggagaaggataatatatcaggagttctgatccggatcgtttagatcttcaggtatgccttatgtattcggagaagaccgccggaagcggggcttgaaggctgtcaaagcagcccaagagcaacataaatgatgagaaaaacggctgaatagatgagatgatagccagtgaagatcaagattccttttagcgttccgcgaagatgggaactgcagcggaagaacagaagaacgatcacggcggcgatccacagaccgcagagaaagagcggatgcatgaaaaataacagaaatgtaatcccgtagaaacatgtgaagccgaactcgataagcgggtagcggagcgggatttttgctctgcagtagtgacactttccaccgagagcgatccagctgatcacaggaatctggtgcagaccgtttaagacatgaccgcactccggacagtaacagtcttttgtgatcagtggcttatcaaaacggatccgatactcggcagtcgtaaaataagcgccgatgatgctgccgaagaccagtgtgcagatcagaagaacagaaaaataatatgtggtcactggaaagtcctccaataagtaaatttataaaacatttgtaactattcagtaccttcatagttacaagcaaaaatccattccaaatcggctgcgccgatgggatttttgccttccagcttatgttttcttacggtcagcgcagcaagtgcgcagacctactgaacagttacaaacatttttatattaaagagcctgaaggaaaaagtcaaggacaaagggggaagagaatatgaagaagggatggaagattgcagcggtgggattgattatattattgctgtttttgattttttttaaggagtgtttgtgggagtggtatgacgaagttctgcatccgtgggcgccatgtcgtgcggattggctctgaaaagttggacaaagtattaacagatatggtttgctttattgagcataatgaaactgtcatgaaaaaatcagaggaaaagcaaaatgctgaatgaacatttattttacggcggaattcttctatgcgcgtgttccgtcggacttgcggtgattttgggaagtctgtatacaatccaaaagatcaggctgaacagcaagctgaatgaagagtatgggaaagaaataaaaggaaagtaacaaagcgggaggtaccaggtggaggaaattattgcatcgacgtatcggatcataagaaaactgggatccggcggcggcggaaacgtatatctcgcagatcatctgagactgaataagaaagtagtcctaaaggcggacaagcgccgggttacgacaaggacaagtcttctgcgcagagaggcggatgttctgaagaacctgaatcatccgaatattccgaaggtatatgatttctttgttgaagaggacacggtatataccgttatggactatatcgagggagagagtcttgaccgtccattaaagcggggagaacatttttcgcagcctcaggtaattcaatgggcgaaagaactcttagacgctcttgattatctccatagtccgacacacggagacccgccgcagggatttgtacatagtgatatcaagccggcgaatctgatgcggacgccggataaccatatcgttctcattgattttaatattgctttatcgctcggcgaggacacagtgatcggctgcagtgccggatacgcatcaccggaacactacgggcttgatttctcttcagacagcgatacagtaaacggcgagtcagagacagaggcggaatcaaaatccggacaggatagtgagacagaggttgatgatcctacagttgagaggacgatcacggaatctgatacagaatccacagagaaggaggaaggaaacagaaaagagaaaagcttttctgcatccccgaagaagatcatcgttccggatgtgagatccgatatttatagtaccggagcaaccctatatcaccttctcagtggctcaaagccggcgaaaaacgcgaaggcagtcgtatcgctttcagaaaaagaatatagtccgcaggttgtaaagatcatcaaaaaggcgatgaatccgaatccggatctgcgatatcagacggcgcaggacatgcgttcagattttttacatctgagagatcgggatccccgggtcagacgattgaaggcggtaaaacggctggatatcggtgtagttcttctgcttcttgcggcaggtgcatccatgacatttgtgggattaaagcggatgcagacgacggagaactggctgaagcttgcggaatactcgaaaagtgcccttgagtcaggggatgtggacgaggcggtcagggacgctctcgcaggtcttcccgaggagaaaggaattctgacaccggaatggctgccggaatcccggcgggcgcttgcgaatgcgctgggagtgtatgacctttccgacaagttccggtcgagcggagttgtaaagcttccgtcggctccttataagataaagatgtcccccggcggaaagaagatcgtggctgtatatcagtccgaggctgcggtctatgatgcggaaagcttaaaaacgttaatgacctgcccgatgatggattccgcgttggcggacgcgttgttttctgaagacagtcatctgctggctgcgggaaaagacggagtttcgctctacgacattgagagcggagaacaggtgtggaaggccggaatggcttcgacgttggctatctccggagacggacaggttgcggcggcgctggatcgggacagaaatattgtttcattctatgacatgaaagatggtcagctgctgcgggaacgctctatgggagagaaaaaaatgccctctgcatttaatgattcctttgcggatccggacaatgcaattttctgcctgaatatggatggaaccatgttggcgatcagcttttcggacggcggactatatgtgatggatacagagcatccggaggatgacctgatcgtgtacgagagctcggattattcagagtttgcaggcggcttccatggagataaatttgcgttttccgccggaaagagcggtcacagcctctttggcctcgtcaatgtgaaggaaggaacctatatcggtgatatggagtcgaaccttcggatgaaagcgaaggcggatgagagaggaatctgggtttcagagggaaatcttctgtctgaatttgatccggatacgctggctgataaggagatcgctttcacggatacatggaacatcagcaatttcagtgtttcggacaagcatgtgcttgccgtgacggacgagccgggcttttccatcttcgatcagggagagaacgccctggtacatgaaaagagtgatgaggaatacagctttggagaactcgggacagagtacgcagcgttagcaaaccggagtcagccggatattcgtgtcatgaaggaggagactcatgaggatacatgtgtggtgcgttacgacgcgaagtattcccatgacgaggccagagtgatgggtgacggggaaaaggcgatgcttttcagctatgatggattccggatctatgatagtgacggaaccctggcggcggaaggaagcttcccagaggcgggaaagatctacgaccagcagtttagaagggacggagaaaagtcctggctggatgtgatctggtacgatgggacagtccgggcgtacagttcggaggacggcactctgatctcggaggagagaggggaagcgccttcaaaggatctggaagaggaattttcaacagaaaagtaccggtttgtgtcggaacttcacagcgctccgaaggtttatgacaagcagagcggaaagtttgtaaaggaactggagaaggatgatttcctagcctatgtgacagaggtcggcgagtacatactaacagaatatgtccgggcagatggtgagagatacggtcttttgctggaccagaaccttgagatactggcagatctgccggatctgtgtgatattcatatcccagatgaaacaatctatttcgattacaaaaatggagaattgagacagtgtcatttgtattcgatccaggaactgatcgatcttggaaagaattacagataaaattttaagaaaggggaaaaattatgaaaaaacgcatctttaaacagggaatggcattgatgctggcagctgcactggcgcttccggctaatgtggttccggcggaaatcctggatcagcagacggagacagaactgccgcatattgtattaaatcaggaaacacctgatgaaaaagtaactgacagtgatgcgaaggaaaaggaggagcagactggaacgcagacagagacaaagacaaagacaaagacagaagtcaatgccacagaaactgcagaacagatcatttataataccggttccttcaatgttcatgttgtaagcgaggaagattttgagaacgatctcggcgacgcatattttgaggaggatggcagctataccatcaatatcccggaggaaaacccattcttcccgtatgaggttcagtttacctatgacggaaagacagaaaatgagtggttcatgaatccggaggattctatcgagatcgacggacataccttctatgtatccgcaagcttcgacggaacagccgttacccagctgaccatggaggttgcaggtcaggaagttgttgtttatccgaaggagaaagagtttacggacggagatggcgtggcgttgatgtcactgctgccgttggaggagagaaatctgtcgcttgacctgtctggatttacgccgattgaactggcatgtgtaaaaccggcaactgtttttaagggtgagaaccagattggaacggaaacagaaattttatggaaaccacgtgacagcagagataattatgaaagcgatccagactctgtcggagtagtagcgatggatcttgcatttaataccagtggggctacaagtaccagctgggagatgatcgtaggtaacccggatcagctggatgcttccaatattcgctattatgtagatattgcagtgacagatacagagaattggttaattccaactgtgacaattcataatgatgatggaacgaccaaaaatgtgacagtaacggatgcgtattattctgatcatacattttatagccggaatcgacggatgtatgtggatgtaccgacagaagaagtaaaaggaaatccagagatgacagtttctctgaaaatcaattctgacttatttgaaagatcggtaatatctaaaatagatacacattatttgtcaaacgaggtaccgtatgaagctgtaaaaaaagatgacggttgttggtatattgaagtaaccggaaaaagagatagacttcacaatgtaggcttcttgatgaatggttatgataaaaatgatcaggtactgggggatgcgatcgatttcagcttgtatttgtccgcagagagtgatcatgtttatacaaacctttatgacaaaacaggcaataacatctcctatagcacaagctgggaagaagatgaagaagatccttggatggaagaaaagcttatctacaatctgggagcttcctataaagacaatgacacatacagactggttttaacatttgaaaaagcagttgcaacaagcgagaaccaaataatcggagcgttcataggaagatatgaatcgcttgatgcggcaaaggcagcaggggctgtggatgtaaaggaaagcctgtttaatcagacacagggatatgaagcagatttcagcaagggtgtatatgtaagtgtattcagcggaaaagccgatgatgacagcagaaagcttaaaagatatgtttggcatatttatacaagatcggaggcattcttagataattcaacagcagtatcattttatggcatcaatgatgcacagggaaattatgttgcttgtaaggttctaaatccgtcttatggagattataaagacgattatgcggatttctcatacattacgattcttgtaggcgaggataccgatttaacttcattagcgcctgtatttaccatgcagaacggaatgaaactgtataccaataaagaagaaatcagcggacagagtcttcatgacttctccaatggcccggttcattataccgcatcagccgaaaactctaagaatgcaaagaactactggctgcagatcattaagccaaaacagggtgaaagctggctttatatgaacagccttgcagacgagagctcagataccagagaagaaaatggtgttgtttatacaactcgtgaagcaatgctgaatagtatccatgattatgagcacagaatcattcttgctaatatgggaacgaaggcattatctaaattatcagtggaagcagaaggtgctttatttgattcgtgggttgtaactctggataactattggacattaaagggagagcatgatctttccggttatcagggactgggatatgatgaacttgcaaatcttgcaaaactgaagttggtttatgatggtgatgagataaatggacaggatctcacaggtacactgacaatcaaggaagctggaaagccaattatggtaataaatctgacgggtgttgttggtgacccgggtattgtgacaactgagattccggacgcggtcaaatatgtccactacggttctatgatccagaacagcaataagtatgattttaatacggtaagctataagatcacagatggaaaacttccgagtggaatggaattaaaaccaaacggtgagctctatggagtaccgttagaaacaggtgaatttacatttaccgttcagatgaagaacagctatagtgagtttgcaaatgttacaaaagaattcaccttaaaagttgtagacaacaccgacgcaaacgtagatagtgcagtcgatcagggatatgatctgaaggaacgtgttccaaatatcttactgagtgacaacaacgactatacaatgacatctgtcggtgtgatcgaagagtgggacaaccttactcttgatggtaaacgccttgtagagggtgttgatttcgacgcaaaatcaggaagtacccgtcttacgatcagaagccagaccttaaaggctaataatcaggtaggaactcatacactgagtgcggagttccgtgagaaaggaacaggaaccttaaagcgtgcagcacagaactataaggttaccaagaacactacatctggaggctcttcaggaggacacagcagctccggaggaagcggacgcgcaacagtaaaggcggatattaaaactgccggagcggatggcgcatggttccaggatgcaaacggctggaagtgcaaagcagcagatggcacctggtatacgaattgctggaaagaactgacataccagaatgagaagtcatggtatcgttttgatgcacagggctaccttgtgacaggctggtatcttgacaatggagaatggtattatatgaatccgaactccgatggaaaactgggaaaaatgatgaccggctggcagtatatcaataatatctggtattatttgaatgaaaagacagatggcagacagggcgcaatgtaccataatacatgggcacagcttccgtataatggtactgttgaatggtactattttgatgaaaacggaaccatgatgacggaatggctgacgcaggctgaaaataagtattacctgtatccgatcgctgatggaacaaggggaagaatgctgactggttggcagaaaattggtgataactggtactatttccatgaagaatccgatggaaataaaggagttatggccagaagaacgaaaatcggaaagtattatgtaaatacagatggagtctgggcgaaataggtaatgctcttatctggctcaaaacgagaaccggggtttttataatcccggttcttgtttttgggaaaaaggaagtttgagggctatcccaaaccctatttttgccacatttccaaaagaaaaccgtaagagacctcaagttgcatttccaatggagataggctataatgaagtgtgcgcctggataggcgtgaggatgataaagattaaggttgtgttaccttgttgggctgcgtttggcagagcggggtaagacgaaatcagagatagaccagaggagaatgaacatgagaagatcgatcaagacagccatcttagcctgcgttttcgcagcggcattccagatcacggcgtttgcgagtttttcctggaaggtgaagaatgcggagagttcttatgtgggaacgacgaatgtgactgtgacgaatacatcaggaaagaaggagacggaggacgctccgatcgtaaagaaaggaaccgttgtgacgtttacggaggcggcagcgagtgcgacttatacggtaaaggcatatgatgggatgggaaatccgatccgggatttcagcgcgtctctcggaacggtaaggaaaggcggtactctccagtatacactggactggaacgcgagaaagtcggaaggaaagtcctcgtacacaggacaggccggtgtctttgagatccaggcgaaggattccgacggaaagacatggagacagagatttgtgatcaataatgtctgcgcgtcaggtgtgctctccaatatgtacctctacagcaaaggcgctctctaccaatggaagagcaattccaaaggctggtgggtggacaaaaagtccggcggctacctcacaaatgcatggttccagtctccggtgagcggactctggtactatatgggctctgacggatatatgctgacgaatacgacaactccggatggatataaggtcaatgccagcggtgtgtgggtgaaatagcactgcactataaagattctggaaaagtcatggcaggaaaagccctgtgttcagatattctgcggatctgaaatgcgaaatagcggtaaaatgtcgccatagtgtgcgtgtaaaaaaattgcatgttataaatgataatttacttaaatgagaaaagttctcaataagaatcttccattttctgcaaaaaggtgtatgataaaaatagttagcaacacctaacaaacggctcgcgatccacccggatcacatgaaaaacttccgatgggaacggccgcttttaacgcaactcctgcgggagggaaatggagcagttcatgggaagattttatcagctttcaaagaagatttcggagcaggaggcatcggagatcatgcgggaagtcctggagcttccggatatccgggatgccgagcttgtcgatgaccgcagccgggtcagagttgagacgaaggacaatgtgtttgtcgatgtgatgagtacggttgtaaatattttccgccgcgtggcaggcggatgcgagctgtcctttgcgggattcgcttataaagattgaggatcaataaaaagaaaagtgcgtggaaaaccacgcacggcagcaaaaaagcgcaggatcatggacttatgtttgtccgtgattgctgcgcttttttgttaaattgcagttcagacatttttatcagacatttttaaggacttttataatgaaactggaactttcgggagaacctttccattactcaattcttcgcttcagaagaatatttcttaatatgttccttgatcgccgcaaagctctcagcactgatatcgtgctcgatgcggcatgcatcctcgagagctgtcttttcactgactccaaggtccatcagccatttggagagggccgtgtggcgctcatagattgtctcggcgatccggcggccttcgtcggtcagtgtaatgtgtccctcgtcatttaccaggatcagattgttgacccggagatttttcattgcgacactgacgcttggtttcgagaagccgagctcggtcgcgatatcgatagaacgtacatatggctgtttttcacttaacattaaaattgtctcaagatagttttcagcggattcctggattttcaaataattacccccatatattggaacatcatgcagctttgtgccggaaatctcccgattaaacagagctgcgtctgcaggtgtcagtcagttaaacgaagcttacaggatttttatcttcctgttcatgtcttatcacagtcagcataacgtgtgtgcaaggttgccttttcacgggcatggagtgcccgtgtactgtaacgagtgcagacctgttgaacagttataattcgtccttctactataacacaagatatggactgagtcaaagttaattccacttgtttttgaaaatctataaagatttttgaaccgaaaagtccggatcggcagcatgagtgatcgggctgttcgatgccatttcgcgtggcgggataaatgcgataggaccatacgattagttaaaactaactaatgagaaaaactctcaatagcagatattgacattgaagttagtttatgctaaccttatatcatcagttagacggagctaacctttaagcaaaggaggaatattacatgagtgttgttattatcggcggacatgaccgcatggtcagacagtataaagaaatctgtgaaaatcataaatataaagcgaaagtttttacccagatgaagacaggactcgataagctgatcggaagaccggatcttctgatcctgtttacaaatacggtatcccacaagatggtacgctgcgtactggacgaggtggatgaggaccgtaccgatatcgtccgctgtcatacgagcagcggaacagcactggctgaaatcctcgaaaagcatagcgcgtgatgttcagaaaggcggtatacgcatgagcgaagagatcttcggggcagtacagaaactcccggtgaacggaacgaagaagcaggttgttttgcagtgcgcgccgcttctcacagggatcaaattatcgaatctcctgaacgtacgggcagatcagaaagaggaagtgttccggatctttgaaggatcaccggtctgctgcagagtgctctatgaatttcaaggaagattgtccatccttttatatcgtccgggaatgctcgcggcatacttggaacgcgaagatgtaaaaaaaatgatgacatctttcgggtatgaaaatccggatctggaagaaactttgaacaggatcgcggatgcttatcaggatcatatgaacggaaagcgcggttttccgcatgagatcggacttgtcctcggctatccgccggtggatgtggaaggatttatcgaaaaagaaggcagagattttctgtactccggatactggaaagtatatggaaatctggaagatacattaaaaacatttgaagcttacgatcaggcgagagattatgtgatcggcatgaccggaaacgggaatgaaatcagggatatcctggcggcatcgtaaataccgccggttccaattataaaagcggcggacggcgaggtccgggttaccgcaaaacaaatttcaggaggaaatcaaaaatggataaggttattgttgcatactggtcccagacaggaaatacagctgctatggctgcagcagtcggcgaaggaatcacagaggcaggaaaagaggctgttgtcacagatatctcttccgtttccatggatgacttaaaggaagcttccgctttcgcactcggatgcccggcaatgggagctgaggtccttgaggaaggcgagatggagccgttcgtaacagaagttgaggctttcgcagctggcaagaagatcggtctgttcggttcctacggctggggagacggccagtggatgagagactgggaagacagaatgaaagctgcaggcgcaactgttgtcggcggtgagggcgtgatctgccaggaaacaccggatgatgatgcactcgcaaactgcaaggcacttggaaaagagctcgctgcattagcataagagagcaactgcaaagaagtgtgccgggaaatattttaataggaagataaaaagacacagccgggagaggatgcagtcccggctgtgtcttttttgtttaacaggaaattccgatggaacttcctgttaaacaaaaaggcactgcgtgcctaagatgcgcactcgcgcgaagatgatggttgtcgcaagcgaccgcgctcggcgcgagaatgtgtctcggcacattcttttttatttccaagcatttggcatgaagatcagaaaaacgtccgtataaaattgcccttgcagaaccggtactgccttgtcggacggccttttccctcctgcttctgcgactcgatctcttctattaaattggagtcgaggagctgctgaaggatccggttgcagctgcggcttgtgatattgagccactgggagagggaggcggctgtcatgaccgtgtctttatccatctggaagagaccgacgatctttaagagattgctctcattgatcccattcttctgggagtaatcaagcgctctcgtgttggaataactgtagtttaaggatctggtgagggagagcggtcctgtgagagcgttgtcctcgccggagatgacgaaaccatcgttctttccgtatttgactgcttcctgcagtgcgagatctgcctggtaatggctttcgcccagtgattttccgaatccggcaccgagacggaattcgaggtcgcccttctggtccaggaaagcgatgagatcctggatcctgctgaaactgctcttatagagatcactgtcgagagcgagctcgaaccggttagagatggcgtgaatggcgaaatcgtaattgtattcctttcggaaatccaggagatatttgtgcagtgtgatttccagatattcccggtcctgggaagaaatattatccggatagacaagctttatgaggatcacgagcttgttgagctggcttttctgctttaagcggatggagtttaccgcgtggcggatcgagtcgcggaccatctcctcggtcggaagaaagtggatgtacgggatctggagcttattgaggacctccagctgattggtcgttctcgtaaacatcatatcgatctttttctctttccacagctctacggcgcgctcctttaatgtctcataattatagacgggattttcaaagcagtagggcatgtgctccggatccaggtattttttcagattcatgaaatcattgaccggagtcagaaaatcgatataaagcctgttcagcggaacatccgggtaatggatcacgaaatttaaaagaatggacaggagcgtcttctctgtataggaaataaaggtgcaggggactttcagatcgtccacatgcgtcagaatataggaatatccgagctcaccggagaagaagaggacatccgagatgtctttacactggtcatatatgtccttaatttcctccagactctcgtagacatacttgtgaaatacgcatccgaaatcgttgtgttcgatcgctttatcgatgacagccattgattttaaaggacttatgatgctgatactgatcatggccgaacctccttttatatatgaaaaaatgatataaagacatgctattaacgacagccatgtcgataaatcggcttttgtaagaatcgtaccacagattgttgacaaagtcaaaagggtatgttagaataaggacaaataaaggacgtaagcaaaatgagtcttaaataaatcaagggattcgaaagatccgtattgagggaaatacagaagctttcggatcgcgcgatgcagcgagaaatcctgtatacatattgaaaacaacgtattatatatggtatttaaactgtatatacaaaagatacaaaagttttctcggaaatccaattaaggacttgattgagactcacgagcaaagaaaagtcttttattagtgcaaaatggcacaggggtttaagaaccaacatttaaggaggtatttgcgagatgagcaagtatgttgagagggtaattgaggacgtaaaaactaaatatgcacatgagccggagttctgccagactgtagaagaagtattatcttccatcggtccggttgtagacgcacatccggagtatgagaaggttgcccttcttgagagaatggtaatcccggagagagttatcgagttccgtgttccgtgggaggatgacaacggaaacattcatgtaaatacaggttaccgtgtacagttcaacggagcaattggaccgtacaagggaggtttaagattcgcaccgagcgtaaacctttccatcatgaaattcttaggtttcgagcagacattcaaagatagcttaacaacacttccgatcggcggcgctaagggtggttccgacttcgatccgaacggcaagagcgacagagaagttatgagattctgccaggcattcatgacagagttatatcgtcacatcggtccggatgtcgatgttccggctggtgaccttggtgttggtggacgtgagatcggttatctgttcggtcagtacagaaaattaagaggcgcttacgagaacggcgtattaacaggtaaggctcgttccttcggtggttccttaatccgtccggaagctacaggtttcggcgctgtttactaccttgagtccgttatgaaacatgagcatgatacattagagggcaagaccgttgcagttgctggtttcggtaacgttgcatggggcgttgttcagaaattaagcgaattaggcgctaagccggttacactttccggtccggatggatacatctacgatccggatggaatcacaacaaaagagaaattcgactacatgcttgagatgagagcatctggacgtaacaaagttcaggactacgctgacaagttcggctgcaagttcgtagctggtgacaagccgtggggcgagaaagttgacatcatcatgccgtgtgctacacagaacgatgtagaccttacacaggctaagagaatcgtagctaacaacatcaagtactacatcgaagttgctaacatgccgacaacaaacgaagctcttagattcttaatggatcagaagaacatgatcgttgctccgtctaaggctgttaacgctggtggtgttcttgtatctgctcttgagatgagccagaacagcgagagaatctcctggacagctgaggaagttgattccaaacttcatcacatcatgacagagattcacgatggttctgcagcttgcgctgagaagtatggccttggttacaacctggttgcaggtgctaacatggttggcttccagaaggttgcagatgctatgatggctcagggtatcgcttggtagtttgaagcgaacctcggatatcgaagcccgcggtttctaaaaactgcataagggcactagatactgaatataggggatgctgtcggggagtgtgcccgacggcatcccttttctgatttgttggaaaatggatcagaattactgctgatgagagaatttactgtttgtttttgcagaaaaatgaaatatatgggaatgtttggtgcagattccggatatttgtctgagagagaaaaacagtaaagcagaagcggggaaaaagaacattttattcacaaaatgctcaatgggaataaaatattctttattaagaaaataaatcaaattcgcgaaaatactttacaaaataatgtacttcaagtagaatagatgagtacggggtatgatcctccatgtggttgatggaggaaaggaacattgtcctgaaaggagagttttttttatgaattgtcttattatcgacaaagtatggggtggaatcgctgaggaactcagcaaagttatgaatgttaagacagctgctaatcttccgtgcagcaaagaggagcttatcgcagagatcggtgatgttgatgtcctgatcatgcgtgtagacccgaagatcgacaaagagatcatcgatgctgcaaagaacttaaaggttatcggtgtttgctctgttggtttaaaccacatcgatatggattacgcaaaatccaaaggaatccaggtattcaacgcaccgggcttaaatgcaaacgcagttgctgagctgacattctccaagatgttagatatctcccgtggaacattcgtagcaaactacgatgtaaaagtaaaacacgagtgggataaatataaattcgaaggccgcgagctgagaggcaagactcttggtatcatgggctttggccgtatcggtcagcgtgtaggtgagcttggccgtgcattcaagatgaacatcgttgcttacgatccgttccttccggacgaagtattcaagcagcaggaggctacaaaggcttctatcgacgagctgatcaaagtttccgacttcatctccatccatgtaccgctgacaccagagacaaaagacctcttcaacaagaagtccatcgctgagatgaaagacggcgctgttgttctcaacatgagccgtggcggtatcgtaaacgaggctgatatgtacgaggctctgaaagagggcagaatcggcggctatgcagcagacgttatggagaacgagcttgcaggcagcggtttaacaggtaacgacacattcgctagtccgctgttcgactgcgataacttcatcgtatccccgcacatcggcgctcagtccgtagacgcttccaaggatatcggtgttcacatcgttgctaaagtgaaagaggctcttggcttataatttacgcgaacaacgagccaaagtccgcgcttgcgcgagaccttggcgactgtcgcgataacaaggggaaactcgcgaagcgtgttttcacttgttcataagataccagggccaaatgatcagagatctgatgcggatttacccgcatgaggatgtttgatcccgggccccatagagggcaaattgagagcctggtggctgatcgtcgccaggttctttttgctttatagctgcttcagaaataacatagcaatcataaggaggacacatcatgagcagtatcacagagtcagcaaaggctttgatgcctaaattatctgagatcagaagagattttcatatgcatccggaggtttcccagcatgaggagagaaccggaaagaaggttgctgagtatctgaaagcgatgggatgcgacgaggttcatgagaatgtcggcggatacggcgtagtcggtgtgatcaaaggaaagaaacctggcaaggtcgtagcactccgcgcagatatggacgcgctgcagatccaggagatgaatgaggttccgtataagtcccagaatgacggtgtgatgcatgcctgcggacatgataaccatatgacgggactcctcggtgctgcgatgcttctctgcgagagaagagatgagatcgccggaaccgtaaagctgatcttccagccggcggaggagatgtctccggtcggaggttccagaggaatgcttcattccggatatatggacgatgtggaagctgtattcggacttcatgtatggccggatctcccgcacggaaagatcggcgtgaaggcaggtccgttaatggctgcgaccgatcacttcacgatcaatatccacggtaagactgctcacggcgcaaaaccgaatcagggaatcgatgcagtcgttcttggctcccagttcgttatggctgcccagacgatcgtcagcagaaaagtggatccgcttgacaatgcagttgttacgtttggtattttcaatgccggaaccagatacaacattatcgccggcgactgcacactcgacggaacagtccgcacattaaatgaggacacacgcgcgatgatcgaggattccatgagaaagactctcgatggtctctgcctgcagtccggtgcgacagctgagatcaactatggtcacggctatccggcactcgtaaaccacgaggaggacgcagaactgatccgaaatacagcgatcgaactcttcggcaaggatgatgttgtggacgtaaaactcccggcaatgcctgcagaggacttctccttctatctgaaagagaagaaaggtgcattcgtatggcttggtaccgcaaaaccggagcaggatccggtatggccgttacataacagccgttttgatgtcgatgaggatatcctctggagaggttcttcccttctggcacagactgcgatcgattatttaaataaataatggattattttggggcggcggtcggagcaaaatctgactgcggcccctttgtgcacataaggatgtgtacttgcgcgatgtttgagattatcgcaggtgaccgcgtgggatgcccggatgtgccagggcatatcctttgttacttttcatgggtaggaattttctgaactgaaaattccgtatgataccgttgtggtcgcggattttgccgattcggaatgcgaagcatcggcaaaa

SEQ ID NO: 1994 - DNA, 33721 bp, Unknown
  gut microbiota DNA sequence
ctgttacagtgcgcgggcatggagtgcccgtgtactgtaactatcctttttataacatggaggagactatatgacagcaggaaacgcgatccttgtgatcgcaatttttaccggactcgcgctgatcggggcgatcttttttgtgatgttcaaggtccggcagatctcacgggaatttttcggaactcccagcctgatcgaggggctgaagcgccaggaagcgttggaagctgacacaccgaaatccgtatccggaatgacgagtgtggagcttcctcggatcgagaaggatttcccggagtttcactggccggagtggaaacagaggtgtgaaaatcagctaaaaggctatctggaggccttggagcatcgggatctttcttatcttggaaacgtgtccctgtcattgaaagatcaggtccgcctgaagatcgaggagatggaggagaaggagatccgggaagaatttgatgcgatccatgtccatcagacggagatctccagatatgacaaaaacccgggaaagtgcaggatcaggatccagtcctctgtggagtatctgcatacattaaggacgccggataaaaagaaaaatgtggagcgggaaaaagagcagcaccgctttaatatggaacttgtttatatccaggatatcacaaagatcagggacggagagactgcgatcggcgtcagctgtccgcattgcggagctccgatcgcgggacttggagaccgtgtctgcccgtactgtggaggcgctgttgagccggtgaatgtgagagtgtgggagctgcaccggatcgaagaggtgtgaaaagagagacagtcgccaaggtatcgcgcaagcgcggactttgactcgttgtttgcgtaaataaaaaacgtgtgaagaatgattactcattttcacacgtttttttattttagatgaaaattattttgctttcgcagtttcccgctttttgatctccggtaagatcagaccaagtgctgtgagcactaccggtgtgattacatttaatgctgtggaagcgatatcgccttcaacatacattccgaggagacagcaagctgcggttacgaagaagcaccagccgcctgcaacaagggcaactgtctggttctttgtaaatttgtactccgggttgaacttgttgagggattttctgagagcaatgtatgctgcgaatacccacaagtaacgaagcggcatggttacagagttcagtttgtttaactgagtcagaacggatgcagcacccggtacgaaggactggatcaggatgatgctgccggataagcagataaccatcttgataccgttgatgtatgcgccatgctcattcttctttaagaggccggacggaacgaactgtcttgcgtcctcgttgtcaagaagtatacgaagcggagcgtcgatacttaatacaagtgtggagaactgaccgatggcgttgcatgctgcgtagataacgagcaggaggttgccaacatgatagtactcaccgagcttctggaaggaccagtaagcgccgttggaaacgtaggacttgaagctgtctgtgctctcgttgatgacagccggatcaaacatcatgcccatcgcgatacttccgaggatcgcgcagaccataaccataacggctaacatgatcatacccttcgggaatcccttggacggatcttttaccttatttacataaggggagatcttctcgcatccgccgactgcgaatacaaggatagaaagggatgtgaagtagttcacgttgaactgcgggatcagaccttttactgtgtaatcagcagatacgaaaccgccgttcgggttgatgaccggtgctgcgaacatcattaagatgaacaggatggacattacgaacatactggaaccagcgatcgtcgctaatttctttaacgggtttaagccgcggcttgcaacccagcagaagaacaggaacacagcgagtgttgccatctgtacagcgatcgtcgggaatgtgtcgtaagtggagccgttctggaataccatccagcttaatgcctttaatccgccgcttcctttacttgcgatgtaagttacatggcaagcccagtaagtccagccagcgtaataagcgcatttcgggccgatcgtttcgtggatccaggagctcacgccgccgccggactgtttgaacgcggagccgagctcacctaccatcagggcatacggaacgaaatagagagcgaacatcagaacccagctgaagattacctgtactccgttgaagtaaacgaagccattcagcacgtttccgaatccccaaaccgtggagaatgccatgaaggccagggtgtaccagtcgattttcttggtgttttccataagagaccttcctttgatataaaattgtatttgtccgtttgacacgaacttatttagtataacataaatttttgaaaagatgaaccttttattataaggaaataaatgagattcggttaataaaattcggcgaaaactggatacaacgtgaaaaaatgcagagttcagatgagactataaaggaaaaaacaggattccggaaaaataaaagggagattacaaaaggggagcgaaaaagtaagagcgaacaagatctgaatgtctttgctatccggataaacgtgaaatactggcggaaaaatcggaaatggatgcggaataccatcagaaatttcccgacggatccatcccggaggagaaaatattacaaaatatcctttatttttgtaggtaaataggaaaaaaacagaataaaagaaacctgtaactgcggatgcagggattattttgtggaaattggatttccggttttctgattatgtggtaaaatagtaaaatatctattcagacgaagccggagaggcggatcggatgggagaaagaagaggaagactatgaggggatgaaaaagcctgcaggatattattgatgcggtgggagccgtgaaattacagagaggacaggtgatgaaggatgggatattccggatatgagtggctgtggctgttttttgcctacagcttttccggctgggttcttgagaccgtgacagcggcggtgaggcagaaacgctttgtaaacagaggtcttgtaaacggaccgctctgtgtgatctatggaattaccggatctgcactgatgctggtatgcagagacctcagggggatctggctgtttcttggaagtatgatcttttccacgctggcggaatggatcgccggtcatgtgatcgaaaaaatgtaccatgagcgctggtgggactattctcatgtgaaatggaatctggatggctatatctgctttccggtctccgtgatctggggtattctgggatttgttaccatgcgatggggagcgccgcttctgattggcgtattccggatgatcccgatgactccggcccatcttgtgatctggatcctcagcgtgatcctgatcctggatgtcgtggcaactctgtgcatcctgtccggaagaagccggaggatccgccagtggcagggcgttgactcctggctgaccggtgtgagttccagacttgagcgccggatctacggctgggtggaccgaaggatccagaatgcgtacccggaagcaacttaccgcagggagcttcaggccgaggccgagcagagaaagaccgtctttgcctacggactctgtttctacaagatcgcacttttgcttgttgtcggcgcatttttgggagatatcgtggagacgatcttctgccggatgacggcaggaatctggatgagccggagcagttttgtctggggcccgttcagcattgtctggggagtggctctcgcggcggcgacgatgcttttgtaccgctaccggaaatattcggaccgctttctgttctttatgggcacatttttaggaggcgcgtatgaatatacctgcagcgtcatgacggagatcatgttcggaaaagtattctgggactacagtaagatcccgtttaaccttggcgggcgcatcaaccttctgtactgttttttctgggggatcgcggcggttgtctggatcaaaggtatttacccggtgatgtccgcctggatcgagaagatcccgatccgctttggaaagatcgcgacatggttgctccttgtctttttctgtgtggatatggcggtttccggactggcgttgatccggagcagtgaacgggaaaagggaatcccggcgacatcgtcctggcagcaggagatggatgagcattatggggatgacgtgttgaaaaagatctatccgaatgcgctgaaagtggattaagggagaaaaagttaagatggataaagaaaagcagcagcagatcaaatatcagctgctgctttttaaaacgcgcatttttgagggctgccggggcagcttccgttgtttttatgagagagaagcttcgggcagtgcgggagttatgcttccgctttccagagtccatgaagattgcagtactcataaactgcgatcagcttttcaccgtcagcgaggaagaactctgcttctggtttatcttctggagtaagagaacggcagtgggttccgaaatttgtctcgatcaggatccactggatatagtgtttttccatcatcggatgttccacagagccgacttttacggaaactttatttccgtttacttcgaaggccgggacatgtttttcgtgtgcaccgtccgaagtgccggggatcagttccgtcattttctctccgcaacagacaaccgggacgccggaatcgttcatttttgtgatgatatttttgcagtgattgcagatatagaattttacgctcatagaggacctccttgtgaatgatctaaaataataatagtaactgttactgatataataccataagaaataccatattgcaaggattatttaaaaatataataagatttttagctctcagtctgtatttgttgggagtcagaagaataaatttacaggcttatgatttatggaaagccacagcagcaaaacacaggaaaatctggctacaggatcacaccgtggattttccgggttatgtgagagtacagagtggaaaactggagaaaggatcgataaaaagaagtgctgggaacgggaaaaagagcttgggacaggagagggagttttgtccggctgagataaaaaaaaggacgctgcagattttgcagcgtcctttgaaattgcgaaatggaagcagttccaattatttaagatcagatctgcgggccagcggcaacaagtgctttgccggcttcgttgctctcgtattttgcgaagttcttgatgaatcttccggagaggtcttttgctttctcttcccagtcagcaacgtttgcgtatgtatcgcgtgggtcaaggatcttggagtcaacgcccggaagctcggtcggaacttcgaagttgaagtacgggatcttctttgtcggagcgtttaagatatcgccgtttaagatcgcatcgatgattccacgggtatctttgatggagatacgttttccggttccgttccagcctgtatttacgaggtatgccttagcgccgctcttttccatcttcttaacgagctcttccgcatattttgtcggatggagttcgaggaatgcctgaccaaagcaagcggagaaggtcggtgtcggctctgtaattccacgctcggttccggcaagttttgctgtgaaaccggacaggaagtagtattttgtctgctccggagtcaggatggataccggcggaagtacgccgaatgcatctgcggagaggaagatcacgttctttgctgccggacctgcggagatcgggcggacgatatttttaatatggtcgatcggataggagacacgggtgttctcagttacgctcttgtcagtgaaatcgatcacgccgtccttgtcgagagttacgttctcgagaagagcgttgcgcttgattgcattgtagatatccggctcggaatctttatcgaggttgataaccttcgcgtagcagccgccctcgaagttgaatactccgttgtcgtcccagccgtgctcgtcatcaccgatcaggagacgtttcggatctgtggaaagagttgtcttaccggttccggagagaccgaagaagattgcggtgttcttgccttccatatcagtgtttgcagagcagtgcatggaagcgatgccctttaacggaaggtagtagttcatcatggagaacatacctttcttcatttctccgccgtaccaggtgttgatgataacctgctcgcggcttgtgatattgaagacaacggctgtctcggagtttaagccgagttccttgtagttctcaacttttgccttggatgcgttgtaaacaacgaaatccggctcgaagttctcgagttcttcagcagtcggtttgatgaacatgttctttacgaagtgtgcctgccatgcgacctcaacgatgaaacggatcgccatgcgggtatctttgtttgcgccgcagaatgcgtcgacaacgaagagtctcttattggaaagttcttttaatgcgatatcttttactgccttccaggtttcctgagaagccggatggttgtcgttcttgtattcgtcagatgtccaccatacagtatctttggaattttcatccacaacgataaatttatctttcggtgaacggccggtgtagataccggtcataacattaactgctccgagttcgctgacctgtcctttttcatagccttcgagttccggtttcatttcctcctcgaataacatttcataagacgggttgtagacgatctctgtggttccggtgatgccatacttgcttaaatcaatctttgccatcgcttatctaacctcttttcataaatttgatgaaaattttgtacatgttcagatttgaacaggtaccattacctggaatttttacaggcaataatgatatctttcaattccattatacatgaaaattggacaaaatcaacaacaaaatagcaaactttgttaaaataatatcattcttttgctgcgatacgtttcttgcactgaaattctaagaaaataaaggaaagacgttattttcgaaggaaaagaaacaaattgcagttgacaaaattagatagttgcactatcatccaaattggttgatagtacaactaaaaagtatacatctgcgggcgggaccggagacggctgcaatagcgggagaagcgcatagagcgcgttttgaacaggcggaaaggtttgacggaaagaattctgccaggaaggagatcatatatggatcagacggagagaaagatgacgaagatcgcccgtgaggtcgggaaatttacggtgcagacgatgaaagaagaggggatcggaacggcggaattcgattttatccatcttgtccgccacaatccggggatcacccagacggaggtccgggaaaagttaaagatcgataagggcgccgctgcaagacgggcagcgagcctcgaggcgaaaggatatctggaacggaagccgaatccggcggacggccggagtcagctgctctttgcgacgaagaaggcggaggagctgaaaaattcaaaggcggagatcgagacgatcttttatgaatggcttttagccgaacttccggaggacgagaggaacagattctgcgagacactggataagctttactggcgttcgaaaaatgagaggcgtgcggggtttgaaacggtctctaagctcgtcgcagagcggcagaaagagggaaaagaaacagaatccggagatttctgatctctcagaatggaaaactttaaaagcgaattctgaaagagaagattgttgtcacgaacactgcggccggtatacagaccatcagaaggaacaagcagtgaagcatgacaaaagaggaaacgatcatcatgaataaaaagaaacttcatccggaccggatcctagattatttccgggcggaatggaaggtcctggcgctgatcacggtgtctggactgatctacaatctggggctcatggcgggaccatggtttgagggaaaaatggcgggctgcctgatgaggatcctgagcggggcggagcggttcccggcaatgctccggctggcgtctgcttacgtgatcgtgatcgggctggtgcagctggccagatacatcaagcggttttatgtgcgccggtttgccaacaatgtgaacaggagaatgaagaggatcctctaccggacgctggtacataaatcgcgtgtggagttggagaaagagggcgcgggaaatgtcatcacgaaggcgatctccgatgtggacgactgcgtggaaggcatgagaaagttcacgacggagatctttgacacgggcgtggcgcttctcggctatatgggaatgctgttttactacgactggagacttgcactctgttcactgatctttccgccgctttcctatattatcgcggagaagatgaaacggatcgtccatagaacgggagcggcttacaaggaacagaccggaaagctcaatgcggcaactctggaccggatcacaaacgcgatcacataccgggtgttcggatgtgagaaggagcggggagaagattatgaggtccatctgaaagagtatgagcgtgcggcagtcagggtcaatatctggaacgcggctctgccgccggtctacaaggtgatcgcgatggcggggactgtgatgatcctgtattttggctctaagaacatccttggaagcggctggacgagctgggatgtcgcagcatttacgaccttcctcgcgtgctatacgaagctctccgacaagtcctcgaaggcggcaaaactcttcaatgcggtccacaaggcacaggtgtcctggaagcggatccatccgtatatggagcgggctgctcaggctgcggaggaggatgagatcgcggagcagactgaaaaattcagtgcaaaaacaggcgaaagtcatacggaacacggtgtcatttccgcagatcatctgacattcagctatccgggcagtgcgccgatctttgaggatctttccttcaccgcgaaacctggacagatcatcggcattaccggtccggtggcgtgcggaaaatcaacgctcggaaagatatttctctgcgaatatccgtatgaaggccatctgacatatggcggcagagaactctcctcctgtacggaacaggagcggagcagactcatcggatatctcggacatgatccggaacttttgggcgacagcatcagaaataatgttcttttgggagatgacagtgatgtctggacatggctgcgggctgtatgctttgatgaggaggtccgggagatggaggaccgggaagatacggttgtcggaaacagcggcgtccgtctctccggcggtcaggcggctcgccttgccctggcgagaacgctgtgccacggaaagccggtgatgatcctggatgatccgttctcggctctggacaggagcacggagaaacaggtgtttgagcatctgaaggagctctcgaaggacaggatcgtattccagatctcccacagactgtatctgttcccggagttcgaccaggtgatctggatggaacacgggacgggaacatgcagcacgcatgagaagctgatggcagaaaataaacagtatgccgagttgtatcacgcgcaggctgcggagaaagagtctgcgaatgatgcagaagagatgcagaaaaaggaatgtggagctgaaaacaaggcgtcaggagaaattcggaaaacaggagatcatcgtctgatgggaatgaaaacggtggggaaaggaggaaaaagcaatgagtggaaagaagaatatcagtgcggcatcgatcatcggaaaaacggtcatgcgggaaaaatggctttccatcgggatcgttctgacggtgacgggagcggttgtcgtttctctgcttccacctcttgttctcggaaaaatcattgaccggatcgccggcgggaatttttcgggattttccatggctgcggagtattttctgctgatcttcctgaccggggcgctggagtccctgagagagagcttcctcactgtctttggtcagaagatgacgtattcgttcaggagcgagctctccgataagcttgtccgactgagtgcagacacattaaataaggaagaaccgggagctgtggtttccaggtttgtcggcgatgttgacaccgtggaagcgctgtttacctccgggatcatcagtatgttcgcggatgcatgcagagtcatcagcatttttgcggtgatctggttccagaaccggggactcgcgctgcttttgatcgttctgatcccggtgatctttgtgtttacgaggatcgtacagaagcggatgctcacggcgcagcttgcaaaccgtgtggcggtgagccgtgtcacaaaccatgttccggagacgatccgctgtatccggacgatccacacgcttggaaaagagacgtacatggagaaacggtatgatgactatatcggggagagttattccgcgatcgagaagacaaacttctacgatgcagtctactcaccggtgatcctgttcctcaacgcggtcgccgttgcagccgtgatgctgctcgccgcgtccggaaatgcgaaggtcctggctttgttcggcatgtccgtgggaacgtcggttgcagtcatcaattatatttcccaggtattctccccgatcgagaatctcggaatggagatccagacgatccagtcggcggttgccggtgtatacaggatcaatgagttcctggcgaaaccggagagggagagcatgaaggagaccatgccggaaaattccgggaaatcggagccgggaaaagaaaaggacagagagactgataccggagatgagcggaaggaaaagaagaacacagagggaaaaccgtgcatggatcacgggggatcgaaagaagaaccctgtgtagaatttaagaatgtcacgttcggctacgatgaccatgttgttttgaaaaatttaagtttcgcgatctacccgggcgagcaagtgacgctgacggggcgcaccggcgccggaaagagtacgatctttaagctgcttctgggactttaccggccgaattccggtgaggcgctgatcgagggcgaggaggcataccggatcccggacagggagaagcggacgaagtttggttatgtggagcagtcgttccacatggtcccggggacggtgcgcgaccagatcacgctgtttgatgcggcgatcggggatgaggaggttcaggcagctgcagagcttgtgggacttcacgagacgatcatgggactggaccagggatatgacacgttatgtaaaccggaaatcttctctcagggacagtggcagcttttgtctatcgcaagagcggttgcgggagagccgaggatcctgcttctcgatgagatcacggcgaatctggatgcagatacggaggagatggtgctccgggcgctgaagagtgcgtctgaggggcggacggtgatctcgatctcgcatcgggtttatcagagagatgcgggggagagaatcaggtatttggagatttgattttcatttacaaattaaggaaacgggaatataataagccgaagaaaaataccgctttttgtcaggtttgcattcgggaatctttggtcccggagggtactttcctggcagagcggtctgacgggaggtaaaaatgccaattttatttgcaattgtattccttgtgttgatctttaaatgtgtcggtcttgtcctcggagtctgcgggaagcttcttggtgcggtcctcagtctgtttggatttatcgtatcggtcgcgattggagctgttgtgttcggactttctacggcatttgcgctggtgctgttatgcatcgcggcagtatggcttctgatcaagctgatcgtttagagttttgctgaagcgctaaaatccgcggcggagtcttgacaaacgggagaaaatccattaaaatccatcatatatgcatatcagacaggccttgaagagggaaagtagatgaagggcggcatttcagagagaaagcggatggtgagagcttttatgtgcgcgtcgttgaaccggcctcggagctttgtgcgagagatggaaaatgtcgtaatggacagctaagatcacggagatcgggattgctgcggaacgactgcatcgttaagtacagcgtagatccggcgttaacggatatcagaggagagtttccgcgacaggcggaagctaatttgggtggtaacgccggctgtcggtcccttgtgtggggagcggcagccttttttattcaacaggaaagttcgatggaacttccctgttgaacaaaaaggcactacgtgccaatgatgcgcactcgcgcgaagatgaaggctgttgcaagcgaccgcgcgagacgcctgaatgtgccaggacacattcctttttaacaggaaattctccgcatctgaaacagagagacatgcagacaatgaatttttatataaaggagaaaacaatggcaagagacaagaaacttgtggaatccatcacttccatggaagacgatttcgcgcagtggtacacagacgttgtaaaaaaggcagaattatgtgattatgcgagcgtaaagggctgcatggtcatcaaaccggacggatatgcgatctgggagaatatccagcatgagcttgacaagcgctttaaaaaagcaggcgtaaagaatgtttacatgccgttattcattccggagagtttacttgataaagagaaagaccatgtcgaaggtttcgcaccggaggtagcatgggtgactcagggaggtcttgagccgcttcaggagcgtctctgtgtccgcccgacatccgagactctgttctgtgatttctaccagaaagacatccactcctaccgtgatcttccgaaggtttacaaccagtggtgttccgttgtgagatgggagaagacgacaagaccgttccttcgttccagagagttcttatggcaggagggccacacagctcatgcgactgctgaggaagctcaggagagaacgatccagatgttaaatctctatgctgacttctgtgaggatttccttgcgatcccggttgtccgcggacagaagacagacaaggagaagttcgcaggtgcagaggcaacctacacgatcgagtccttaatgcatgacggtaaggcacttcagtccggaaccagccacaacttcggggatggttttgcgaaggcattcggaatccagtattctgataaagataaccagttaaaatatgttcaccagacatcctggggtatgacaacccgtatgattggtgcgatcatcatggtacatggtgacaacgaaggtcttgtacttccgccgaacgtagctccgacacaggttgtgatcgttccgatccgccagcagcaggagggcgttctcgagaaggcaagagaagtggaagaggttctctccaacttccgcgtaaaagttgatgattccgacaagagcccgggctggaagttctctgagtccgagatgagaggaatcccggttcgtgtagaactcggaccgaaggatatcgaggcaggacaggcagttcttgtccgccgtgatactcacgagaagatcacagttgcattaagcgagatcgcagagaaggttgacgagctcttaaagacgatccagcacgatatgtacgagcgtgcgaaagcacatcgtgacgcgcacacttacgatgcccacaacatggaagagatgaaggacatcgcagacaacaagccgggcttcatccgtgcaatgtggtgcggctgccaggagtgcgaggacaagttaaaagagcaggtaggcgttacatccagatgtatgccgttcaagcaggaaaaacttgctgatacctgcgtatgctgcggcaaaccggcaaccaagatggtttactggggcaaagcatattaatgaaacgatgggatatcaaagacctgacgctcggggggctgtttacagccctcatcgccgtcggggcttttcttaagatcacgatccctgtccagccggtgccgatgcattttacgctgcagtttttctttgtcttgctggcggctctgctcctgggatcaaagcgggcgtttgcgagtgtgatcacatatcttgtgatcggactctgcggacttccgatctttgcgacgggcggtggaccggcgtatctgttaaaaccgacgttcggattcctgatcggctttgcggcgtctgcttttgtgaccggacgtgtatatgagatcagaaagagcacatcattcttctggctgttgttttccgcgttctggggacttctcgcggattatgcctgcggaatgatctatttttatgtgtgcagcaattttgtcctcggcgtgagtgtcggctggaagcttgtgtttatcaactgtttcctcctgacggtcggtgaggattttattttatgtattctggcggctgtgcttgcaaaacggctgatcccgatcctagggaagcttgcaaagtaagaagaaaatccgggtcggtcttttgagcaccggttcggcgtgacaggcagtacagacagaaccttgtggagtttcgaaatgaaatttccgataaagaaaaaggaggtaccggaccagtgagaattgagatgccttatgaggcggaatggatcattgacaatatacgaagccacggatatgaggcgtttatcgtcggcggctgtgtccgggacgccgttcttggaaggatcccgggggactgggatatcacaacctctgcaaagccggagcaggtgaaggagatcttcggaaagacggtcgatacgggattgaagcacggcacggtgacgatcatcaagcatggaaaaggctatgaggtgacgacataccggatcgatggggaatatctggatgggagacatccggagaccgtggaatttacgccggatctgagggaagatctgaaacgccgggattttacgatcaacgccatggcatacagccatgagacggggatcgtggatgaatttgagggcatggaggatctgaaacgtcgggtgatccggtgcgtcggctgtgcgagggaccgctttacggaggacgcgctgaggatcctaagggctgtccggtttgccgcccagcttgattttgtgatcgaggatgagacataccgggcgatcgccgagatcgcgccgaacctggtccatgtcagcaaggagaggatccaggtggagctcacgaaactcctgctctcggatcatcctgagaagatctggatggtggaggagaccgggatcgcatcgtatgtggccccgggatttccggaggtctttgagcgggaactccgggagaatgagccagaaagcggaagcatgatgcaggaaaaacggaatgaccgggagatccttaaaacatgctggaagggcgtttcctccctcacggcggataagtcccaccggtgggccggatttctgcgccatatgaagccggaagaagcggtgaagatcttacgaggcctgaaacttgataatgatacgatcgggaacgtgaaaaacatgctgaatgtttttcagacacctcctggtgcggataagatcgagatcagaagagccctgagtaaggttacggagtaccagttcctcggtgccatgcagttaaagaaaatggacggagaccagaatgtcccggagatcctgcatctttttgaggagatcagggaagctggggactgcgtaagtctgaaacagcttgcggtcaatggcggtgatcttcttgcgatgggactggaacatggaaaagagatcggagacggactcctgtatcttttgaacattgtgatcgaacatccagaactgaataaaaaagatatattattagaaaaaattagccaattcaaataataccagaagaacattgtatgaaggacatctgccgggaatccgacaggtgtcttttgctgttgcggatgtatgcttgtgggaataatcaccatggttttctcatatcttgtgcagaaagctggaaaaggtcagaacgggatatggggggatcaaatcgtgatcgactggaaagaagaggcagagaaaacgtatggatttcaggtgaatacactgcggcggggacgtgggtcctggatcctggagacggatcaggggctgcggcttttaaaggaatatcggggaagcgtgaaccgtctggagttcgaggaggcggttttgcagtctctggacgggatggagacggtaaaggcagatcagtatgtgagaaactccgagggagaacttttatcttcggcggaggatggaagccggtatattgtgaaacaatggtatgcggaccgggaatgtgatctgaaagatgagaaggagctcctctcggcggcccgggcgctggcgctcctgcaccggcagtttcgcgaagtaaagaggcaggctgaatggaatatgagatccatggtctcgccgccgctttttgaagcgatgcgacgccataaccgggagctcaggagggcgagaacgtttatccggggaaagcggaagaaaaatgagtttgagctctgcgtgatcaggaattttgagtgtttcgcggtgcaggcagaggaagcggagcagggaatggaacggctgtatgaaaaacatggtgaggagatcatgaacggatatgcggtctgccacggggagccggactaccaccatattctgatcggaaacggatatacggcagtgacggaattcaaccagatgcacctgggtgtgcagatggaggacctgtactattttctcagaaagatcatggaaaaacatgactggaatgagcgcctggggagacagatcatggagacgtatgagcgcgtgctgccgatcacggagctggaacggcaggtgctttactatctgttccggtatccggagaaatactggaagcagatcaatttttattacaatgccaacaaggcctgggtgcctgcgaagagcacggagaagatcaaaaaactggaggcacagcagaagatgcgcgagaagtttatccgctttttttcctagttgggaattttctgaaccggaaattccgtatgatatcgttggagtcgcggatttttccgattcggaatgcggagcatcggcaaaatcctgttacagtgtgcgggcatggagtgtccgtgtactgtaacatgtttatccggatgcctgaaaaataatgagtgtacaggcttgcggaacaggattgttatatgataagatatggtataaaaatgcggctgtgaccggaacataacagacatccgcacaaaggaggaaatcccatgaaatgtccattttgtggtgcacaggatacaaaagtcatcgattcgcgcccggcggatgacaacagttcgatcagacgccgccgtcagtgcgaagagtgcgggaaacgttttacgacgtatgaaaaattagagacaatgccgcttatgatcatcaagaaagatgactcccgagaaccgtacaaccgggagaagatcgagaatgggatccttctttcctgtcataagcgcccggtctcttcggaacagatcacgaagatgatcgatgagatcgaaaaacagatcttcagtatggaggagcgggagatcccgtccgtgacgatcggtgagcttgtcatgaaaaagttaaagatggtggacgaggttgcctatgtccgtttcgcgtccgtctaccgggagtttaaggatgtgaacgcatttatggaggagctcgcgaagttcctgaacaataaataagagatggggagaaaactgcaaagggctgaaaaattcaagccgaacgcagggcagcagtatgtttgagacattttatccgggaaactatgtggacagtgcatatgagatcccatacgaaaaactttatgagagaggatatcgcgggatcatctttgatgtggacaacacgctggttcctcacggtgcaccggcagatgcgcgggcgatcgaattgtttgagcggctccgtgcgatcgggttttcgacctgcatcctttccaataataaagagccgcgggtatctccgttcgctgacaaggtggggagtccctatatttttaagggcggaaaaccgtcgagaaaaggatatgagcgggccatggaacggatgaaaacagaccgcgacacgacattgttcgtcggggatcagctttttacggatgtctggggcgcaaaccggacaggcctctacgcgatcctcgtaaagccgatcaatcccaaagaggagatccagatcgtcctgaaacgctatctcgaggcggtagttctcgcgttttacaggaaacgattgaaaaaaatggggcagacagccggggatttttgcaaaaaatagttgaaaaccgcagtagaatagtatagaataggatagaatcagctattagcgtgaaatgtgaaataaaataattggaaacagttttaaggaggattatcatttatggtatcagcaggtgatttcagaaatggcgttacactcgaaatcgatggacaggtcgtacagatcttagagttccagcatgtaaaaccgggtaaaggcgctgctttcgttagaacaaaattaaaaaacgtgatcaacggcggtgttgttgagagaactttccgtccgaccgagaaattcccggcagcaagaatcgaccgtgtggacatgcagtatctgtatgcagatggtgatctttacaacttcatggatgtaaacacatacgagcagatcgcattatccacagatgttgttggcgatgcattaaagttcgtaaaagagaacgagactgttaaagtctgctcctacaacggcaaggtattctctgttgaggctccgttattcgtagagcttgaagtaacagatacagagccgggcttcaagggcgatacagctacaggcgcaacaaagccggctactcttgagacaggcgctcagatcaacgttccgttattcgtaaaccagggtgatcgcgttaagatcgatacacgtactggtgagtacctttccagagcttaatctgcaaaaacaagtttcagaatcccagggaaccaggtgtttcctgggactttttttatccttttttgtgcgaaaaattgcgtaacaggttgccaattgggtaaaattttcttataatggaaaggacagagaaaggaagtgaacacataatggaaggtcgaagtcatacgatggaggcagacgcacaccctgaaccggtggcaatacgcatgaccgggggctgctgttatgtgtgttgccgaaatcaatctgttcagttgtaaccggtgtctttggatttaccggatgcaatggctttgtctccatgatcgcatgaatctttgccggaaattccgggcagaaataacagattgtgggggaaaagaaaatgccgaatgatggaaatgaaacatttgacatggagcatcttctggagctggcagaggagaaaaaataccgcctgctgaaggaagagcttgtggaactgaacgaggtggatatcgcatcgttcatcgaagaactggactctgagcgcaccgtgatcgtgttccggatgctgccgaaggcgctggcgaccgaggtatttgccgagcttccggtggacaagcagagccacatcatcaacagcatcacagataaggagctttccgagatcgtggatgagctctatgtggatgatgccgttgacctggtggaagaactcccggcgacggtggtccgccgtgttttacagaacacgaagccggagacgagaaagctcatcaaccagttcttaaactatccggagaacagtgccggaagtatcatgacagccgagtatatcggactgaaaaagaacatgacggtggagcagtgtttcgcctacatccgccatcacgcagtagattccgagacaatctacacctgctatgtgatggacgaaaaaagaatgttggacggtgtgatcacggtaaaggaccttctccttcagccgtatgagcgccaggtcggcgatatcatggacacgcacgtcatcaaagcgaagacgaccgatgaccaggagcttgtggccgatacgatgaacaagtacggacttctctccatgccggtcgtggacagtgaggaccgtctggtcgggatcatcacggtcgacgatgtcatggaagtcatggaggaagaggcgaccgaggacttcgaaaagatggcagccatgctgccgagtgaaaagccgtatttaaagacgggtgtattcacactggcgaagaacaggatcccgtggcttctgatcttaatgctttccagtacgatcacaggtgggatccttgtaaaatacgagaatgcctttgcggcgatcccgcttctcgtgagctttatcccgatgttaatggataccggcggaaactccggaagccagagcagcacgatgatcatccgtggtatggctgtcggtgatatcgagccgaaggatatcctaaaagtcgtgtggaaggaagtacgggtcggtctgatcgttggatttgtgctggcggtggtcaattttatccgcctgatgatccagtatccgggaaatacgatgatctgtctgacggttgtgatgagtcttttttgtaccgttatcgtcgcgaagacgatcggatgcacgctgccgatcggggcgaaagtattaaaacttgacccggcgatcatggcgtcgccgatgatcacgacgatcgtggatgcggtgagcctgatggtgtactttaatctggcgtgccatctgctggatatgacggtgtagaggatggaaatgataagaatgtctgtctgcggacttatccgcggataaatatatattaacaggagtatggattatggaaaaagtaagaacaagatttgcgccgagcccgaccggccggatgcatgtaggtaatttaagaacagctctttacacatacctgatcgcgaagcacgagggcggagatttcattctccgtatcgaggatacagaccaggagcgccacgttgagggcgccgaggacattatctaccgcacactggcagagacaggcctggtccatgacgaaggtccggataaggacggcggctacggtccgtacgttcagagtgaacgtcagaaagccgggatctacatggaatatgcgaaaaaacttgtggaaaaaggtgaggcttactactgcttctgtacccaggagcgcttaaatacattaaagaagaccgtaaacggtgaggagatcatggtttacgataagcattgcctgcatctctccaaagaagaggtagaggcaaacttaaaggcgggaatgccgttcgtcatccgccagaacaacccgaaagagggaaccaccacattccatgacgagatctacggagatatcacagtagacaacgcagaactcgacgacatggtcctcatcaaatccgatggatacccgacctacaacttcgcaaacgttgtggacgaccatctgatgaagatcacacacgttgtccgcggaaatgagtacctttcctcctctccgaaatacaaccgtctctacgaggcatttggctggcaggttccgatctatgtacactgcccgaccatcacaaacgaggagcacaagaaattaagtaagagaagcggacattcctcctttgaggatcttcttgagcagggattcttaacagaggcgatcgtaaacttcgttgcccttttaggatggtctccggcaaacaaccaggagttctttacacttgaggagcttgtaaaagagttcgattaccacaacatgagcaagtctccggctgtctttgatatgacaaagctccgctggatgaacggtgagtacatcaagaagatggatgatgacaagttcttcgagatcgcaaaaccgtaccttgaggctgtgatcaagaaaccgctgaatttaaagaagatcgccggaatggtaaagacaagaattgagactctgctcgatatcgcggatcagatcgatttcttcgaggaaatgccggaatacagcgcagatatgtatgttcataagaagatgaagacaacaaaagagaactccttagagacattgaaggaagttcttccgatccttgaggcgcaggatgacttcagcaatgacgctctctttgaggctctttccaaatacgtttccgataagggcgtaaagacaggcttcgtaatgtggccgatccgtaccgcagtgtccggaaagcagatgactccggcaggcgctactgagatcatggagatcatcggaaaagaggagtctctggctcgtattaagaagggaatcgaacttctggaagcagcagaataatggattttaatcaggcacagatgacggccctggaacaccgggatggaccgatgatggtcctcgcgggtccggggtccggaaaaacgacagtaattacacacagaatcaagagactgctggaggcgggcgttgacccctccggcattcttgtcattacgttcacaaaagcggcggccacggagatgaaggaacggtttctgagactggcgagggaagaagacgaaaaacggaaacaggcggagcagggagcaaagtgtgcacagagaacaggcgggagccggacgggggcggaaaagcccttttttggaactgctgatccgggtccccggaggcgcgaagcctgcgggacgtctctggaggcggcaggttcccgtgtgagctttggaacctttcactcggtcttttaccatatcttaaagtgggcgtaccgtttccctgccggaaatgtgatcagcggggaggaaaaacgccagtattttaagaagtttctcgatgaatcggagatggaggtcgaggacgaggcggaatttatctcctccattatcaatgagatcagctatgtaaaaggcgagcgcctggatctgaaatactactattcccagaactgcccggaagagtggtttaaaaagctttatgacgggtatgatgagatgctgaaaacgacgggaaagatcgacttcgacgatatgctcgtcatgtgccatgagctgtttacggagcggaaggacatcctggcagcatggcagaagaagtttaagtatattctcgtggatgagttccaggatattaaccttcttcagtatcaggttgtccggatgctggcactgccggagaacaatctctttatcgtcggagatgatgaccagtcgatctaccggttccgcggggcgaagccggagatcatgctcggctttgaaaaggattttccggggacaaaacgggtgcttctgggaacgaattacaggtccacaaaggaaatcgtggagacctctcttcgccttattgagcacaataaggtccggtttgagaagaagctggagccgttccggggatccggacgtccggtggatttccgggttttcgacaatcccggacatgagatggacacggtggcacagagtatccgcgcgtaccatgacgccgggtatcagtggagcgagatcgcggtactgttccgaacaggggcaaattccggcctgatggcggagcggctgatgggctataatattccgtttaagctgcgggatgtgatcccgaatctttacagccactggatcgcgaaggatctcttcgcctacatggagatcgcggcgggcagcaggaaaagatccgatttttacaggatcatgaaccggccaaaccggtatttcagcagggatgcctttgatacgccgatcgtatcctttgaccgcctgaaatccttttaccaggatagggactggatggaggagcggatctgtgacctggaggcggatcttcgcgcaatggcgccgttaaagcctgtggcggcagtcaactatatccggaaggcgatcggatacgatgactatctgcggtcctatgcagaattcaggcgaatgaagccggaggaacttttcgagacggcagataagctcgcggagagcgcggcggaatttgcaacctttgtggagtggaaggaacatgcggcccggtatgaggaagaattaaagaagcagaatcaggaagagcgcgaggagacgaaagaccgcgtgactctgtcaacgatgcacagtgcaaagggactggaatatccggtcgtctttgtggtcgatgcgaatgaggggatcgttccacaccataaagcgggtctgccggcggatatcgaggaggagagacggctgttctatgtcgccctgacacgtgcgaaggaccggcttcatgtagcggcggtgaaggagcggtatcacaggaagacggatgtttcccggtttgtggaggaagcaggattgtgatcaagtcgaatgtacgtgggacctggtgagcaattctggtcagcgcaagttgacaaattcctcacggaattactgcactttgcactctgttttaaaaagcgaggagaaacatgggacttgttcatatttactgcggagatggaaaaggaaaaacgagcgcggcggtcggactggccgtccgggcggcaggatgcggaaaacgcgtggtgatcgcgagatttttaaagacggacaattccggggaagtggaaattttaaagaaaatcccggaggttacgctgatcccgtgccggaaaacatttggctttgtccggtcgatggatgaagagacgaaaagggaatgtgcggcataccacagaaagctgtttggcgaagcggtgaaactcgcggaacatgcagatctggtggtgtttgatgagatcatggcggctgtaaattacgggatggttccggaacgcgatgtcctggaatttcttgaaaaccgccccggaagagatcagacggacgggctggagatcgttctcactgggagagatccgtcggagaagctgatcgcggcagcggattatgtctcggagatctgtaagagaaagcatccgtttgaccgcgggatcatggcgagacggggagttgagtactgacgttacagtacacgggcactccatgcccgcgcactgtaacgggattttgccgatgcttcgtattctgaatcggcaaaatctgctgccacaacggtattgtacggaatgttcagttcagaaatttctaccgtgtacagcaatgtactgattgcttcttttttaaagtagcaattctttctattgattttatggcagtttactggtatcctataaaaaatggcagccgggacagaaaagaaccgctgcaagaaacggcaggatgccggaaatgagaggaatttgagcttatggcaaaggacaaaaatatgaatcaggatgctgcaaacgatgaggagatgactgtgactctgacactggatgacggaaccgagttagagtgcgtggtcctcacgatctttgaggcggctgataaggaatatatcgcgcttcttccgttagacggaaatgaggctgaggatggcgaggtatacttataccgctacacagagatcaatggaactccggatatccagaacatcgagagcgacgaggagtacgagatcgttgctgatgcgttcgatgaacttctcgacaccgaagagtacgacgagattgtaggcgaggacgagctggacgactgatttaaaaaatgagaaacagcagtttaccataatatgaaccgctaaggcggcgtttccgacttccgatagagggagaatggggacgccgcctttttacgggcaatatacgtgcggggcgtgggatagcgggagcaaatgggagatagaacataagttcgaaaataactgtacatttctatatagacatggtatacttaaaagcagttaaatatatttttaattccaggatgcgagaccggaataatatgaaagaagcatgaaactaaaaaagaagaaatagaccgaatcaggaggaaaccatggatcattttgaacttgtatcagaatatcagccgaccggtgaccagccgcaggcaatcgaacagctggtaaaaggcttcagggaaggcaatcagtttgagacactgctcggtgtgactggatccggtaaaacatttacgatggcgaacgtgatccagcagttgaataagccaacgcttgtgatcgcgcacaataagacgctggcagcacagctttattcggagatgaaggagtttttcccaaataatgcggtggaatactttgtatcctattacgactactatcagccggaggcctatgtgccgtcgacggatacttatattgaaaaggactccgcgatcaacgatgagatcgataagctgcgccattctgcgacagcggccctttctgagcggaatgatgtgatcattgtagcttcggtatcgtgtatctatggtctgggaagcccgatcgattataagaacatggtgatctcgctgcgccctggaatggaaaaagacagagatgaagtgatccacaaactgatcgatatccagtatacaagaaatgagatggattttaaacgaggaagtttccgtgtgcgaggagatgtgctggaagtatttccggcatactccggaagtgaggcgtacaggatcgagttcttcggggacgaggtggaccggatcatggagatcgaggcgctgaccggagaggtgaaggcacagttggaacatgtggcgatcttcccggcatcccactatgtcgttccgaaggaaaagatgatgcgtgcgactgagaatattcttgcagagatgaaggagcaggtaaccttctttaaaagtgaggataagctcctggaggcacagaggatcgctgagcggacaaactttgacgtggagatgatgagggagactggattctgctccgggatcgagaactattcccgccatctcgtgggttccgcaccggggcagccaccgtgtacgctgctcgactattttccggatgattttctgatcatcgtggacgagtcccatattacgcttccgcaggtccgcggcatgtattttggcgaccgatcgcgaaaaaagacactggtggattatggcttccgtctgccgtccgcacttgataaccgtccgctgaattttgaggagtttgagacacatatcaaccagatgatgttcgtgtcggcgacgccgtccacttatgaggcggaacatgaactcctgcgtgcggagcagatcatccgcccgacagggcttctggacccggaaatctctgtccgtccggtggaaggacagatcgatgatctggtgggcgagatcaataaggaagtggaaaagcacaataaagttctcatcacgacgctcacaaagcgtatggcggaggacctgacggattatatcagggaagctggaattcgtgtaaaatatctgcactcggatatagatacgctggagcgtgcggagatcatcagggatatgcgtctggacgtctttgatgttcttgtcggaattaaccttctcagagagggacttgatatcccggagattacgcttgttgcgatcctggatgcggataaagaaggatttcttcgttcagagacatccctgatccagacgatcgggcgtgcggccagaaacgcggaaggtcatgtcatcatgtatgcagatacgatcacagattccatgcgggccgctattgacgagacgaatcgccgtcgggagatccagcagaagtacaatgaggagcacggaattaccccgcagacgatcaaaaaagcagtccgtgatctgatcgcgatttcaaaggcagccagcgcgagtgaggaagaatttaagaaagatccggagtctatggatgcaagggaactggagaaacttgtaaaggaacttacaaagaagatgcgccaggcggcagcggaactgaactttgaggaagcagctaagctgcgtgaccggatgaaggaagtgaaacagatgctgctggaactggaggatcattagaacgcacagcaggaagaagaaatattttgtattccggggaaatgccgtggaaggattttacagacgaaggtatgtgactgctataaaaaaggaaaaaggactgggagacagaagctctcagtctttttgatatgtgcacacatgcctttgcccgcaccgggcggacgaatgtaccggaatgcaattattgacaattattctcaataagaatacaatatttccagatgacaggaagactgctatcgactatgataatgaaggatggacacaggatgaaactttatgaaggaaagattggcacaacgtacctggtcgaatcggttcatgtggaagatgcgatcaaccggcgtctggaggcgctgggtgtaaatgagaatactcctcttcttgtgatgaacaagaaaaacagcggaacgatgatcatcaaagtccgcggaacccgtctggcgcttggaaggcggatcacaggcgggatcgaagttaaagaggaggcggcatcatgagtggaacagaaagaccgatcaatgtctgttttgtgggaaacccgaactgcggaaagacaaccttgttcaatgcatttaccggtgcaaaattaaaagtggcaaactggcccggcgttacggtagagcgggtggaaggagagacgagctataagggcagaaagatccatgtgatcgatacgccgggtatctacagcctgacttcctatacaatggaagaactcgtcacaaggcgctgtatcgaggaggacgatgtggatgtgatcatcaacgtcgttgacgcgtcctcactggaacgaaatctgtatctgacgctgcagcttctggaattaaagaaaccagtaattctggcactcaacatgatggatatcatcgaagagcgcggaatggagatcgatcttcaccgtctcccggagatgctgggctcgatcccggtcgttccggtatcagcgagaaagaggacaggactcgatgttctgatgcatgcagtggtacatcattatgaggaaggaccgcagggggtgatcgttcactatgacaggacgatcgaagaccggatccagagagtagaggatcttctccgtgaaaaatatccggacctgacgaaccttcgctggcatgcgatcaagatgctcgagtacgataaggaggtcatgaaggaccatccgatcgaatttgagagtatcgttccggaaactctggaaaaagagatcatcaatgaaaagtatgactatgtggaatcggttgtcaacgaatgtctctttaacaaagaagaaaaatcacagatgacggatcgggtggatcgtcttttgacgcatccggttcttggaattccggtatttttcgggatcatggcacttgtatttttcctgacgtttaccgtcggagatttcctgaaaggttactttgaacagggactggaacttttatcgtcgagtgcactttcagggctgcaggctgcgggtgcctccgactgggtgatctcccttgttgttgatggtgcacttgctggagtcggaggaatcctgacatttctgccgaatatttttattctttttctcgcacttgcattccttgaggacagcggatatatggcgagagtggcatatgtcatgaatgagacgatgggaatggtcggactttccggtcgtgcgttccttccgatgctgttaggatttggctgtacggttccggcagtcatggcgacaagagcgttggaaaatcagagagaccgtttaaagacgatcctcatcacgccatttatgtcatgttcagcaaggctgacgatctatgtactccttgctgatatgttttttccgaagtcggcgatgttagtggcatattccctgtaccttgtcggagttgcgatggcgatcatcattgcgctgatcgtacataaaacgacagacagcaagacggaaaatgcccttttgatcgagcttccggaatacaagatcccgaacttgagaactgtagcgatctacgtctgggagaaagtaaaggattatctgacaaaggcaggaacaacgatctttctcgcatcgatcattttatggtttgtcatgaatgtgggaccgaccggattcatcacaaacgttgcggacagctttgctgcaaaattcggtcagatcctggtgccggtattaaaaccggtcggactcggaagctggcagatcgcggtagcgctgatctcaggaatttccgctaaggaggttgttgtttcaagtatgtccgtactctacgggatcacaaacatcaactcggcagcaggaatggcagaactttccggaatccttgggggaacaggattcacggctgtcaacgcgtatgcactgatggtattctgccttctctatacaccatgtatcgccacgatcgccacgatcaaacgtgagacacagtcctggaaatggaccctggggatggtcgtattccagctggtaatcgcctggatggcggcatttgtcgtattccagatcggaagccgtctgtgatctttgacagagcaaaaatattgagaagctcccatcttctgacgagcactcaaaggaagcagtcattagaagaataagtgggtgaaaagagaacagtgcaacaaatcacggtcaggtttgcgctgatatgtcagactctgtgaaattactgaccgtggatcggaacaagaatctgaaggggtaaaaggggtaacagatgaacgaaaaaactttgcttgaggccgtggtgctggcaggtgagctcatgcttgtcagcggcgcggagatctacagagtggaagatactatgaaccatatgttgaaacgctccgagtatgagcagacggagacgatcgtatatggaacaggaatctttgtcacgttaagcgatccgaataaggaaccgctgacccgggtcaaacgtgtcgcggaccggtgtacaagtatcaaccggatctgtctggtgaatgatgtgtcgcgccatttctgtgagggaaagatcaccgtggaggaggcgctgagacagctgcgtgagatccagtcaccgaagacgaaccagtatgactggctgacacagggactggggtacgttggggtttcggcgctttttgcccccatgttcggcggatcctttggagactttctggcatcgatcgtagtcggtgtctgccttgcggtcgcggcctggatcggaaaggcgctgaaattcaacgatttctgttttaatgcctttggcgcctttgtgctggcattttcagccatgacggtctgtcattcctatccggggctgaattctgatacgatcattgtcagcgctgttatgcctcttgtccccggggtgacgtttacgacggcgattcgtgatacattgaacggcgattatgctgccggttctgcgcggatcctcgaggcgatcgttgtgggacttgcggtagcatttggagtcggagcaggacttgtcgctgcacgcagtctggaaggaggacttttatgatcatacaggtattcagtgcgttctgggcgatcgcgatgttctcgatcctgacggaaactccaaagcgatttttaccatatgccgcattttccggcggtttcgcctggtgggcgtatttggtgatcaataacctgacacattccactcttcaggcaacgtttttttcgatccttgcaatggcatttttaagtcatatcctggcaaggatcaagaaagctccggtgacggttttcctgatcgcgggaatccttccgacagttccgggagcagggatttaccggactgtatattatctgatccagggagatcaggcgctttccacgcattacctgatctcaacacttcataccgcaggagcgatcgccctggcgatctttattacagattctgtcgtaaatctcgtacatctctatcatgaaggaagtcatgcgagaagaaattaggcggtgagctcgttggaagccttgtgggaggcgtgcggcaggcgggatctacaaaagagcttcggagttgtcagcgtagatctccatccggtcggtttctctgcggtagcggtatagatggtcagagagaaagtcttccggcaggatcgactcgcggttgacattccggatcgtattgcagaagacatggtaatcacgttccgtaaaagcttcagaatcagcaatgatcaggacctcgtggatgctggagggaaggatgagaagatctttcccaaacgcatccgcgaggtcttttaatttgttcgcatagagtacgcaggcggctccgtggtgagcggaactgttggtaaggacatagagcgtcggaaccgggcagtcttccggaacaaaatcgatggaaccggggaagtattcctcgatcactgtctcaaggcgccggaaacttgccggatagattcggggagtattttccgctgcaagcgaaaaaagatcttccggcgtcaagttccaggacgcggacaccacgtttgtgatgacggagctgatctgagtttccccttcagattctatgaccagggagaagatgaccgcgagatcaaggcaggggatccagggaatcgtctttaaaagttcctcgtttttatcctgggagacgagacgacaggtgatccggtcccggaaatcttcaaaatggtttagggaagttagacccgccacggagagcggaagttccgtatcagtgatcgataccatgtaatcgcagagctcggacatagaatgtcctttttcaaactgttcgtacagcatctcaagggagatcacgggagagcagtgttttcctgcttttaagagagccagggagtcgaggacgaccccgttgtttttcagaacgtgttcccggtgaatggaatagccggtgtcaagcatgttaaaaagctcttcctgcagtgcggcacagaattcttcgtagttcattgtaatacctcctgatgtgttttcagattcatagatttgatatttgtgacgtgtaagaatagaatgtttgtaacgatccagccggacggatccgggggatgaaactggtcacggagtttacaggtcggcagtcagacatcgggaagaagctgccgatggaaattcctgtaaggaaaggattggaccgttacggatgtaaaacaagtgaaaacacgctttgcgagttttcacttgttatcgcgacagtcgccaaggtctcgcgcaagcgcggactttggctcattgttcgcgtaaataaaaggataggtgtattctatcgaaatccagttcgaaaatcaatcgtgatgattcacaagaattgccccctgaaattgacatgcggacgaaaaaatgttgtatttacaacatacaaaaggaagatatcgtggtagaatagcagtaatataatcccagggggcaaaagtcagaactctgatgcaagtctgcccacagaaagatctttgcccctggaatccggcaagactgatacagtttaacaagaatcagcaagaattctcccacctctataggtggtgagatgaattgccatctcttgcatagtgccatagttggtatgtagatatcagattattgcacatagctgtgctgtgtattgtaaacttctcatatattgatttttatagtggtgctatatcatcaattctgcatacaacgaataagcctgaagggaaaatagattgcagatcaagcagaacaaatgttctgaaatgtaatagacaaatgatctcatttgtgatataattaaatcagtagaaatagaaagaaaggctgataaatatgagataacttgacaataatgcacattcagtatttttgctctattatcatctgatcctggtcgtaaagtaccggaaaaaggtcctgaatgatccgatctcggatcgcgtacgagagatttttgaatacattgcgcccaaatatcatatcaccctggaagagtggaatcacgatgaggaccatgtccatatcatgttccgtgcc

SEQ ID NO: 1995 - DNA, 62311 bp, Unknown
  gut microbiota DNA sequence
tttattataaactgctgctgcactgatctgtcactgaactgcatctgaaagagataaaaaaaggcaaataaaagccgaaaagagaacgataaagtagattatgatgcaatattgggattcgtgtatgtttaaaattagatgcagttaatgactgctccagacgcagaggtttattgaaaggcgaaatctgcttctggcattgtctcagcttcgcgactgctttgacattttttcagatacattgacattttttgacagatgcagacaaaaagggggaaaagcacttggctggaaccaggaaacaaaaagaaacgacaaaacaatcacagacgtccgcgagaacgagatcatcaacagcgaagacaacaggaagatctgcacaggcgtctaaaaataagacagcaaaaaatcagacaagatccacggcaaagaagagagagccggaaccggagtacgaggaggacactggatttttacaatccgaagcggtgatcctcggaacattcgcggtatgtgtgctgctatttttaagcaacttccatatctgcggatttctcgggaatttcttcagccagatcatgctgggtgtatttggctgtatcggctatcttgcgccgctcctgcttttcgcggagctgttattttacgcttcaaataagggaaatatccgcgcggtctacaagatgatcgcggtggaggtcctgctgatcgtgctctgtggacttgcgcagctgatctttggaggcggataccaggaagggcagacgatcctcgatatctaccagtctgccggcgcgagcggactcggcggcggtgtgatcggcggcgtcctcgtcatgatccttcacacagcggtcggaacgatcggagcctatgtggtcctcatcgtgttcatgatcatctccctggtatgcatcacggagagatcgttcgtgtccgcggtgaagagcggaagcggaaaagcctaccagtacgcgaaagaagattacagcagaagaaaagagatccatgaggagcgccaggctgaaaagcgcagactccgggaagaacagcgcgtccagggtgtaaaccttgcggcgacggatttctcgaaaaatccggatttcggcgggatcgccggcggatatatgggggttgtggatgccgaggcggtttctgagacggacgtgacggaggagaaacaagcagcctccggtacatatcatgaggaaaaacagggtcaaagatcagaggcgaagcagatgcagccggatccggccgatatcttcaaaggaaagatcacgatgggcggacgtcctcttgaggaggtggatgtctcccgggaagagagaacggcggaatcccgtccggcggaagagactgcaaagaatacagaacgagttccgtttgcggaagctccggcatcggccggaacccgtgaggacgaggacgtgtttatccgtcatggggagaatgcctttgacgatccggatcttttcccggatgaaaagaagagggagacggaagcctgggagagaaaaccgaaggtgtctgtcttatccaacattccggatatccctgtcggggagtctggggaggacgatgagatcctcgccgcgatgagaagagacgcagagagggaagcaaagatcttccgctcagagaccccggagcagaatgagagcgcagagaaccgggaaccttcagagatgccggagacggtatccgcagagagcggacagaaaatagaagcggagacaggagtaaagagcggggaaatgaccgctgcagctgctgaaagtgaaccggtatccgtatctgaaaccgcggaaactccgaaaccgtcccggatttcagaagaaaagtccgtgatggatctgacagatgatgaacttctcgatacggagccgtatgtggaaaatgacgattactggatccaggcggctgcggagccgggaagccgcgcttacagagcggcccatccggagagtgcggagcacgatgatcctgtgacagagttccatgatgacagtgaaccggacgaatgggctgaggaaaccagtccgtcaaaagtacaggagatcccggggcccggaccaggaccggaggatccgatcgtggaaccggcgccggctgcatccggacagtcagacatggaacagccgacgtgccgggaagaccgttcaccggaccgtccggcagcccgcgaatctgcagacgacaggcgcagggtcgtgaccgcttccggcaaggtgatcgaaacggatacagaagagatcataaagaaaaaagcggaagcgagaaagcgggaagctgccgagagagaagaggcaggaaacgaagtcttaaaggagatcaaacagacggaggaaaaaccgaagaaaccgtatgtgatcccgccgcttgatctcttaaagaaaggtgttcctgtgacgggacagtcggagcaggaatttaaggataccgcgatcaaactccagcagacactccggaactttggcgtcggggtcactgtgacgaatatcagctgcggcccgacggtcacccggtatgagcttcacccggaacagggcgtgaaggtgagcaggatcctgtctttagcggacgatatcaagctgaatctcgcggcggcggatatccgtatcgaggcgccgatacccggaaaagcggccgtcgggatcgaggtcccgaacaaggtcaacagcatcgtatatctgcgtgatcttctggagagcccggaatttaaaaaccataagtcaacgctggcgttcgccgtcggaaaggatatcggcggccaggtcgtcgttgcggatcttgcgaagatgccgcatcttctgatcgcaggacagacaggttccggtaaatccgtggggatcaatacaatgatcatgagcctcatctaccggtcgtcaccggatgacgtaaaactcatcatgatcgacccgaaggtggtggaactttctgtatataacgggatcccgcatcttctgatcccggtcgtgaccgacccgaaaaaggcggctggcgcgctcaactgggcagttgtggagatgatggaccgctacaacaaatttgcggcctcaaatgtccgtgatctgaagggatataacgcgaaggttcagactctggcggagagcggggatatccctgctgatcagatcccgaagaaactgccgcagcttgtcatcattatcgatgagctggcggatcttatgatggtcgcttccaatgaggtggaggacgcgatctgccgtctggcacagctcgcccgcgctgcggggatccatcttgtgatcgcgacccagcgtccgtccgtcaacgtcatcacaggcgtgatcaaggcgaacgtgccgtcacgaattgccttctctgtcgcatccggcgtggattcgagaacgatcctcgatatgaatggcgcggagaaactgttaggaaacggcgatatgctgttttacccgtccggctatccgaaaccgctccgtgttcagggcgctttcgtctcggacggcgaggtatcaaatgtaaccgagttcttaaaagaacagaacacggatgcagtatataacacggaaatcgaaaagaaactgagccagtcctccttcggaggaggagcgggcggacagaatgaacgggacgcgctctttacggacgcgggcaagttcattatcgaaaaggataaagcgtcgatcggtatgctgcagagaatgttcaagatcggctttaaccgcgctgcccggatcatggatcagcttgccgaggccggtgttgtaggtgaggaagaaggaacgaagccaaggaagatcttaatgtccatggaagagttcgaagaattcctggaagcaggatactaggaactgcggcagctgtgtggatatcagacggctgccggacgcgaattgcgcagatccactgaaaagttatgctactacaaaaggaggataccgattatgaagaccgatatcgagattgcacaggagacaaagatgctcccgatcactaccgttgcatcccagtatggaatcactgaggatgacctggaactttatggaaagtacaaggcaaagatctccaatgagctctggcaggagatcaaagacagaccggacggaaaactcgttctggtgacagcgatcaacccgactccggcaggagagggaaagacgaccaccagtatcggacttgcccaggcgatggcaaaatgcggaaagaaagcaatgcttgccctccgtgaaccgtccctcggaccgtgctttggaatcaaaggcggagctgccggcggcggatatgcccaggttgttccgatggaggacttaaaccttcattttaccggtgatttccatgcgatcacaacggcaaacaaccttctggctgcgctcctggacaaccacatccagcagggaaatgcacttgggatcgacccgagacagatcctctggaagagatgtctggatatgaatgaccgtgtgctcagaaacattgttgtcggcctcggtgcaaaggcggacggctttgtccgtgaagaccactttgtgatcacggttgcctccgagatcatggcgatcctctgtctggcgacggatatgaaggacttaaaggaacgtctcggaaagatcatcgtagcatataatttcgcgggagagccggtaacagcaaaggacctcaacgcagtcggctccatggcagcactcttaaaagacgctatcaagccgaatatggtccagactctggagcacacaggcgcccttgtacatggcggaccgttcgcgaacatcgcccacggatgcaacagcgttatggcaacaagaaccgcattaaaacttgctgacgttgcgatcacggaggcaggattcggcgcggatctcggagctgagaagttcttcgatatcaaatgccgcaaggccggcatccatccagatgcagtcgttctcgttgcgaccgtgcgcgcgttaaagtataacggaggtgttccgaaggaccagctctccgaggagaaccttgacgcgttaaagaagggaatcgtaaacctggagaaacatatcgagaatatccagaaataccatgttccggtcgtagttaccttaaactccttcctcacagacaccgaggcggaatatgagtttatccggaacttctgtgaggagagaggatgtgagttcgctctgtccgaagtatgggcaaaaggcggcgacggcggcatcgagctcgcaaagaaggtattaaatactctggagacaaagaagagcgatttcgctccgttatatccggatgagatgggaatctccgacaagatcgagacgatcgcgaaggagatctacggagccggaagcgtaagctattccccggcggcgaagaaggcaatcgcaaagatcacagagatgggattcggcgatcttccggtctgcatggcgaagacccagtattccttatctgacgaccagaagaagctgggacgtccagagggatttgatctgacggtgcgcgacgtctatgtgtgcgcgggtgccggctttgtggttgcgctcacaggtgcgatcatgacaatgccgggacttccgaaaaaaccggcggcggacaatatcgacgtggatgagaacggaaagatcacaggactgttctaaattataaaagtgaaagaaaacttgcaggcgggcgctttttgttcccgcctgtgcgggttatgggaaaggatgacgacagtggtaattggagattggttaaaacgcatgaaatatgttctggtttccggcagtctggatcagaacgtggatgaagtgatctatgattcaagaaaggcgagaccggattctgtgttcgtgtgcattcagggcagcaccagggattcccacgagtttatcccggatgtgttaaaggcgggctgcaaggtcctcgtggtagaaaaagaagtggaagtcccggcagatgtgacggtgatccgggtagaaaacggaagacttgcactggcggaactctccgcggcgagattcggctatccggcggagaagctgatcacgatcgggatcaccgggacaaagggaaagaccacgacgagctacatgatcaaggcggtcctggaagccgccggaaagaagaccgggcttatcggaacgaacggagctgtcatcggggatgagaaattcccgacctccaatacgactccggaatcctatgtggtgcaggagtatttccacaagatggtggaggccggctgcgagtgctgcgtgatggaggtttcctcccaggcactgatgctgcacagagtcggcgggatcatgtttgattacggcctgttcacaaatatttccccggaccatatcgggccgaaggagcataagagcttcgaggaatatcttttctataaatcaagacttctgactgtttgcaaaacaggtgtcgtgaaccgtctgaccgaccactatgaggagatcacccgtgatgcatcctgcagactggtgacatacgcgctgggcgggaatgcagattttacaggtgatgacattcactatgcgtcagaccatgatttcgtggggatcgaattctccgtccacggaccgctcaacggcagagtccgtgtgggaatgccgggaaaattcaatgcggacaacgctcttgcggctctcgcagtgtgctctcttgcgctctccggcggaagcggaaacctggatgaaaaaacgcagaaagcagtccttacttcccttgaaaatgtccgcgtggacggccgcatggagatcgcctatgtgtcaaaaacgtgcagcgtgatcgttgattacgcgcacaatgcggtcagcatggaaagcctgctctcgacactccgggattatcatccgaagcgtctcgtctgcgtcttcggctgcggcggaaaccgtgcgagggaccgcagatattccatgggcgagatcggcggaaagatggcggatctctgcatcatcacagccgacaacccgcgttttgagaagaatgaggacattatcaaagatatcgaagttggtcttgcaaagacagacggaaagtatatcgtgatcccggacagacgggaagcgattttttacgcaatccacaacgctgaggaaggcgacatgatcgcgatcatcggaaaaggccatgaagactaccaggagatcgagggagtaaagcaccatttccttgaccgggaagttgtggaagaggcagtaaaggagattggaaagtaatggagaacgtaagtgttcaggatatcgttcgtgccaccgggggcgtgctgctctccggaaacagcgatgtcctgttaaataagatccgtctggattccagacaggtggaggcaggagacctctttgtgccgatcatcggtgagaaggtcgatgcgcaccgttttttaccgcaggtggctgaaaacggcgctggcgctgtcctcacaagtgagcagaacgcgaagacagaggagatggaaaagacttcctgcgcatggatcgctgtggatgacacgaagaaagcgctccaggcagtgggacgttatctcagaaagcgcctgacattgtcgatcgtcggcgttacaggaagtgtcggaaagactacgacgagagagatgattgcagcggccctctctgcccgttaccatgtatacaagactccgggaaacagcaacagccaggtcggcgtcccgatcactgtgtccgagatcacaaaggcggatgaagtcggggtcctggagcttggaatgagcgagccgggcgagctcaccgtgatcgcgcagatcgcaaagccggatatcgcagtgatcacaaatatcgggatcacccacatcgagcagcttggatcgcgcgagaatatctataaagaaaagatgacgatccaggacggactttccgacggcggcgttctcgtcttaaacggcgatgacgatatgctgcagaagacaaaaggaaaggatggcgtgaagaccgtctactacggaaccggtgaaaactgtgattaccgcgcggtggatctcgtcctcacggacggagaagctgaatttacggcgctccacggcggaaagacacagaagatccgcctgaatgtcatgggcatgcacaatgtgatgaatgccatggcggccatcgcggtctgctgtgagtgcggcatgacgatggcggaggcagcggagggacttttaacgttccacggcttcaaacaccgccagcaggtctatgcggacggacgattcacggtgatggacgattcctataatgcaagcccggcatccatgaaagcggcgctcgatgtgtttaagggactcaccggaaagcgccacatcgctgtccttgcggatatgaaggagctcggagaaaattatctggcctaccacagggaggtcggtgaatacgcggcaaattccggggtggatctcgttgtgacactcggagaggcgagcaagtgtctcgcggaaggcgtccgtgcggtgaaggagatcccggtcgtggagtttttagaccgcgacgagatggtgaagtatctggagcaggaagtaaaagacggagactgcatcctctttaaaggatccaactccatgggactttccgctgtcgcggacaaatttgcggaactggcagagaagtaacataaaaactgctataaagcttctcaaagaaaggagggacctggattggaacagtacgcggacattatcattgatctttctgtaaaaaatgtggaccggatcttccagtaccggatcccggcccatctgagagaagctgtaaaaccgggggtacaggtaaatgtcccgttcggaaagggtgacacggtgcggaagggcatcgtcgtcgggctctcgacggagacggactacgacccggaaaagatgaaagagctcatgtcggtggaggaaggtgcggtcccgatccgtacccagatgatctgtctggcgttctggatgaaggaccgctatgcaaccacgatgaaccaggcgttaaagacggtcctccccgtgaaggtgaaagtgacgcccagggaggagcgggtgatcgtctccttaaaaccccgggaggagatcgagacgctgctcatagaagcggaaaagaagaaattccgggcaagagtccggctttaccgggcgctcctggaaaacgatgaactgccgttaaagctcacatcggagaaactcggcgtcacatccgctacattaaaaccgctggtggaaaaagagatcgtcgaattaaaagcggcgccgaaggaaccgggacacctgggaagcttttcatccgcgcggaatatttccctgaatgaggaacagagacgggcggcagagactgtgatccgggactatgattccggactgagaaatacctatctgctctacgggatcacgggaagcggaaagacggaagtctatatggaactcatcgatcatgtcctgcgggagggcagacaggcgatcgttctgatcccggagatctccctgacttaccagaccgtgatgcgcttttaccggagattcggaaaccgggtcgggatcatgaattccaggctttcggccggtgagcgctatgaacagtcggaacgggcggcaaacggggagatcgacatcatgatcggtcctcgttccgctctttttacaccgttcccggatctcggcctcatcatcatcgatgaggaacatgaaggcgcatataagagtgagacggcgccgaggtacgatgcgagagaggtggcgcgcgtccgggcagatatgagcggggcggtccttgttctcggatctgcgactccgtccgtggagagctactaccgggcggaacagggggagtaccggcttctgacactcacaaagagagcgaaggagaacagccgcctggcgggagtccacatcgtggatctcagggaagaactcgcagagggaaaccgctcgatcttcagccggaagttaaagaaactgatcgaagaccggctggagaaaaaacagcaggtgatgctgttcatgaaccggcggggatatgcgggctttgtctcctgccgttcctgcggaaaagcgatgaaatgcccgcactgtgacgtgagtcttacctaccacagaaacggccggttaaagtgtcactactgcggatttgagcgcccgctcccggatcgatgcccgtcctgcggatccccgtttatcgcgccgttcgggaccgggactcagaagctggaagagttcacaaagcgggagttcccgactgcccgcgtgcttcggatggacgcggacacgactgcaaaaaaaggggctcatgaggagatcctcgccaccttcgcggaggggggcgcggacatcctgatcgggacccagatgatcgtaaagggacacgatttcgaaaatgtgacgcttgtgggtgtcatggcggcggacctctccctctatgcgcctgattttaagagcgcggagcggacctttgaactcctgacccaggcgtctggccgtgcgggccgcggggatctttcgggggatgtggtgatccagacctacgcgcctgaccactatgcggtctcctcggcagccgaacaggattatctgcagttctaccggcaggaacttctctaccggaagatgatgggatatccgccgctcgtgggactcctgacgatcggtctttcttcaaagagggaggcagatgttgtccgggcgtcggaggacttaaaacgcgttatcctgcgggaatacgctctggacgggctgaaagtcatcggccctgtggaggattccccgtataaacttaatgataattacagaaaaattttatatatgaaacatgaaagttatgatatactattaaaaatcagaaattctgcccggaaacgggagaccatcccggatctcttccggaatgtgtttgtgcagtacgatctgacgtgacatcatgtttcggcaaaaacaatgcgggagcctttctggccccggtatcataaatatgagaggaaataagataaaatggcaatcagacagatcagaaccatcggagatgagatccttacaaaaccgtgcaaaccggtaaaagaaatgaatgagagaacgatcgaactcattgaggatatgtttgagacaatgtacgagagcaacggctgcggtcttgcggctccgcaggtaggtgttcgcaagcgcatcgtggtcatcgatgtggatgacggaaaccagtatgtactgatcaacccggagatccttgagacgagcggcagccagacaggacaggaaggttgcttaagcgttccgggaaaatgcggacaggtgacccgcgcggagcatgtaaaggcaaaagcgctcaatgaaaatatggaggaatacgagatcgaggcggacggacttcttgccagatgcattctccatgagtgcgaccacctggacggaaaactttatgtggaccttgtagagggcgaacttcaggacacagtcggagaggaagaggaataatatgcgtatcgtatttatgggaacgccggacttcgcagttccgacgctgaccgctcttgtggagggcggacatgaagtgatcgctgcggtgacgcagccggataaaccgaaaggacgcggaaaatccgtccttatgacgcctgtaaaggaaaaagcgatcgagtatcagatcccggtataccagccggtgaaagtgcgggatccggaatttgtggatctcttaaaagtgatggcaccggacgcgatcgtcgttgttgccttcggacagatcctgccgaaagtgatcctggatctgccgaaatacggctgtgtgaatgttcatgcgtccctgctcccgaaataccgcggagctgccccgatccagtgggcagtcatcgacggcgagaaggagagcggtgtgaccacgatgatgatggatgtggggctcgacaccggagatatgctcgagcagaaagcgatcccgctcgatgaaaaagagacgggcggaagcctgtttgacaagctctctgcccttggcggatcaatgattttatcgacgttaaaaggactcgaggacggaacgatcacgagaactccccagggagaatcggagacttcctatgcgaagatgctcacgaaagagatgggacatatcgactggacaaaggatgcggcgtccatcgaacgccttgtccgcggcttgaatccgtggccgagtgcctatacttcctacgcaggaaaaaccatgaagatctgggcagcggatgtggctgaccttccgggcgagagaactccgggaaagatccatgtgacaaaaaatcagctctttgtggagaccggtgacggcgtcctcgatgtaaaagagcttcagcttgagggaaagaagcggatggatacggcttccttcctgcgcggcttccagatggaagacggaagtttctgcgaataaggcctgtggcaggatcacactgcagcgctcaggcagaaaagtgactgtgaagtcaacatgggaacggcagaaacgacatcgaaaggagagatgtttatgtacggaatgtatggttacggttatggatacgggtttgacccgacgatcatccttgtactgatcggagttgccctctcactctgggcgcagggacgtgtgaattccacgttctccagatactcgagagtccgcagcatgaccgggatgacgggtgctgaggcggcgagacgccttctgaatgcccagggaatctatgatgtgacggtccagccgatcgcaggagagctgacggaccactatgatccgcggacgaagaccgtaaatctgtcccagtccgtatacggggcaacttccgtcgcagcgatcggtgtcgctgcccacgagtgcggacacgcgatgcaggacaatgaaggatacgctccgctgcgcttccggagcgctctggtcccggcggcaaacttcggctctaaactttcctggccgctgatccttttaggacttgtgttcggcggacttggctccccgctcgttgagatcgggatcctgatgttctcccttgcggtgctgttccagctcgtgacgcttccggtggagtacaatgcgtccgccagagcagtgagactcctggattcccaggggatccttgcgggcgaggaagtaagcggaacgagaaaagttctgaatgcggcagccctcacttacgtggcagcggcggcgacctcgatcctgcagcttcttcgtctcattattctctttggaggaagaaacagacgtgacaactaatacgacaaatatccgggaggtcgtccttgacgtcctcctggaagtccttgaaaaccacaatttaagccacctcgtcttaaaacaggcgctggaaaagtacctgtttctggaacgccaggaccgcgcatttatcacaagatgcgtggagggaacgctggaatatagactccagatcgatgcggtgatcgaccgcttctcaaaggtaaagactgcgaagatgaaaccggtgatccgcgagatcctccggatgtcggtctaccagatcctctatatggaacgtgtcccggattccgctgtctgcaatgaggcggtaaagcttgcaaaaaagagaaaattccagggactttccggctttgtaaacggtgtgctgaggaccgtctcaagagaaaaagaaaatctgtcctggaaggatgcatccatccggtattcgatcccgcagtggatgctgtccatgtgggaggagatgtttggaaaagagaccgcggagacgatcgcggcatcgttcctggaggaacgtccgctcacggtgcggtttaacgagagtattgcccctgcggcggagaccgtcgaagaactgagagcccagaatatcacggtggatctgtcagatgcattccctgggatcgcttcgatccgcggatttgactacttagaccgagtcgccgcgttcgcggcgggaaagatcacggtccaggatccgagctcctctctggcagcccggatggcatccatcaagccgggagactttgtccttgacgtgtgcagcgcccccggaggaaaggccatgcacgcggcagatctcctgagggggaccggaatggtggaagcgcgggatgtgagcgagagaaagacggacctcatcgaggaaaatatcatgcgctgcggatttcccaatatccggacaatggtctgggatgcgacgttcctggatccgtccatgatcggacaggcagatgttgtcctcgcggatcttccgtgctccgggctcgggatcatcggcaaaaagccggatatcaaggagcggatgacgaaagatgagatcgtgaaactggctggacttcagagggagatcctctctgtggtgtcccagtatgtgaaaccgggcggaacgcttgtttacagcacctgcacgatcacaaaagaagagaatgcagagaacgcggactggatcgaaaaaaatctgccgtttgagaaaaaagagatccgtgaccttctgccggaggcgttaaaagcttcctgtgaggagaacaggatccagcttttaccgggagtccatccgtgcgacggattctttatctcggtattcagaagaaaataactgtgcagatataccggacagttacagaaaaaataacagaactgctgttttggagagtggagaatggaaaagaaagacctgaaatcaatgacgttggaggagctgacagagtttgtgaaggaactcggcgaaaagccgttccgtgcgaaacagctgtaccagtggatgcatgaaaaactggccgcatccctggacgagtgcacaaacctgccgaaagcgtttagggaaaaactcgcggagaacagtacatatacgtctttacggaccgtaaaaatgctggaatccgggatcgacgggacgagaaaatatctgtttggtctcgatgacgggaacgtgatcgagagcgtcctgatgaaataccatcacggaaattccgtatgcatctcatcccaggtcggctgccgcatgggctgccggttctgtgcgtcgactctggacggacttacgagaaacttacgtccttcagagatgctggatcagatctaccggatccagagatccacgggagagcgcgtttccaatgtggtggtcatgggaagcggagagccgatggacaattatgacaacctggtccgcttcatccggctcctctccgacgaaaacggcctgaacatcagccagagaaacatcacggtctccacctgcgggatcgttccgaagatcttaaagctcgcggatgaaggtctttcgatcaccctggcactttctcttcatgcgccggacgatgagacgagaaagaccctgatgccgatcgccaacagctactccctgtcggaggtgcttccggcatgtaaggaatattataaaaagacaggaagacgcctgacctttgagtacagcctggtccagggagtcaacgacaacctcgatgaggcaaagcgcctgacagcgctcttaaaggatatgcagggtcatgtgaacctgatcccggtcaacccgatcaaggagcgtgactttaaacagtccaaccgggacgcgatcgacgcgttcaaaggctaccttgaaaaacacgggatcaacgttacgatccgccgggagatgggccgcgacatcggcggcgcctgtgggcagcttagaaagagttacctgagtgaggagggactgtcatgatctcttacgcgaagacagataccggaatcgtgagaagatccaatcaggatttcctgtttgcatcggatcagccggtgggaccgctcccgaacctgttcatcgttgcagacggaatgggcggacataaagcaggggatttcgcatcccggtatgtcgtggaacatatgaaagaaaatatcgaaaattctgacgctgtgagtccggtgatggtcctgagaaaagcgcttgaaaagacgaatctcggcctttatgaggagtccatggaagatccggagcgggaaggaatgggatccaccctggtggcggccaccatcgaggacgatatgatgtatgtggcaaacgtgggggacagcagactttaccttctgcgggacagcctggcccagatcacgcgggatcactcccttgtggaggagatggtcgcgagagggaagatggagcgagacagtgaatcctaccggaaccagaagaatatcatcacgcgtgctgtagggatcggaaagcgtgtggaggcggacttcttcgaggtgccgcttctcgaaagcgactgcgttctgctctgctccgacggactgacaaacatggtggatgacgcagagatcagccgcgtcttaaagacgacggacacactgaaagagaagacggacgccctgatcgatgaggcaaaccggaacggaggaaaggacaacattgcgatcgtccttgtagaacctcagataagtgaggtgaatgtatgattctatatcctggaacgatgctccaggatcggtatgagatcctggaaaagatcggatctggcggaatgtcagatgtgtataaggcaaaatgccataagctgaaccgccttgtcgcgatcaaggttctgaaatcggagtttacttccgacgccacttttgtcagcaaatttaagatggaagcccaggcggcagccggactttcccacccgaatattgtcaatatctacgacgttgtggatgaaggagacatccacttcatcgttatggaactcgtagagggaattactttaaagagctatatcacgaaaaaaggtcatcttgaagtgaaagaagcgatcgggatcgcgatccaggttgcctccgggatcgaggctgcccacgagcagcatatcatccaccgggacatcaaaccgcagaatatgctgatttccatggacggcaaggtgaaggtcgcggatttcgggatcgcgagagccgtctcctcccagaccatgaatgcggcgacggtagtgggatccgtccactacatttccccggagcaggcgcggggcggatacagcgatgagcggagtgatctgtattctctcggtatcacgatgttcgagatggtcaccggtcatgtcccgtttgagggagacaacaccgtgacagttgcgctggcacatctggaagatccgatgccggatccgagaacactgaatccggaggtttccccgagtcttgcccgcatcatcttaaaatgtacggaaaagagaccggaacgccgctatccgagcgcggcagccgtgatcagcgacctgagaagagcgctcttaaacgacgatgatccgaatgtcggtgtgatcgaggaggaagaccacagctccgatacgatcgtgatcagcccgaatgagctgaatatgatcaagaccaggagtggagagcggatccgggagtcaaagccggtgaaggagatccgtgagcgcagggaacggcgtgatctggaaaaacgttatgagcagccggaggacgcaaagaaagaccagaaaaagagcaaagagaacgacgaagcgaccgggctggaaaagatcctgaccggcctgggtgttgcggcagccgtgatcatcgtggcggtcgtgatcgtatttatcctgaaactcggcggcctcttcaggagcagcacgccggaagatccgacggagcaggtctcccaggaggcgaccacggaggaggcaaagagcacagcggtatcggagacaacgatcagccagaaagaggtctacatgccgaatcttgtgggacattcacaggatgaagctgagaagattctgcagggactcgacctttccatgcaggtggagcaggaaaattccgacgatgtggaaaaaggcatggtcatttcccagaaagagaaaccggataccgtgctcccgcgcttttccaaggtgaccgtcgtcatcagcgccggatctgacaaggtggatctcgcggaactcggactttccggaatgactcttgagacggcagtgcgcctcttagagggaaagaacctgaaagcagatgtgcaggaagaatccagcgaggatgtcccgtccggaaccatcatccgctatgagccggaagataaagtggcactcggaagtaccgtgactctgtatgtgagcacggggccggaggaagaatttgtctctgttccgaatctctacggaaagacagacgcggaggcatccgtacttctttctgcggcaggacttgtggcgggcgagatctcaaaagagtatgacagtacgatctcggccggccatgtcatcagccagggcgttgaggcaggaacccaggtcgcacccggagagaccgtggattataccgtgagtctcggaccggaagcgccgaaaaaacagtttatcgcctccctggatgcaagttatcctcttcaggtctcctacggaccgggggcagcgtcctccgagatccagatcctgatccgtttaaaacagacggtaaacggaaaagtgacctacacgaaacttgcagagccgaagtcctacagcgcggacacgaccttaaatatcaagcttgacaagatccgcggcgcagacggcgtgcagaccggtgaagtggagatcgtggatctcacgaacaatgtcgttctgacctcgtacaacgtaacctttacggaagttgacagctgataaaaggcggcagagagcggatacgaaacctgactgcggagcatacgggcagtcaggatgagatatgggagagtgtatgactggaaaaatcattaaggggatcgccggattttactatgtccatgacggcgtttccaaagtatatgaatgcaaggcaaagggcgtattccggaacaggaagatcaaacctcttgtgggtgacaatgtggaattcgatgtgctctcagaggaggaatgcctcggaaacatcgtggagatcctcccgagagagaattccctgatccgcccggccgtcgcgaacattgaccaggcgatgatcgtgttcgcggtcgctgatccggaaccgaacttaaaccttctggaccggttccttgtcacgatggaagcccaggatgtgccggtggtgatctgttttaacaagacggacctcggaaaagagggagaggctgaccggctcgctgaaatctaccggaacgcaggatatgaagttcacttatcctgcgctcttgagggagatgggatcgaggcgatccacgatcttctccggggaaagacgacagctcttgccggcccatccggtgtcgggaaatcgtccctgacgaaccgcatccagccggaggcggagatggagacgggtgctgtcagcgagaagatcaggagaggacgccacacaacgagacattccgagctgtttttcgtcgagaaggaaaccttcgtgatggatacgcccggatttagctcgatctttgttgacgatatgaagccggaggaattaaaagactatttcccggagtttgaagcctatgagccggaatgccggttccttggctgcgtccatgtaggagagcgggaatgcggtgtcaaggatgccgtaaaagcaggaaagatcgcaggatcccggtatgacaattaccggttgatctatgatgaacttaagaataaaaggagatattaagatcatgtatattttagcgccatcgattctttcagcagatttttcaaaacttggagaggatgtaaagactgtttccgatgccggagcgcagtacatccatctcgacgtgatggacggagcgtttgttccgagcatttccttcggtatgccggtgatctcttccctcagaaagacgacagaccgtgtgtttgatgtccacatgatggtggaggagccgggaagatatgtaaatgatgtgagaaaggccggcgcggacctcatctgtgtccaccaggaagcctgtcttcaccttgaccgtacgatcaaccagatcaaggagaccggcgcgaaagcggctgtcgcattaaacccggcgacacctgtggagactctctcctgcatcttaaaagaggtcgatatgttcctcatcatgtccgtcaatccgggattcggcggacagaaatttatcccgtacaccttagagaagatcaaaaagctccgcaccatgttaaatgaggccggtcttaccacggatatcgaagtggacggcggcgtcaatgcggcaaatgtgagagatgttctcgacgccggtgcaaatgtcatcgttgccggttccgcggtatttaagaatgatgcggcagcgaatacgcgggaatttttaaagatctttgacgagtattctgcaaaatagaaccggcaaagtctgcggtcactgtggtatcatacggaattcccgcttcaagaattcccggatacgaagagtaacgaaatcatttcatcagccatgcgtttcctgtatgccatgaagatcatggaacaggaaacgtcatggctggatttttatctcagtcagataagatcccacctgatcggatcaaaaggagtgtgacaacgaaaatgagttcagatatgaaagaagctgcggacacttgcctgatcgtgtccggcgggccgacagaccgggagtttgcggcaaaatttgtaaaggagaggaagtacccgtatgtgatcgcggtggacgccggactggctgtctgtgaggacctgggacttgtcccggatctcgcggtgggggattttgacacctttggtctggagcggatggaggagctaaggaagaaggaaggctgggcaacggatgtccacaagccggaaaaggatgagacggacacagacctcgcagtccgctccgctctccgcgccggtttctgcacagcccatgtgctcggcgctacgggcggaagactggaccacgagctctccaacattcacctgatgagggctgcgaaagacgccggactttttatggagatctatgatgcaaagaaccggatctttctcctgacgccggacgatgaagaacattccgtctttcgaaagacagacctctacggaaaatacgtctcctttctgccgctcacggagaaagttttcgggatcacgctggatggatttaagtatccgctccataataaggatatctcgatcctggaaaacccgagtctctgcgtcagcaacgaggtccccggggagtctgcaaagatctcattccgtgaggggatcctgatctgtgtggaatccggagactaagatgcgggatcaggaaaacgatgcagaatgaaaaagatgaaagactgagcgcaggacacaggcagaaggcgggaccggaagagtggaataagaatctactggactgcataaaaaaaccaaaactggacattttgcacaatccacatgcgtgttactatggatgacaagacagaagagacagctcctgcatgacctgtcggaatggctccggaagctcatattcacgaagagcgattcctgatgccggacggcatacatctgaagagaactgccggatggactgtcagtaacacacgaggggagacttaattatgaaagaaaagaatgaccagctaatgaaaatcgcgcaggcgggcctgatggcggcgctctgctatatcggatatgcggtgttcccggcgatctcagccagcggaagcaagatccacatcggaaatgcgttcgtcgtcctttccgcgtacctcctcggaggtgtctacggaggcctttccggagcggtcggtttatcgatcgctgatattgtcggcggctacgcggcatctgcaccgagaacctttatcacaaagcttgtgatcggcctgatcgtcggcttcgtagctcataagatcgcgaagctttccgatgagcatgaccatgcgtatgtgatccgctggtccgcgatcgctgcagtctgcggtctcggcttcaactgcttcttcgagccggcgttaaagtatgtatggtacaccttattattcccgaatgctgacaaagccgcatccgcgatcaaggcgctccttgcgatcacaacgtacacgacgatcatcaatgcagtgatcaattccgtgattgccgtgatcctctacgcagcgctccgcccggctttaagaaaagcgggtttgatttctgcagagagagtgtaaaagatcaggattcagggaaaataactgaaagatatgaatcaaagtattttccgcagaatttctatttgtctatgtgctgacgcccgtgtgaacaggaatcccgggaacggcagtgtataaacgaaggggattgcggaaacacagaaagactggaagaaaaattatgcagaaaaaaattgctgtgatcaatgatctttccgggtatggccgctgttcattaacagtggctattcctgttttatcggtcatgggccatcagtgctgtccggtaccgacagcgatcctctcgaaccacacggaatttccggtgtatttcttcgatgattacacggaaaaaatgacagcctacactgacaagtggaaggaactcggtctctccttcgatgcggtggcgacaggatttctcggctcggaggcgcagatcgagatcgtcatggacatgatccggaaactggagtcggaggagacgtttgtcgtcgtcgatcctgtcatgggagaccatggacatgcctatgagacctacacgccggagatgtgcgagcagatgaaggaactcgtctgcatggcggatatcgtcctcccgaacgtgacggagtgctgcatcctcacggataccccctacaaaaaggaaaactggacgcggcgggagcttttaaatatggcgatgatgcttcggctcatgggtgcgaaatccgtggtcatcacgggagtccgcgaaggcagctattacacgaacgtggtcctggaacgcgggcagatggaagcaaaatttatcaggacaagatcttccggcggcgagcgcccgggaaccggagatgttttctcctccgttgtggcgggggcgctcctaaatggaaagtcccttcccgaggcagtcgctcaggcagcaggtttcgtgaaagagtgcatcaaagtctccgatgaggagcagatcccgcacgcgaacggcgtctgctttgagaagattctggggaaactgataaaaaagtaagagaaatccccttccttttctcgaagaaatatgatatatttttaccaaagcgtgttttacgcaggaaagccgtcagatatcggagaacgtgtaccaggaaaactccggatccacggacggcaccggatctgataaagccggaagagagaaaatttacgcggcgtttccgcaaatcggccggaaatgagcaggcctgatcctgaaatgttggaattgctgcaaaaataaggagaaaagcgatgttagatttaagatttgtaagagaaaatccggaagtcgtaaagcagaacatccggaataaattccaggatgcgaaacttccgttagtagacgaagtgatcgagctggacgaggagaacagaaaagtaaagaaagaggctgatgatctccgcgcaaacagaaacaagatctccaaacagatcggtgcgttaatgggacagggaaagagagaagaagcagaagaggtaaagaaacaggttaccgcagcttccgatcaccttgctgaacttgaggagaaagaaaaagacctcgaggagcgcatcaaaaagatcatgatgacgatcccgaacatcatcgatccgtccgttccgatcggtaaagatgacagcgagaacgtggaagtacagaaattcggtgatccggtcgttccggatttcgagatcccgtaccacacagagatcatggagagattcaacggaatcgaccttgactctgcaagaagagttgccggaaacggtttctactacttaatgggcgatatcgcaagacttcactctgcagtgatcgcatatgcaagagatttcatgatcgaccgtggattcacatactgtgtaccgccgttcatgatccgcagcgacgttgttaccggcgttatgagcttcgcagagatggacgctatgatgtacaagatcgagggcgaggacctctacctcatcggtacaagtgagcactccatgatcggtaaattcatcgaccagatcatcccggaggaggaacttccgaagaccttaacaagctattctccgtgcttccgtaaagagaaaggcgcacacggcatcgaggagcgcggtgtatatcgtatccaccagttcgagaaacaggagatgatcgttgtctgcaagccagaagaatccaagatgtggttcgacaagttatggcagaacaccgtagacctgttccgttccatggacatcccggttcgtaccttagagtgctgctccggtgacctcgctgacctgaaggtaaaatctgtcgatgttgaggcatggtccccgagacagaagaagtacttcgaggtaggaagctgctccaaccttggcgacgctcaggcaagacgtttaagaatccgtgtaaacggagcggacggaaagaaatatttcgcccacaccttaaacaacacggttgtagctccgccgagaatgctgatcgctttcctggagaacaacttacaggcagatggttccgtaagaattccggaagttttaagaccgtatatgggcggcaagtccgaaatcaaataaataaggaatttcataaagctgtggcgagtcattttgtcacagcttttttccgttttgtaactgttcagtaccctcacgattgcgggcagacatccattccaaaccggcttcgccgatgggatttttgccttcaaacctatgttatattacggtcagcgcagcaagtgcgcagatctacggaacagttactctgttttttatattacaaaggagatgagtttcatgccggcagcatttgcacatgatctttacgggagaaaagtatatatggaggcagatccggtcatcaagcggatcataaagaaagagcggtactgctttcttcttggcgcgcatggaccggatgtcctgtttttttacaaagcgctcggaaagaacaaggtgaaccagaaaggcgtgagaacgcacggggaaccggctgcaaagctttttgagcggggaaagatgctggtccatgaagcggagacgcgggacgagcgggatgagatgatcgcatacctcatgggcgttgcctgccatttctgtttggataaccgggtccatgcctatgtgaacgcggaggagaaacggaccgggatcacccacgcggagatcgagacggagctggagagacggcttctggagcgcgaacacatgcggccgctccactcaaacctcacctgccatttaaagattactgcccagactgtccgcgcgtcctcaagacttttcgatgaggacccgatcaaggtcgcaaaggccattatgagctttaggaccatgaaccggctgttcatcaactccagcgaatggacgaagcggttctgctgcttcctgcttcgctttacgggctgctacggggtgatccacggcatgttcatgagaaaacagccgacaccgggatgtgagtcgatcacagaccatctggagagcgaattccatgaggcagtcccggtcggggcggagcttctcagcgacctgtttacatacctgagaggaaagggaccgatgccggaactgttttacggaaactttaacggggagacaccggcgtaatttttgcagacacaatgcggaaagaaacaaaaacttggagaataaaggagaaccatcatgcggggaaagatctatggaatcggagtgggaccgggtgacccggagcttatgacattgaaggcggtccgcctgatccgagaagcagatgtgatcgcgatcccgggaaaagaccgggagtcctgcaccgcatatcagatcgccagcggggcagttccggagatcaaagataaggagatcatccctgtggtgtttccgatgacaaaaaatgagactgtgttaagggagagccatgaggcggcggttcagagccttacggcgcttatggaccagggaaagaccatcgcgtttctgacgctgggggacgtgacgatctattcgacctacggctatgtccatcagaaacttttgagtctcggatatgagtcgattctggtaaacggggtcccgtccttctgcgcggcggcggcaaaactcgggatctcactcggggaaaaggcggaggcgatccacattctgccgggatcctatccggtcgcagacggactggagctcccgggaacaaagatcttaatgaagtcaggaaaaaagatcggggacgtgaagcgggaactcatggaaagagagcttccggcctggatggtggaaaactgcggaatggacggcgaacggctttttgagagcgcttcggagattgcggaggacgcgggatattattcccttattatcgcgaaggacagggaggaacagtagcgcatggagacaaaaaaatggcggacgatccggatcggaacgcggaagagcagactggcgctcgttcagacaaagatggttgcggaggcgatccgggcagtatgtccggaggtcgtgtgcgagctggtgccgctgatgacaaaaggcgataagatcttaaagacatccctcgtggcgttcggcggaaaaggcgcgtttgtcgaggagtttgagcagggactgttaaccggggagatcgaccttgcggtccacagcgcgaaggacatgccgatggatctgagcgacgggctctgcattggggcagttttaaaacgggaagatccgagagacgtctttgtaacggtaaaaggccggacttcggagcggatgccgcggatcatcggaacgggaagcccgagacgccaggttcagatcatggagcacggggacgtggagtgcagacttcttcgcggaaatgtcgatacacggctggaaaaactatatgcgggagagtatgacgggatcattcttgctgctgctggtctttcccgactcggacttctggatgatccgagattttcatttgaattcctggaaccggaaacctttatcccggcgggcggccaggggatcatcgctgttgaggcaaaaaaaggcagcgaggttttaaagatcctggaaaaactgaatgacagagagtcggagcgcgccctgtttgcggagcggaaggtcctgcgccttcttggggcaggctgtaccgcggcagttggtgtgtacgcgaaggaagagaatggaagcttccggatggatctgatgagggaaacaaagaacggagtgacccgcactcaggtttcaggagcagcggaggattccatgagactcgcggagcttcttgtcagacagggaaccgatggggatgtgccggcaggaaaggcatttctcgtcggcgcaggtccgggaaatggcggtctgatcactgtaaaggggcagcagatcttaaaagcggcggaagttctcgtatatgaccggcttggctccgaggaattattgtctttagtgccggaatcctgcgagcggatctatgtcgggaaagaggcgggtcaccacatcaaaaaacagtcggagatcaaccggatccttgtggagaaagcactggaggggaaacgtgtagtccgcttaaaaggtggagatcccttcgtctttgggcgaggcggcgaggagatccaggcactcacggaggcaggaatctcctatgaggtcatcccgggcgtcacatccgcgatcggagcactggaagcggccgggatcccggtcacacaccggaatatcgcaagagatttccatgtctttacaggacatatctcccatgaggacggcgaaggactctacggggattacagcctgtatgcgaaactcccgggaaccctgatctttctgatgggattgtccaaccttgaggagatcgtgaaacgtctcatggacggcggaaaagacggggagacgcccgctgccgttgtgacggacggaacactgtcccgaatgcgcgttgtccgggcatccttaaaggatctgcctgaggctgtaagaaaagcgggacttacgcctcccggaatcatcgctgtgggtgaggtctgtgccttccactttacatctatggtgccgggcgtgcttaccggaatcacggtgggagtcaccggaacagaggccgttagaggacggatcataagccgcctgtccgatgagggtgcgaagacggtccgcgcgggggaatcccttgtggtacgggagtccatggaacggctggatcaggcgtttgcggacctttcccgttacagatgggtgatttttacgagccggaatgcagtccggatcttctttgaccggatgcgggagaaacatgtagatatcagaaaacttggcggattaaaatttgcggttgtcgggcgcggaacaggggagtatctggagagcgtcggaatcacgccggactttatcccggaggaatatacaacgaaggcgctggcagatggacttgtcaaatacctgaaggagaatggagagacttctggggcaaaaactgctgccgccaatgtagcctacagcatttccagttcagaaaatgtctgtccgtgtgctgaggcaggaaaatttctgatcccgcgggcaaagcagggctcgaaggtcctcacggagacactggcggaacagggatatgcgtttgatgatattccaatctatgatatcctggtggagcagacggagcttgcgagacttaaaactgccgactatatcacgtttgagagcggctccggcgtccgaggattcttcgcgggacgtgaggcggaagcggcatctctgtttgagacggtgagaccagtctgcatcggaaaggtgacagcggcagtccttgcggaatacggagtgaagaatgccctgacagcgtccgactatacagcggacggaattttagaggtgctgctggcggacagaaacgagatcgcgaggtaaacatggatacctttgtatacaaagaccataaaaagttaagatgcggatacaccacaggaacctgcgcggctctggcggctcagggggcggtgcgatttctgctcacaggatcctgggaggagacggaggagatcatgaccccgaaggggattccggtgtgcgtatcgctggaagagaaaacttccggggatagttgggcggagtgcgcggtcaggaaggacgcaggggacgattatgatgtgacgaacgggatcctggtgtatgcgcgggcggagtttgtgaaagataaaaacttttatgaaaaggttcagatgtcacatctggaaagttccgggttcggagctgcaggagaaaaacctggtctgagtccagaaaaccagaaacagcagaaaaaagcgaatgccgctcatcagaaagatgcacttcctgagtcgcttgtcagaatcgacggcggcatcggcatcggtcgcatcacaaaatccggtctggatcagccagtaggcgctgcagcgatcaattctgtgccgcgtaagatgatccaggacgctgtctacgagcttttggaggaagccggagagcttcgcctggtatcgatcacaatatcggttcctgcaggcgtagaagccgcgaagaagaccttcaacccggtcctgggaatcgagggcgggatctccgttctcgggaccagcgggattgtggagcccatgagtgaggaagcgcttgtcgagacgatccgtacccatctaaatgtcttaaaggcagagggcagaaaatgggtgatcgcagtgcctggaaatatgggcgcgggatttttagagaggtatctcgtagaacatggtaaattctgtaccgatgctcatcaagggagtaacgcggcggacacggatgctgctgttgaggcagaacagatggcttatggagaattatcaacgggaacagaaccatcacttctggaaggatttatgaattccctcgtcaccatgagcaacttcgtcggcaagaccattgaccttgccgcggaactgggcttttccggtatcctgattgccggtcacatgggaaaactcgtgaagattggaaacgggatcatgaacacccactccagggaggcggatggtcgcatggacacgatgctttcctgcgcgttatctgccggaaccgaggacctggaactccttagaaagatccagagatccaacacgacggatgaggcgatggatcacttaaaacaggcgggaatcatagaggacacgataaacgtattcttaaagcgtgccgactggcaccttacccatcgatccagggacgaggtgaggacgggaatgatcgtcttcgggacaaagggggagtatctgggagagacggaaggcgcggacgcgatcctgcggtcagcgttgaaagagctggatcaataagcttccacttagcgctgaaagaactgaaacaataagttttggaacaacgcatgaaagttacggtctctgatcattcatcgaaattaaaggaaacactatggaaaacaggcagaaaaattacgggagcgtccatgacacaaaggcatccatgatgtataaccgcttcctgaaacaatacaacgagtggctttccggcggaccgatcccggataccggaaatcaggatacaaagtattttctgagccagcagcggaagcggttggaaaaacgcggacttcacagagattcatccatagaactccggggtcttctggcctcagccggcgcgatcccaccgaaggtcggaaagaaatatacgaatgtgacagaattccgcacggcgcagagaaatacgacatattccaggggtggacggatcatcggaaaattccggaagaaagagatcttataccagacgatcaccttcgcgaatgaggcgacggtagacggaacggagccatgtacctgcccgtcctgcggagcggtgagccagatcaaggcgctgtttgaaggctgcccatactgccacacaagatttctgatgcaggatctgtatccgaaggtcgcgaatttttattccattgaagacctcagctattccaaggaagagatcaagagaacattaactccctggtgcggcggaggggcagtcatcttcacggtgttcatgctggcatacctggcatgggagagggcaaagaccggtgatcctctgacactatattccatgatctgcccgctgatcgggtatccagtaatcggagccttcggcggatatatgctgtttgccttaaaaacacttgggtatattttctggcgggcgatgcagagccttggacttctgtttgccacttctggcagcaaaaacaggctgatccggttcatgaagaattacgagccggattttggctatgaaaactttgcaaaccaggtcattgctctggcaaaaaatattatcttttccgagccgggagaggacctttctattatccgcggtccctgggatggggaaagtttccagaacatcacggacattgtatacaggggagctatgtcggtggggaactgctggcaggaaggcccgtatgtgtatgcggatatcgatctgtacttctgcgatacatatgacaggggaagttcgatgaaggagaaaaacgacaggatccggatgatcgtcggaaagaatatccagatcccgcaggacccgggatactcgatccatcaggtctcctgtgaaagctgcggggcaagctttgacgcgatgaagatccgtcattgcccgtactgcaagcgggagtatgacatgagagaccatgcatggacggtcatgaagattcgaaaaacaggaggaaaaccatcatgatacattttgttggagccggaagcggagcgccggacttgatcacggtccggggacagaaattccttcgggaggcggacgtggtgatctatgcgggatcccttgtgaatccggagcttttaaaggagacgaagccggggtgtgagatcttaaacagtgcctacatgactcttgacgaggtgatccgtgccatggagaaagcggagcgtgagggaaaaatgacggtgcggcttcataccggtgatccagcgatctacggagcgatccgggagcagatggaccggctggatgagaaaaagattgcttacgatgtatgcccgggggtcagctccttctgcggcgctgcatcgagtctccatgcggaactcacgctgcctggcgtgtcccagtccgtgatcatcacgagaatggcggggcggaccggagtcccggagcgggagagtttccgttccctggcggctcaccatgcgaccatggcggtgttcttaagcacgggactgttgtcacagatggaaaaggaacttgcggaagcaggatatgagtcggacactccggcggtgatcatctacaaggcgacatggccggaggagaagatcgtccgctgcaccgtctctacgctggcgaagtccgcagaggagaacggaattaagaagacggcaatgatctttatcggtgatgtattcggcacgagagaggcaaacggctacgaggagtcaagactctatgcgccggacttctccacggaattcagaaaggggacggacatatgaagaagctgacagtggtcggcatgggacctggagaatatgaatccatgacgctccgtgccgtaaaggcgcttaacacctgcgatgtgatcgtgggatacacggtctatgtggatctcgcgaagccgtactttccagataaggaatttctgacgacccccatgaaacgggagatcgagcgctgcgagatggcttttgcggaggcggaaaaaggaagatctgtcgtgatgatctgcagcggggacgcaggaatctacggaatggcgggaccgatcctggaactcggggagaagcacccggaggtggagatcgaggtgatcccggggatcacggcggctctctccggcggcgctgtcctcggggcaccgctgatgcatgattttgcggtgatcagtttaagtgatcttttaacaccctgggagaccatcgagaaccgcctggacgcggcggcgaagactgatttttccatctgtctttataatccgtccagcaggaagcgggcggactatttgaagcgtgcctgtgagatctttttacggtacaagagcgcggataccgtctgcggcattgtaaagaacatcggaagagacggggagacgaagaaggtcatgacgttagcggaattgaaagattacgaggcggacatgttcaccaccgtgtttattggaaacagccggaccgaaaagtccgtccttggcggacagaactggatggtcacaccgagaggataccggatatgaaaatagaggaagaaaaaaagatcgcgatctttgcggggaccacggaaggccggcttctcgcggagagactggccgggagcaatgtccgggcggatgttttcgtcgcgacggagtacggaaaagaggagatcccggaggcaccgaatctccatgtccatgacgggcgcatcgatgagaacgggatggaggatctgttccgggaaaaacggtacgatctgatcctggacgcgacgcacccgttcgcgaaggtcgttacggcaaatatccgtgaggcagcgaagaagacagatacgccgtttttgcggatcctgcgggacggaggcaggagcggaattcgggtccagacgctggaggaaatccagaaaatggcggctgaccggaaaaatgagccggtatttgtcgattcggtctgcacggcagtcgaatttctgaagatgaccgaaggaccggtctttgtcacgaccggaagtaaggaattatctgcgtttctggagcttccggactgggagacgagagtctacgcgcgcgtcctctcgatgccggatgttgtaaagacatgtgcggacatgggattctacggcagccatctgatcgcgatgcagggaccgttttcggaagagctgaatgtcgcgatgatgagatccgtccatgcgaaatggatggtgacgaaggaatcagggaaagctggcggcttcggggagaaagtcagcgcagcgaagaaagccggagtcggactcgtcgtgatcgggcgtccggcggaggatgggatctcgctggaagatggaatcaaatatctggagaaaaatttttcactcgcagcttccgatgggcatgaaaaagacgatgcggacgacagaccggaacaggcaggagagagctgccaaacaggttcagatctgataaacacagatcatatcgctccggagaaagcagatcgggaccagcccgctcctgcacaggaagactccgtcggatcagcggtcggagaaaacataaaaaacgaaaaaattcgccaggttttcctcatcggaaccggcccgggagattcatcctggcttacaggcgaggcaaagaaacgtcttgaggcgtgtgacctgatcgtcggcgcatcccgctgtgttagacagctcgccgatttccacaagccggtctacgaggcatatcagccggaaaagatcgcagattatctggacagccatccggaagcagggatcatctgcggagccatgtcaggcgataccggattctacagtgcggcggagaagctctccacagtcctggagaagcgcggatcgtatgaagtcacgatcattccggggatttcatcggtcggatactttttcgcaaagatccggcgcccgtgggatcatgtaacactcttcagcatgcatggtcaggagacaaattttgcgtccgaactgaaacgcaccggacgcgcgttcgtccttggaggcggaaccgatttctacgggaagatctgcggacaactggaagaactcggaatgcaggagacaaagctctttatcggtgagaacctctctctggacggggagcaggtcctctccggatccctggagacattcagggagcggaaggctccgccgctggcagtcctctatgcggaatggaacggtccgctccggccgatgtcacatggtctcccggatgaggaatttcttcgcggcaaagtcccgatgacaaagatggaagtccgcgcggtttccgtatcgaagctggagctgacggaacattccgttctctacgatgtcggggccggaacgggatcgatctccgtggagtgcgcgggactttccgactcagtaaaagtctttgcgatcgagaagaacccggaagcagtggaacttctggagcagaatttccggaaatttgcacttacaaatgcaaaaatcatcgcgggaaatgccccggaggcattgaatgaccttcctgctccgacgcacgtcttcatcggcgggagcagcggaaagatggaggaagtcattgcgctctgtctcaagaagaatcctaagacaagatttgtcgtaaacctcatcacaccggaatctcttgcagctgtccttgcggcggcgaagacacttccggtaacggaaccggagctcgtgaccctgacagcagccagatcaaaaaaagccggaaacagccacctgatgatgggactgaatccggtgtggatcgtgagctttgaagggaagaaacagggagaagaacatgacgaaatatgatattttgaaggagacggaactatttgtcctggatatggatgggactttttatctggacaatgatgtgatcgacggagcactggattttctggatgaagtgaaaaaagccggaaaacgatttgtgttttttacaaacaattcatccaaatcaccgggaacctatattgataaactggcaaaaatgggatgcaatattggcagagaacagatcatcacatccggtgatgtgatgatccagtatctgaaagagtattatccaggaaaagaagtctatcttgtcgggacgccggatctcgaagataatttccgcgaaaatgggatccggctgacgaaagagatgccggacgtggtggtgatcggctttgatatgacactgacgtatgaaaagctggaacgcgcctgcacatatatccggaacggtgctgtttttcttgcaacccatttggacatcaactgcccgacaaaagacggttttattccggactgcggtgccatatgtgcggcgatctccctatcgacagggaaagaaccgaagtatgtcggaaaaccatttaaagagacagtggacatggtcctggaactgaccggagcgaagcgtgaggaagtctccttcgtcggagatcgtatctatacagatgtaaagaccggagtggcaaacggcgcacatgggatcctggtcctgaccggagagacaaagccggaagacattccgaagtctgacgttgttccggatgctgttttcacaggattaaaagagatgggagaactgctcggagaaaaatgaacagtgtccattttgtacccatccatatgatacactaaaaataactgatccgcataaatgccggagaccggaaaccgacccggctttcagataaggcggacatatgcgaaatcggtcagcaaaagaagaaaagtggatgacacatggaaacagatatgacaatgttagcaggtgcaaccgtgatcggagggagcctgggaatctattcaactctgcggctgatctattatatcttctacatgatcgcgaactggaggattttttcaaaggccggagagccgggctggaaatccttgatcccgttctacaatgtttatacggagtataagctgatgtggaaaccgcagctcgcgtggacttacatcggactgggagttctcgcagatatctttctcgaaaacacagggacaagcgccctgatgttcctcggtggtctggtttgcacgattgcttaccttgtaattgatttcaaggaaaaacagcatgtttccaaagcatttggacacggtttcggctttggcgtaggacttttcttcctccagccgatcttctcaatgatcctcggattcggaagtgaccagtaccagggaaatcagtcataaaaacagaatataaaagatgggaagcaggagcacttggcggctcctgctttttttgatgcagaggaaatagcgatgaaatttttatccaggaggacctgtccaaaaaatgcgaggacagacagatataataaaatcatacttcagatggagagtgaaaataaggagtggggcaggagcagagagatgagaacgaaaattcaggacacgtgggatatttaaaggacaggtaaaatgatataataaaaatatcaaacaggaaagatgcaggcagaatacttaaaccgaagaaaaaaacacatggaacaggttgcggcatcatccacagggatatccggaattaggaaaagggggatctatatgagaaatatgacatttggaggatttttagcaggcttatgtacgatcatcggacttctctgttttatcggagcagtcagcgacgcagcagaaccgaaatgtatcgtgaccgggtgcagcaacaagcgggcaccggagagcagttactgttatctccacaaaccgtaccgaagatcttatacaagttcttactcgtcggggagttcgggcagcagttcgtcctcgtcctacggaaagtcatcgggaagcagctcatctggatcatccagctataaaagcagcagtacttccggcagcagctctgcagtatccagaagctcttcttcctacagcaagccgaaaagttcttatggaaccagcagttacagaaaaagcactgcggattcctacgatgacggatatgatgacgtctatatggacggggattacgatgatgaccgttatgccggagacagcgactacgcggatggcgtcgatgacgcgctggatgagctgggggatgattagaaaaacagcggagaagattgcaaaccatgtctggcgctatgaaattactgatggtatatagaaacaaatggaatgaaaatacagagtacaggaggaaacgtttatgaaacatattgtaatcgacctggagatgaacaagattgcgcgcagctcagaagcgagaaaaatctgcaaaagcgagatcatagagatcggagccgtcatgctggatgaaaacctgcaggagatcgggaacttccgtacatatgtaaaaccggaatacaacgataagatcgcggcggagatccggaatctgaccgggatcacagacgtgatggtagcgaatgcaccggtattcagggaagcattccggatgttcacaaactggtgcctgggaaccggagacgaggtcacgatctatgcctggagtgactctgactacaaccaggtcgtaaaagagatcctcttaaaagaatacgagctttccgacgaagaacacggcctgatcgacaccgggtggaccgatttccagaatgaattcgatgcgcacatcggattcgagagacggatctccctggaactcgccctcgacatggccggaatcgatttctccggcagacagcacgacgccctcgacgacgccagaaacaccgccgacctcctccacgtcttccgcgaccgtgatctcttcgagaaaactctccgcaaagtcaaagaagcgatggacccgacgccgctggggaatacgctggggagtatgatcgatttctcggggtttgtggtggggtgatggaggttaaagccaaacacttgcagaaatagattccgaacacggaatcaaatctacataaagtgaaaataaattccgaaatgggaatataatccggacctgaaatgtcatcaacttgctattttgatataagaatggtaaaatcgagaataacaggaaaatgcggacatatagcggtttcgggatgtagatcctgaaaaaattgaaaatcacctgacaaagatcaatggaaacgcgatcattatttttgatacaaaagcccacagggaagaaaaagaaagtttctatcatggaattcttctgggacttctgcgttgtgtccaaaactggctgatccagtcaaatgccgaatccggagacggtttcgcagacatcctgatcgagccggaagatccggattccggaattatcatcgagctgaaatattcccagacattttctggactggaaaaatattcatctgtgatacaatataataatgaaaattcactaagcagtgttctcacgattgcatatttaagtgctatgcaattttattttaagccaatacgggaacttcccacaggacgaggatttgctgactttgtatttattcccaaaccggaatatatgaaagattatccggcattagtcgtagaattaaaatggaatcaaaatgttcagactgccatgcagcaaataaaagaacgcaattatccaatgtcgattgagccatataccggtaatattctgcttgttgcaattaactatgacaaaacaaaaaaatcacatcagtgtatgattgagaaatatataaaaaagaagtgatcgatatttgatgttcattatcaaagaataagctgtgaaagaggtgttttcgttgaccatcgaggaaattcttgcaggtgaatcgttttcttatatgaacttgattgagaatagctcttttttaagctagagaggcaagatctggaatgatgaatatgttaaaaaatggattatcagaagagcgcactccaacttccatccgtctcccccgcatcatgatcgccgccgaaaagagcggcggtgggaagacatttttcacctgtgtgcttctttcactcctaaaggagcggattgaggcggtgcgtgcctttaagtgtggccccgattatatcgacccgatgtttcaccggacggtgctggagattccatcgcgaaatctggacagcttttttgtgggggcggatacgttgcggtatctgctgggacgggaagttctggagaataaggggcttccggcgagccggatcgcggtccttgagggtgtaatgggattttacgatggtctcggcggtgtttcggagcggggcagcgcatgggaagtggcggatcttacggatacaccggtgatcctgatcgttgacatgaagggacggagtctttcggcacttgcctcgatcaaaggcttcatggagtatcaggagaggagccacgttgcaggcgtgatctttaaccggctgtctccgatgatatatccgggacttaagaaaaaggcagagcaggagctggggatccgcgtgttcggatatattccggaactcagagatctgactctggaatcacgccatctgggacttgtcatgccggaggagatcccgggactcagagaaaaactggagtttgtaaaggagaagatccgggcgggggtcgatctggacgggattttggaagcagcggagaaagctccggaacttctgattaagattccggaaatcataaaaaaacaggaaggaaaaacaatatcaggaacagccgctgtccatactgtgtgtcatgcggtttttgatggaagcagagcaatttttcagggaaaaagagaattggcagcgtctgtagcagataataaaaactccagcagccccgtgatcgcagttgcaagagatgaggcgttctgcttttactatgaggacaacctggatcttttaaaaaaacttggagccaggatccgatatttttctccaatccgggatcaggagatcccgccggaggcgtctgcgctgtatcttggcggcggatatccggagcttcatgcgaaggcactttcagagaataaaacgatgctttcttcgatccgggaggcgatcaggaataggatgccctgtatcgcagagtgcggcgggtacctctatttgaaagaatcgatcgaagatccggatggaaagcgctgggaaatgaccagtgttcttccgggaagcagccaggataccgggaagcttggaagattcggctacattaccgtgacagcgaaaaagggtggacttctcggaccggagggaacgcagtttcgcgcccatgaattccaccactgggattcaccggaaaatggaactgattttcaggcgaagaaaccggtcgggacccgcggctgggagtgcggatacacaaccgaaagcttctatgccggttttccacatctgtatttttacagtaatccgaagattgcggagcattttgtaaagcaggcacaaagctggagagaagctccacaaagaatgacataaggaaagataatgagtgacaacacgatgacaacaaagacaatcgaagaaaaatttcaaagctgcttggaccggatcgtcccggcggatcgccatgcaatggaacttgcgaaaaaacgatgggattccgttgcaaagccgatcggcagtctcgggatcctggaggatgatattacaaggatcgccgggatcaggcggagtgcgtccgggatcacgcttgataagtccgcacttgcagtcatgtgcgcggatcatggcgtcgttgcggaaggcgtgacccagaccgggaaggaagtgacccggatcgtggcggagaatttcacgcggggggagacttcgacttccaaaatgtgccggattgccggaacagatctttatccggtggacatggggatggactgtgaagtgatcggagtaaaacagccggatccgcaccggatcatggaccgaaagattgcgagaggttccggaaatatcgtgagagaacctgcgatgagcagaggggactgcctgcaggcgcttgtttccgggatcgaacttgcgtttacgttccgggatatgggatatgagcttctcgctgcaggtgagatgggaatcggaaatacgacgcctgctgccgcgatgagcgcagtgctcacgggactttccccggaggaagcgaccggacggggagccggactttcggatgccgggctggaaaagaaaaaacgggcggtttcgatggcggtcggccgcttttatgaaacatatccgcagtaccggggcggaacgaaggaagattatgagaatggggcgctctcggctgtgacagtcctttcggagcttggcggttttgaccttgcgggaatgaccgggctctttttaggcggggcggcggccggactcccggtcctcatggacgggttcctctcgactgtatcggcacttctcgcggtcctgatccgccgggaggcgaaagattatctctttgcctcgcacatttccagtgaaccggccggaaaagcggttcttgaaatgcttggacttccggcgccgcttcatctcgggatgcatctcggcgagggaagcggggctgtagcgatgatcccactcttaaagatgggagcgagcgtctacgaagagatgagcactttttccgacatttccgtcgagcagtacgtggattatgagaaggaggtccggacatgagagcggcgatcatagcgttttcgatgtattctaggatcccgatgccgatatttgagtggaaggaagaggacatgaaatacgccatgtgcttttttcccgcgatcggggcggtgatcggagcggtgttttttggaatgtatctgctgctcgacaggatcctgacgggaaagatcctggcagcggggatcctcctcgcagtgccgctttttatcacgggcgggatccacatggacggatttatggacacctgcgatgcaagaacgtcatatggcgaccgggagaagaagctgggaatcttaaaggacacgcacacaggagcgtttgcggtgatcttcggaggactgtatctgatcctctacgcagcggcgtgcacggaacttgatgagggaagtgtgctcctcacagcgatcgggtttattctttccagggcgctcagcggcctttccaccgcgacatttccggaggcgcgaaaacatgggatgctggcagattttatgaaggatgcgagaaagaagaccgtggcagtctgcatgctcgtgatctttttcctggcggcatttctggaattgctctttggcggtatctgcggcggtgttgttgtaattacaacggttttgatcttcctttggtatcgccacatggcagtacaggaattcggtggtgtgaccggagatcttgccggtttcttcctgcagatctgtgagcttgggatcctgctcgcggcggtgatcggaaaggcggtgttttaagtgaaacttttactgatccggcatggggcaacgccggggaacctggagaaacgatatgtgggcaggacggatgagagtctgacgcaggaatccctcgaaacgcttggcaaagaggcaaaaaaaatccgggaacttgccggaaaacctgcggcgatcatcacaagcccgatgaaacgctgccttgagactgcggaaacactatttccggaacatgattatccgcaggtcccgagggttcaggtcgaagatctttccgagtgtgattttggaaagtttgaatataaaaactatctggaactctccggggacatggaatatcagcattttatcgacacgatgggagctgagggattcccgggcggggagagcacggaaacgtttaaagtgcggactgtgaaggcgttccgggagaacctcgcgagattatctctggagacagaggatccggacaaaacactcgtcttcgtcgttcacgggggaacgatcatggccgtcatggaggcgcttgcaaaagagcggaagagttactatgactggcaggtcggaaacggcgaggggatctttggagagatcgaagcgccggatggacggatcggtcaggtgcggtttcttcggaacaatccagtatcatagggaggtaaaatcatgattcttttattatcggtatgcagcatcggatttctgatctacggtgcacttgttgtcagtgggatctatacgccgatcagctcgaaaattctggttgaggatgaggaacgggcgaaatggtgccatacggagggcgtcacaaagatgctctgggggctggatcttgcgtttttggtaatgtatctttgccgtgttttcccggcatttttatggcttggactgtttcttgtgctgacgatcgtgatcatcatcatggcttataagaataatggaaagtatttaaaatgacgcagaaaaatcagaccagttcactatatgagaaatggcgtttttgcggtatgatagacagcgaacggaacaaacattaaaggaagatttttatgacagacagactcgaattacttgcagtggtcgcactcggatttctgctcgatcaggtcctcggggatccgcactggttatatcatccggtgcggctcatcggggcttatatttcatttctggagaaagggatccggaagctttttggagagggagagagtgcgctcttagttggcggtgtggtacttgttgttctcgtgaccgggacaacggcggtcgtatccggcgggatcttatacgcctgcggcaggatctccccatggctccggtttctggcatctgtgatcctgtgttatcagctttttgcggtaaaatccctgaaggatgagagcatgaaggtgtaccgggaattgaaaaaggacgaccttgaagcggcgcggtatgcggtgtcgatgatcgttgggcgggatactaaagtgcttgatatgacgggtgtcacgaaggcggcggtggagacagtcgcggaaaatacgtcagacggtgttgcggcaccgctcttttacatggcgatcggcggaccggtcctcggctgggtatacaaggcagtcaatacgatggattcaatggtcgggtataagaatgacaaatatctgtaccttggacgggcggctgcgaaactggacgatgtcttgaattttattccatcgagactctgcgcctggatcatgatctttgcggcgtatctgccgtccaaagggcacgaatttgacggaaaaaatgcgaaaaagatcttcctgagggaccgtttcaaccatgcgagcccgaattccgcgcagacagagtcggtctgtgccggagcgctgcgggtgcgccttgccggggacgcgtggtactttggaaaactcgtaaagaaaaaatatatcggagatgatctgcgtccggtggaaccggaggatatccgccgggcaaacagacttctctacctgacgtcgtggatcctgatggggctctgtgcggtgtgggagatcattctggaattgttgtaaaaacaaggcacacagtggaggaatcaaaatggcaaaagtgatcatgatccaggggaccatgtcgaatgcggggaagagttttcttgcggcggggctctgccggatctttaagcaggacgggctcaggacggcaccgtttaagtcccagaatatggccctgaattcttatattacgcgggacgggcttgagatgggacgggcccaggtcatgcaggcggaggcagccgggatcgagccggaggcggcgatgaacccgatccttttaaagccgacctcgaacatgggatcccagctcatcgtgaacggcgaggtccgcggcaattatccggcggcggagtattttaagatgaaaaagagtctgatcccggacatcatggatgcctacaattccctggcatcccgcttcgatgtgatcgttgtggaaggcgcgggaagtccggccgagatcaacttgagggaaaacgatatcgtgaacatgggactcgccgagatgctggatgcgccggtacttctcgccggggacatcgaccggggcggcgttttcgcccagctctacgggactgcggccctgctcacagaagcggagcaaaagcggatccgcgccttcgtgatcaataagttccgcggggataaagagatcttaaaaccgggtctttccatgctctatgagcggatccggatcccgtttgcgggtgtgatcccgtacatggatgtggacgtggacgatgaggacagcctctcggagcgcctgacagaaaaacatggaaccggacctcttcttgaccgctccggccatgcagcttttgcgaagatctccgtgatccggcttccgaggatctcgaatttcacggactttaatgcactggagcgactgccggggatcgcgctttcttatgtgagccgtccggaggaactgaccggatcggatctcatcatcctccctgggacaaagaacaccatgggagatctcaagtggctccgccagaacgggctggaagctgtaatcacgcggatggagggaaaagggatcccggtcatcggcgtctgcggcgggttccagatgctgggaacgagtctttccgatccgcatggtgtggaagaaggcggaacgatgcgcggcatggagctcctgccgatccgcacgatctttgcggagaagaagacgaggacgagagtaaatggaacggcagccgggttttcaaacgatggagtaccggtaaagatcaacggatatgagattcatatgggagagacgatccgggacggcggacagccgttttcgtggatccagtacgaaaatggggaaaatatcgtagcgatggcgatggattccgatgcgcgttcaggatataaaacggattcgaatccgaatggagctccggacggtgggaaagaagacggctgtatcagcggaaacgtattcggaacctatgtccacggagtattcgacacagaagagatgcagcatgcgatccgcgatttcctcgcagagagaaaaggtgttcgtccggagacatatgaaaacggggaaacattctcgatggcaaagtataaagaagagcagtatgacaagatggctaagattatccgggaaaatctggatatggatatgatctaccggatcctggaacgaaaggatgtgagatgatgagtggacttgactggaccgaagaattaaaaaagcggacggggatcgatttcctgacaacccgcccgatggagatcgaaaaaaagagttttgagatcataaaaggagagctgggcgaggaatttgtttcccggtatccggctgatgcacttccggttctctgccgtgtgatccataccaccgccgatttctcctaccgcgacaccctcacgatcacagaaggcgcgatcggactggcaaaagaggcgatccaccgggggcttccgatcatcaccgatacgacgatggcggcatccgggatcaacaagacggcggccagaaaattcgggatcgatgtgcactgctttatcgcggatgaggatgtgaaggaagctgcaaaggcgagcgggatgacgagatccgcggtcagcgccgaaaaggcggcgcgactttatccggagtgtatctatgcagtcggaaacgcgccgacggcgttaatgcgcctctatgagctgatcgaagaaaaaaagatccggccggcgcttatcatcggagtaccggtcggattcgtgaacgtagtcgaggcaaaggaactgatccttcggacggatgtcccggcgatcgtcgccagaggacgaaaaggcgggagcaatatcgccgcggcgatctgcaacgcactgttatatgaggcgggaggacgatagcggttcgctactttacttcctgcaccgggattcccggaactgccatcagagagtagttggtgtgatagacaacgaaacctggtgcggctccgggaactttttttaagttcttccgctggatatagtcgacttcgaccttctcatttccgcggcctttggagtagtaggcagccagcgcaccggcttcctcaaacacgcggtccgggagctcttttccctcagtctttacgatgacatgggagcccgggatcccttttgcgtggaaccaccagtcaccgccgttggcaaacttgaagtcgagttcttcgttctggtagttgttctttccgacatagatgtggaatccgtcgctggaaagatagtggaacgggcggctcgtgatcttcacctttttgccgcctgtgtagtggcgcttgatatagccatactccgtgagctcttccttgatctggacaaggtcctcctcgagtcttgcgatgtccatcgatgtgctgatggattccaggtgggcgatctccgccttcgtctgtgcgagctgttcggtgacagcctcataagtccgcttctgtttattgtacttgtcgaaataccgcttcgcgttctcctgagccgtcatcgtcggatccagcgggatcgtgatctctgtattgtcgtaataattcagacacttaaaactcttttctccgccggagagaccgtacccgtaggtatttaaaagttctccgtagatcctgtatttttcccgcttttccgtatcctttaactgcctggtctgcagatccagcttccggacgctgcgctccaatgcgttggagatgatctttctgaggtccgtggatttctggtggatcctggataccgtgttcttttccgcatagtagcgctctaaaagttcactgatggaggaaaagttcacggtcttataattgccgccttccatcatcgtgagcggtaccgatgcgaattcgaccggtttctcgccttcatagatgatattcggcgtaaaattgccttcgcggacatcgtccatgatccaggtgaacgcgtggaagagatgtgtgagttccgcatcggaaaattccttcgcggagacatccccgtcgagtgatgcaaggtggcagatctcggcggcaacgaccgggcttaaaccggtgagatccatgtagagggcctttgagaggttctgcggggtgttgtgcaggagttccttaaattctgtctccgtgatcgtcagcggatctttcttctccccggagtgcgggataaagtaatcgcgtcccgggagtacctctcggacagagcttacctgtgcggagatatgtttgatgctgtcgaggatcacgttgttctcatcgcagaagatgatgttgctgtgttttcccatgagctcgatcacgatgaattttctccggagatcgcccatctcatcgagatgctcgacctcgatccggacgatccgctccagtcccggctgggtcacggagatgatcctgccgtttgcgatatgctttcttaaaagcatgcagaagttcggagccgtcatcgggctcggtttgttgtttgatgtaaaatagaggagcgggagactggcgttcgccgatacgagcagacgcacgttctcccggtttcctttaatggtaaagagtaattcgtccttttccggctgggcgatctttgaaatcctgccggagacgatcttttcgttcaggtcgcggacaaggttcgcgatcacgattccgtcaaatgccatggtgtatgagttcctttcgttttatcgatcataaattctaagattgtctgatatgtgtacgctcgggagactttctaagagtatctcccgagtgtgggaatgggcggatcggatctgcttcatgaaaagtgttcatgaaagatcgcgttgatccgttccgtcagctccgcgaccgagtgggcccggcttctggaacattcccgcgcagggcggccgcagaggagacaggtccggcccggctgcccgatgtcacttcttgagatcttttttccatcccgcccgatgatatcgatgtcatagagtcttccgagatcggacgcgtcctctaacggcacgagaaggcgttttgcggcgagcgcatccgcatccacgcagagaaatgcctccggaccggtcttatcgaggattaggctgcgctttaagaccgggatctttgcggtatccaacgcggaaacgatctccgaaagtgcaaaggcaaatgcctccggaacaagcggcaggaccttgaccggccccgggatatttaaggtgaaggagacgagaacgccgggaaattcggagagaagctgttcctgcatccagacgcgccgttccctggcgtttaacatatccggaagctcggcatcggcaccgatgaatttttctaatgtttctttttctgcgtcatttaataataactgttctatttctggatcattccataaaaatttttccataaaaacctcagatctcatgcaggatctcaagaaatcctttcatatattttgtgagatacatgtccttccggtagcaggcgtaaaaatgtcttggattctccacaccgaggatcggataggagaagtaggcggaatccggcgagttatcagtctcgacataggaatccggacaggccatcacgacaggacttgccgcaacgacatgttttccgacctcgatgctgatcgtgacaaggtcgatcttcggcttcatgtccctcgtgataaagagggagtcctggatcgtccggacggagtgaccggactggctggagacgaaggtctcatcgcgcgcctccaggatatcgatcggtgtcccgggcgcgatccgtttcgcaagttcgcattcgtggttcacgatgaggacaagctgttcctcctggatcaggtcgtagaccagttcctcgtggcgcggggatgtcgtgagaagtgcgatcccgacttccccctccaggacgcttttttccatggtcgcagatccctgctcatggagttccagccctacatgggggaaacgtttcttaaaacgcgggtataattccggtaacagctccatgccgcgctggaccgagatcccgaggcagatggtcccgaattcttccttgctcagctcctcgacctgttttctcaagtttgtggagatcgttgtcacctgcctcgccgcctccacgtagagctgtccggccggcgtcagggtgatcggatcggtggagcggtcaaagatcggggcgccgagattgctctcggcggtctttatgatctggctcagagagggctgggaaacgtagagcttttttgccgcgtttgtaaagctgccttccttcaggacagtcagaacatactgcatgtgtttttcattcatagaggcgtcctcccctgactttttatctcagttagataaaactcctgtttttctttcctattctatcacatccggtcggaaaagacaacgcggggaaaccggagcgttcctgccgccggaccgatccgatgccccataagaatttccctatattctctatagagggatatgtattggattaaaaaaaatacaagtgatatagtaatgccatagaaagttatagaactcaggcgggaaaacaaacgaaatttgtgtatcctgcataatgagaaacggagggaatatatggaaatcaagaagacagccatggccggcacactggaatccagtgacgcccaggtaaccgtggagccgggcgaaggaaagatcgagctcacgatcgagagcagcgtgatccaccagtacggcagacagatccggaaagtcacactggagaccctggagcgtctcggcgtggacagtgcaaaggtcacgatctttgacaaaggagcgctcgactgtacattaaaggcgagagtggagtgtgcggtctaccgttccaacggcatcaccgaaaatcttccgtggggaggtgtcatccgataatgcatccgaataaaaaacgcttaagaagatccatgatgtttttaaattgccagaaaccgggtctcatcaaggatccgtacatctacaaaccggattccatcatgttagacctcgaggacgcggtcgcggagaaccagaaggacgcagcgagatattccttatatcatgcgcttcaggagatcgattaccgcggcgtagagcgggtcgtccggatcaatggtcttgacactccgcactggaaagaagatatccgcgtctgtgtcgcgggcggagccgacacgatccgtattgctaagacagagacggcgcaggatgtaaagatcgtggaggaacatgtcctcgctgcggagcgggagtttggacgcccggagggaagtacgcttttaatggcagccttagagtcctgtaaaggcgtcttaaatgccctggaggtatgccagtcctccgaccgtctcatcgggatcgccttatccggcggtgactacacgaaagatctccagacgacgatcaccggaaccggcgtggagctcatgggtgcgagacagcacatgatcatggctgcgagagcggcaggcgtccagtgctgggataccgtgttcacgaatcttgacgatatggaaggtttcgagaacgagacgcggatgatcaagatgatgggatttgacggaaagtccctcgtcaacccgagacagatcgcgatcgttcacaaggtctttactccgtccgagaaggagatcgttttcgcggagaaagtagtccgtgagatcgatgacaagaaggcaaagggaatcggtgtcttcacggttgacggaaagatgatcgacatcgccttctacgacggtgcaaagagaacactcgccatggcgaaagcagcaggcgtttataagggggatttataagatgatcaatgcagttggaagagaaattcccgaagagatcttaaaagcgacaggcaaagaggccttcaagggcgtctatgcctatgacgattatgaatataaaaaggcggctccgaccgtccggacgttaaatgacccgacccggagcaagctcgttgagaacattcacgatgcgctcgtgaaatgcggcatcaaagacggaatggtcctttccttccatcaccacttccgggaaggcgactatgtggtgaacatggtcatggaagaggtccacaggatgggaatcaaggatatcacgatctgcgcaagctctttaggaaaggcacatgatccgatcgtcccgtacattgaggacggcacaatcactggaatccagtcatccggcgtccgcggaaagatcggggaagcgatctccacaggacggttaaagaacctcgcgatcatgcgttcccacggcggacgtgtccgtgcgatcgagtccggtgaggtccatatcgacatcgccttcatcggtgcaccgacctgtgatgagtatggaaacatgagagcaaacggcggaaagagcgactgcggcgttttatcctacgcgatggtggacgcccaatatgcggacaaggtcgttgccgtgacagactgtctcgttccgttcccgaacctcccggcgagcatctccatggtgaacgtggattatgtgtgcgtcgtcgatgagatcggaaatccggcaaagatcgcgaccggcgctgcaaagccgacgaccgatgtgagaaagatcatgatggcagactactgcacaaagtttgtggtcaacaccccatactttaaggaaggtttctcctaccagacaggcgtcggcggggcgtccatcgcctccacgatctccctcggaaagatcatggaagagcgcggcatccacatgggactcggtctcggcggcatcacgactccgatgtgcgagcttttagcgaaaggtcttgtaaacaagcttgtcgatacccaggatttcgaccagggcgcgatcgagtccatcaagacgaacccgaaccattttgagatttccgcgtctgagtacgcaaacccgttcaacaagggcgcttatgtcaacaaactcgatttcgtcatcctggcatctctggaagttgacgtgaactttaactgtaacgttgtagtcggctccgacggcatgatcacaggcgcccagggcggacatccggacacggcagcaggagcaaagtgcacgatcgtgatcgctccgctcttacagggcaggatcccggcgatctgcacgaatgtgacgaccgttacgaccccgggcgagtccgtcgacgttgtcatcacagactacggaatcgcaatcaacccgagaaggcaggatctcatcgagtgcatgaaagacgttgaccttccgttctgtacgatcgaagagctccgcgacaaggcgtacgccatggtcggaactccggatccggtacagtttgacgaccgcgtggtcggcgtgatcgaggcccgcgacggcaccatcatcgatgtggtcagaaagatcaaagactatgaatttgaggatgaacagtaatctgtctgtcccggtgctgtgaaaacaatttctccagacatgttttcgcagcgtatacccccttagataaaggagaatttgagtatgtctgaaattcccgatgatcctcggtgtgatcctcgtcctttccggatactacacctgggacaactttgcaaagctcatcaagagcggcttttccagcaccggcccgacagcggcactgttcgtattcagcgtcctgtacttcgggatcatgacagatgccggaatgtttgatgtcatcatcaacaatcatgcgggtccggcactgaccatgtgttcgactctgatggcggcggcagtcctcggccgtcatctgccgctcgtcatcggtatcctttccgtgccgctcgcactcgcgttcgacaccgacagctacttctacggaatgcttccggtcatgatcggcatcggagagggcttcgggatcattccggtgtaagcacgtttacagaattgacaatttccctgattttgatatagtggctgtctgatataccccactggacagcgcagaatacctcccatatgaatgaaaaatccccagcggtcagaatgcgaaaagccgctggggatttttctgccttatttttcatatgcgatcagaaacagaatatttgcacagaaatctggttgactgtaatttttatttgccgtataataatggttatctatgggaaagcgaggcatgtctgaatgattaagagcatgaccggattcggccgccacgagttagtgacggacgagtgtaagatttcagtagagataaaggcggtaaaccaccggtatcttgatctgggaattaagatgccgaagaaattcaattacttcgaagcatccatgcgtaccctcttaaaggattatatccagagaggaaaagtagatatatttgtgacatacgaggattataccgacgcaaaggtattcctcaaatataacaagtctcttgcacaggaatatatggacagctttaaaaagatggctgatgactttgatatcgacaatgatgtgaaagtgtccatgctggcaagatgcccggaagtcctcacgatggaggaagttccggaagatgaagaccatatgtgggagctcctgaaagatgcgctctcaagagcctgtgagggattcgtggagtccaggatccgcgagggcgagaatttaaagaacgatctcgtaggaaagctcgaatatatgctgacacttgtcgactttatcgaggagcgctccccgaaggtgatcgcggagtaccgccagaagctggaagacaaggtaaaagaacttctcgcgaccgcatccgtggacgagtcccggatcgcaacggaagttacgatctttgcagataagatctgtgtggatgaggagaccgtccgattaagaagccacatcgagggaatgaagaaggaacttttagccggcggcagtgtcggaagaaagctcgactttatcgcccaggagatgaaccgcgaggcaaacacgatcctctcaaaatcaacggatctcgagatctccgaccgcgcgatcctcttaaagacagaggtcgagaaggtaagagagcagatccagaacatcgaataaagcttgtgtaaacacggaatgcggagcaatccgcagtccgcgaaaccagcagaatacatgattgagtaatcaggaggcatttgtaatgcagacaaaaggagtcctcgttgtagtttccggattttccggagcaggaaaaggaaccgtgatgaaggcgctcttgaataaatatgataattacgcgctttctgtatcggcgaccacgagaaatccgagaccaggggaggaaaatggaagagagtactttttcctgactgaatcccagttcgaggatatgatcaaaaatgacgagctgatcgaacatgcacgttatgtagatcattattatggaacaccgaaaaaatatgtggaagaaaagatggctgcgggaaaagacgtgatccttgagatcgagatccagggagcactcaatatcaagaagaaattcccagacgcgcttctcgtatttatcgtaccgccgactgcggaggacctgaaaaaacgtcttaccggccgcggaactgagagcacggaagtgatcgaaaaacgtctccgccgtgccgcggaggagtccgacggaatggattcctatgactatatcgtagtcaatgacgatatcgatacctgtgtggaagatctccacagcctgatccgctccagccactttaaagagtccgcgaatacggatcttgtggcgagaatgaagcaggagctgcacgatatgacaaaataaagaatgtatccgtaaaaatgctacatgcaaaaccggatacttcagatatttaaaatttataacaaaaaacagcaaaacttctcgcatctttacagatggagaggaaagctgcaaccaggaaactcatgatctgaaaggggtatattttatgttacatccgtcttatacagacttaatcgaagccgtaaacagcgacgttgagccgggcgagcagccggtcgttcagagccgttattccatcgtcatcgcagcatccaagcgtgcgagacagctgatcgctggtgacaaaccgctcgtagcaggcgctgccggaaagaaaccgctgtccaccgctgttcaggagctttatgagcagaaagtaaagatcctcacagaggacgaggagccggagatcgagactgatttcgaggtgaaggagagaactccggaagagatcaaaaaagaagaagagtacgcggaagaataaaagcgatccgcccggccgtgtgatgccaagccacggacggacgaaccggagaaatatgttggaaaggggaggaaaacggctgaatctggctttagtttcctctttttttcgctggcggcttcaaaaatgccggatacggctgcggaccgcgaagctatacagagaaaggaaaaacaaacagaatgaatttacttttcatatcactgggctgtgataagaaccttgtcgatacggaaaaaatgctgggaatcctggggaaagagggctattccttcgtggatgatgaaaatgaggcagatatcgtcgttgtcaatacctgctgctttatcggcgatgcaaaagaagagagcatcaacacgatccttcagatggcggagttaaagaaaacaggccgcttaaaggcgctgatcgtaaccggatgtctcgcacagcgctacaagcaggagatcattgatgagatcccggaggtagatgcgatccttggaacgacttcctatgaggcagtcggggaggcgatcaaagaagtcatgcacggagaaacaccggaggtcttcgagagcatcgatgcgccggtgagcaagactacagaccgtcttgtgacgacaggcggacattatgcgttcttaaagattgcggagggctgtgacaagcgctgcacgtactgcatcattccgtatcttcgcggaaaataccgcagcgttccgatggagcagcttgtgaaggaagcggaggagcttgcagaaaaaggcgtgaaggagctgatcctggtcgcacaggagacaaccctttacggaaaagatctctacggcgagaagaaacttccggagcttttaagacgtctggcagccgtatccggaatccagtggatccgtctccagtactgttatccggaggagatcaccgatgagctcatcgagacgatcaagaccgaggaaaaagtctgtaactatctggacatcccgattcagcacgcgagtgatgcggtcttaaagcggatgggcagaagaacaaacaataaagagatccgcgagctgatcgcgaagctcagaagagagatccctgatatcgcactccgcacgacgctgatctccggtttcccgggagaaaccgaggaagaccacgagatcctgatgcagtttgtcgatgacatggagtttgaccgtcttggcgtgtttgcgtattctccggaggaagacaccccggccttcagctttgaaaaccaggttccggatgaggtaaaacaggaccgccgcgacgagatcatggaactccagcaggagatcgctttcgagaaatccgaggcaatgaagggacgcaccctggaagtcatgatcgagggcaaggttgccgacgagaacgcctatgtgggccgcacttatatggacagcccgaatgtggacggactgatctttgtaaacaccggactttccctgatgtccggagattttctgaaggtgcgcgtgaccggcgcatccgagtatgatctgattggggaggcagaggatgaatttaccgaataaactgaccgttttacgtgtgatcatgatcccgttttttgtagctgcacttctttatgacggcggtgcaaaccagaatatgcgttacgtggcagctgcgctctttatcattgcgagtctgaccgatatgctggacggaaagatcgcgagaaagtataacctggtaacaaattttggaaaatttatggatccgttggcggataaactgcttgtatgctccgcactgatctgtatgatcgagctccgtgaactcccggcctggatggtcatcatcatcatcagccgtgaattcatcatcagcggtttccgccttgtggcttccgataatggtgtcgtgatcgcagcgagctactggggaaaatttaagacaacgttccagatgatcggagtggtactcctgatcttcaacattccggcactttccatggtgacgacgatcgtgatctggatcgcgcttgcattgactgtaatttcacttgttgactacgtcgtgaagaatgccggcgtccttacggaaggaaaaatgtgatgattcgaacagaacggggttatgcccagatctttaaaatttacggaaaaagcgagacagaggtaaaagagaaacttcaggaccttttaagacagggcggtgcggtcgtgatctacacgagacgccgcggaaaagatgtccacgttctcgctgagacggaggcggaggatgaggaatccgcaaagacagccttaaaaccagttgccaaagagatcaaaaaggcgctgggagatatgtattattccacaaaagagaatgagacgatggaagagactgtcgtgcgtctcctcacaaaatacggactcacggtgacaaccgcagagtcctgcaccggcggcatggtggctgcaaagatcatcaatgttgcgggcgcgtccgatgtatttgagcagggctatatcacgtattcgaataagtcaaagagaaagatccttgatgtcagcaaggcaacattaaagaggtatggagcggtcagtgagcagactgcaagagagatggcgctcggcggagtccttgcagccgatgcagatgcctgtgtggccgtaacaggacttgcaggaccggacggcggaaccgacgagaaaccggtcggacttgtctatgtttcctgctgtatgaaggatgatgtgatggtggaggaatgccacttccacggtacgagacaggagatccgggaacatgcggctctggcggcacttgatctcctgcgaagaatgatcgtaaagtccaaatgatcgacagcgtgcattttgaaacaggctgtacaaaaacacgcagctcagttggagcagccgcaaaatatataagaaatgggcaggtggatcatgcgctggtatgaaaggctgtatgtcggggaaaaggcgaaaaagcacagatatgagacgatccaggcagtccggaacggacaggcctttggcttttatgtcctgacaccggcggcaggggaccggaatcttctggatatttacccggcactgaccttaaaacttccttactatcaaaagcaggatcttctgatcgtggggatcgccgaggatttcgaagatgcgtcgatgcttgcagggcggatcgtttctgagacctacaaaaagaccagcggatacgatgtgaactcctttcttttcggaaaggggtgctgcgagtgatccatgttatactgatgatcttgaagatcatcgggatccttgttctgttgatcctcggtctgatccttgcggcaatcctgctcattttgttcgtcccggtgcgttatcgggcagatatctcgtttgacgggaaaccggacggggaggcggcagtcagctggcttttacaggctgtccggatccgggtgagctatcacgaacatgcggatgtatccgggcaggtactctggttcaaactgtttgatatgaggctgtggccgccggaggatgaagccgaagagtttgaatctgagtttgaatctgagtttgaatctgatcggaatgatccaaaaacggcagatgaagaacccggacagataatttcagagataaacgaaataccggagattgcggataggagacccgaacccggaacaccggaaagctctgcttcgaaaccttctttttcggaatcaaccacagaacaaaaagcagatattcttgatctcgagctggagaaacacgccggaagcaaactgaaggttgttccagaaagtttaaaggaagacgatgaactcgttgtgcatgcgacagagatttcatcaggatcagatgtgcttccagaagaagatgcaaaaatttgctctgaagatcagcagattccttcttcggaaggacaacggagcgcgacggaagaggaagatgaattactaactggtacttcttctcagaaaacacctgctgctgatgtgcagataactcagtcgaataaaggaaagacatcaaaagagaagcgaacaggattcgccgcaaaaataagagaaaagttcgcccagctcataaagaaactgcgcgcgcttttcacctgtatccgcgagcttcagggaaagatcgggaaactggccgacgggatcttgaaaaagaagatctccctggaaaagacatggaacagtatttcgatgttctggcatgatgaacagaaccagaaagcattccacctgatctggaaacggatcgggaagcttgtccggtatgtgcttccgagaaaactttcagggcggatccatttcggatttgatgatccttatgacacgggacaggttctcacggccgtcagcccgttctatggcttttatgcgaagactctgactcttgaaccggattttacaggaactgcgcttgacggtgagatccatttaaaaggtcggatcgcactgtggtatccgctgtggacggcggcgcgactgtttatcagtaaggatttcaggcggcttctgagatttttgaggaaaagaaacgccaaaaagcagagcagatagtttcctgcttttgcggatacttcctattatgaaccggcaaaatccgtgacggctattgtattgtgcgaaaattttagtttatggtcgtgaaagtaactctgactgagataaaatgtaaatttaggaggaatcggtatggcagaaaatcagtttccatctaccgtagatgcactgtttaaggggatggatcatttcattacatcgaagaccgttgtgggcgagcctgtgaaggtggatgagaacacgacgatcattccgcttgtggacgtgacctgcggtatggcagccggttcctttgcacagtccgcaaagacaaatggcgggggcggtatgagcgcgaagatgagccccagcgccattcttgtgattcagaacggcatgacaaagctcgtaaatatcaaacatcaggatgcggtcaccaaagtcctcgacatggtcccggacatcgtaaaccgcttcaccggtggaaatgatgtaactccggaggcaacggcaaaagcggaagaaatggcttccaagatggagaaagaaaaataaatacggaaaacaaaattccccggagcgattcggggaagcgttatatctgggaatcattagatttgagaccgcataatctgtcatagaaattccttttagggagtatgagtatgaagcgattatgcggtctcatgctgttctgcgtgggttttggtatgacctgggccttgatattgccgacaaccttttttcttgtgattacggcggcagcacttatgatcgtgggatataatttattttgtgggtaaaacaggacagattgaatgataccggatctgcaattctgattttttcggcaaaggagtcgaaaaacggcataccgcattctcgttactttcgtgatgagcaggtgtgccaaattttttttcaagacgcagagcagacgtttgctatatataagaacgtttgatataatgtaaacacggaagtaactattcagtaggtctgcgcacttgctgcgctgaccgtaataaaacatgggacggaaggcaaaaatcccatcggcgaagccgatctggaatggatttttgctcgtaactgtgagggtactgaacagttacacacggaagtataaagatggagaggaggacttttatgggaccaatttttgagggcgatgggtggttctgcgtgatagcaattattgtttcggaacttttagcagatattccctggctgtcagctcagatgagactcccgggaatcgtgatgatctcactgatttttgccctgttttacgggccggaaccaaagcggatctcgaaaaaagttttcgcgggaggagtagtgggtcttatggctgcttcgctgcttggagaactggtcggaaattttattggaaaaggtattttaattgttctgttgggaaatcagatccgaatgaaaaaggcaccctcacatgaggatgccttcatttcatttccctatcttgtaaaaggaggattaagctctctcaacgagaccggatcttaagcaggaagtgcatacatacatcttgcgggagccgccgttaaccttaacctttacagattttaca

SEQ ID NO: 1996 - DNA, 17240 bp, Unknown
  gut microbiota DNA sequence
atctgtgcatacatttccgctgtgagcaaacaaaaaataagccgcacagtcctgtatttcaggaccatgcggcttataaacgtctgtatcggaatacaaacttttattatttgcccatctgtttagcaacttcctcagcgaagttctcttccttcttctcaagaccttcaccagtctcgaaacgaacgaagctcttgagctcgatgttagcgccattctcttttgcaacctgtgctacgtactgagctacagactgcttgccgtcctctgcttttacgtaaacctggtctaagaggcagatttctttcatctctttgttgatacgtccctggatcataccctggataaccttctccggcttggatgcttccttcggatcgttctggatctgagccataaggatggatttctcatgctcgatgaagtctgcgcttacttcgttacggcttgtgtatttcggattaagagctgcaacctgcatgcagacgttcttagccatctctttaacagcgtcgtttacaacgtctgtctgaacgtcaagaagaacaccgattcttccgccggcatggatataggaagcaacgaaaccgttctcctctgtaacctgtttgaaacgacggatgctcatgttctcgccgatgatggagatctgggaggaaagagcttccttaacagtaaggctctcgtctgctgcccacttctcatccatgaatgcgtccatatctgctgctgttgttgtaagagcctgagctgcaacctgagcaacgtatgcctggaactttgcgttctttgcaacgaagtctgtctcagcattaacctcaacgataacagctttcttctcgtctgttgtcatagctgtgtcaacgataccctcagctgcgatacgtccagccttcttctctgcgcctgcaagtcctttttctcttaagaactcaacagccttgtccatgtcgccgtctgtagctgcaagagccttcttgcagtccatcattccagcgcctgtcatttctcttaaatcttttaccattttagctgtaactgctgccatgtttcatttcctccgaatcatattaaagaatcaaaataaaacgtgtcttttcagaagaaggtgctgccactgacagcaccttccggattccttataacaacttaagcctctgcgttctcctcagctgcttctgctgcctcagcctcgccctgcttagcctcgatgacagcgtctgccatcttggaaacgataagcttaacggctctgatagcgtcgtcgttacccggaattacatagtcaagttcttccggatcgcagtttgtatcagcgataccgatcagagtgattccaagtgtgtgagcttcctgaacacagattctttccttcttcggatctacgataaagatagcgtccgggatcttcttcatttccttgataccgccaaggttcttctcaagcttctcccactctttctttaactcgataacttccttcttcggaagaacgtcgaaagttccgtcctcagacatcttctcgattgcttttaatctagcgattctggactggatggtcttgaagtttgtaagcataccgccaagccatctctcgtttacatagtacattccgcaacgctcagcctcagccttgattgcatcctgagcctgtttctttgtaccaacgaaaaggattgtgccgccctcagctgcgatatcagcaactgccttgtaagcctcatcaactttacctacagatttctgaaggtcgatgatgtagataccgtttctctctgtgtagatgtacggtgccattttcgggttccatcttcttgtctggtgaccgaaatgtacgccggcttccagaagctgtttcattgaaattacgctcatgttattttcctccatttggttatttacttccgcctgcatctcacttccacaaccacctgaaaaactcaggcaccacttgcagaatccgcagacgtgcataatatcagctttttcactatatcataagtcaattttccctgcaagtacttttttattatttttccaacttttttgtgtctttttttgcgtctcgcgttacccagcggtgagcttccgggctggtgtgcatgatccggggatctggcttcctcttagtgcgcgggtgactgcgttgaagaacaggcagcacttgtctgagcgcagcgagttgtgctgcctgttcttcgcccttagcagtctcccgggcgcttagaggaaccatccccgcatcccaaaagcacaccagcccggaagctcaccgcgtaccctcgccaacacctccataaagccactctcccctattccaccaaaaaaagaggcgcagccctaaatcccgccgcacctctttttacatcttcttcaattacaaccaaaaccacttctatcagttatttcgcattaaccgccttcaacgccttcagctcatcaaacacaacatcattcaaaactttaatgtatgttcccttcatacccgaagacctcgactcgataacacccgcactctcaaacttccggagcgcattcacgataacagatcttgtaataccaacccggtctgcgatcttgctggcaacaagaattccctcgtttccgtcaagctcctcgaagatatgggtaattgcctccagctcggagaacgataacgtgctgatcgcagatttcacgatctgtacctttcttgtctcctccgcgttctcctcatttacagaacgcatcatctcaaggccgacaaccgtagtaccgtattcgcagagaataatatcatcgatatcgtactgctcgtcggatttgtacataaataaagttccaagacgttctcccgcaatatcgatcggagcgatgatcgcctggtatttcttcacgttctcctcagcgaaaccgagagtcgcaagatttacattttcctttgtggaaaggacacttaagaggcgttcgttaaacattttatcgacatagccgccaactttgtcctcaatcaactcatggatctcatcgacaccaggacagatgcttacacccaggacttttcctttcttgctgatcacgagaatgttcgacagcaaaatttcgcttaaaactttacagatgtcgttaaatacgaccttgtgcgaattgttgttgtggagcagtttgtttatttttctggtcttatccaataattcaacactcatttccgaaaacctcctttactttctgatatcgtacgaataatatttgatcgattaaattgtaacacgatatttccagaatttcaagactttttcggataattaggataaatcgaaataaattgtcaagtccttatcaattttttgaagttcaaactgtctgaattgtatcatttgtagcgataattatgcagttcagtgcatttatcggcaaatttcactgtcagaagagacatttcacttttccacaccagctgacccgatgcctgcatcttcttccaaacatccgccgtatgcaggtttgattcacagctcttacaagaaacatccggcaaatgtgtctcgcacatcccgccggagcctttttatcactgccgttcatcctgtaaccggcaacagattattcagttgcagtctcttccttttccttcatcggcatcacaaaaccgcactgctcatttgcgcagacgagtttgtttcctttttccaccatgtagcttccgcattccggacatttctcagtggacggtttctgccaggacatgaaatcacagtccgggttggcctcacagccgtaatactttctgccttttttcgtcttcttgatgatgacttcttttccgcacttcggacacgggatgccagtcttctccagatacggcttcgtattccggcactccgggaatcccggacatgcgaggaacttaccgtgaggaccgtacttgatgaccatccgtcttccgcagacctcacagatctcatccgattcctcatccgcgatatgaaccgtctcaagcgttctctgggcctcatccaccgctgccatgagatccgggtagaagtttctgacgatcgtcttccacggggtcagtccctctccgacgctgtctaacaggaactccagattcgccgtgaaagcgatatccacgatgctcgggaaacactgcttcatgatccggttgacaacctcgccgagctcagtcacataaatatttttattttccttcaccacataccggcgtgcaaggatcgttgtgatcgtcggagcataggtactcggacgtccgatgccctgttcctccatcgcctttacaagcgatgcctccgtatagtgggccggcggctgagtaaagtgctgggcatttacaagatcggcaagctccagctcctcgcccttttccagcttcgagaggatctgattcttctcttccttctcatccgcctcgatatagacagacatgaagccgtcaaatttcagtctggacgctgtcatcgtaaattcatttccgcccgccatgatcttaacagaagtcgtctcatagacagctgcagacatccggctcgcggtaaaccgcttccagatcagctggtaaagacggaactgatctctcgaaagagattccttcaccttgacaggtgtcagagaaagattcgtcggacggatcgcctcgtgcgcatcctggatctttccgttattcttctttgaattctctcccgttgacagatatgcttccccgtagttctcagcgatgaattcgcctgccatcttctccgcttcctccgcgacacgggtggaatcggtacgcaggtaagtgatcagaccgaccgtgccgtgtcctttcacatcaacgccctcatagagctgctgtgcgagacgcatcgtcttctgggtggagaagtttaacgccttggacgcctcctgctgcatggtactcgttgtaaacggaagcggcggcttcttcgtgcgctcaccgttcctgatatcatttacgataaatttctgtccctttaaggactctaacagggcatccagctcggcacggctcctgatctctgtctttccatccttatctttatggaaatgggccgctgccggcttctttgttcccggtgctttcaacatcgcatcgagactccagtattcctccggaataaatgcggagatctcctcttcacggtcacagatcattcggagtgccaccgactggacacggccggcactcagtccgcgttttaccttttcccagaggatcgggctgatcttatagcccacgatacggtccagaatacgccgcgtctgctgggcatccacaagattcatatcgatatttctcggcgcctttaaggacgcctttaccgcgtttttcgtgatctcattgaagctgatccggtatacttttttatcttttacctcatcgagcttcagcgctttcatcaaatgccaggaaatcgcctctccctcacggtcagggtcagttgcgagatagatcttatctgcttttttcacttctttccggagtttcgcaaggatatcgcccttgccccggatcgtgatatatttcggttcataatcattttccacatcaattccgagctggctcttcggaagatctcttacgtgtccgttggacgcgtccacctcatatgtgcttcccaggaattttttaattgttttaacctttgcaggagactccacaatcacaagactgttcgccatatttttcacatccttctgcaatcattccgctttataatattgattcccggttccaaaaacaagtcccgcaagctccagctttaaaagggcttccatacattctgtcacagagagtccgctcaatgcggcgacctcttccagatgtctggggcgcgaatcaaccgaagcatacaccaaattttcgttcttggcaagcctattttgtgaaaatttatgaatcgttaattttctttcgtatttcatcccgaggaattccagcacatccgacgggcttaaaagcaggctcgcaccgccctggatcaggcggttgcagcccccgctcaacgggtcatttgcacgtcccggaagggcgaaaacctcctttccctgctccaacgcaaaatccgctgtgatcagcgatccgctcttctccctcgcttctattattatgaccgcatcagcgagagcgctgatgatccggtttctcagcggaaagtttattgccacagggcgggtccccgggacgaactctgagaggatgcctccgttttcctccatggcatgaaaaattttgtaattttcccgcggataacagatatttaccccgcatcccagaaccgcgtaggtgggttttccgcgctcgatcgcgcccctgtgggcacagccatccactcccgccgccatgccgctgataatgttgactcccgcattggcaagttccccggcataaaatccggccgcctccttcccatattccgtgcaggctctggcgccgacaatggcaaccgccgggacctcgttttccggaagatttccctttacgaaaagcgccgccgggcggtctttatatggaaggaaacgttccggatagtctgtgtctccttccgcgataaagcggatccccgtccgttccagcccataaaattccttcagccatgcagattcctgctctcttgcctgcaaaaagaccatcacgcgcttctctgtgagaactcccgctttttgtatttcctgttcctttgccgtccagaccgcctgatatgttccgaacctttcccttaacttcccgatcgtcgcactgccgaaccccgggacatggcagaggcagtaaaacgcttcccgctcggtaagtgtgttgtaagccatgatcttatgtacccctttcctttcattcatagaactgttccgcacccaaaaagttccggacaagcttcgttttcaggcattaattcccccagaacttctcccggcttttcacataggacaccgcctcgcacagatctgaaagccggattttactctcacccgcaagatccgccgtcgttcttgcgacttttaagatcctgtcatgcattctggcggaaagcgcaagcttttcaaagatctcctccataaaggtctcctcctccttccccagcacgcagtatttccggatatgccgccccgccatctccccgttgcagcggatgttttcctccataaaccgctctttctggatctctctcgcctgctccacccgcgcccggatcgcgccggaagcttcattttctccgccgcctctgacgtccccgtaagtaaccggggatgcctccacacagagatcgatcctgtccagcagtggtcccgatatcttctgtagataccgcgtgatctgtccctccgtgcaccggcacctcgcaaggtccggaaaatgaccgcagggacatgggttcatcgcagccacaagctgaaagttggccggatatgtcaccgtggcctccactctcgagactgtcacctccctgtcttcgagcggctgtcggagtgtctcgagtgccgctctggaaaactccggcaattcatcgaggaacaggatcccgccggtggcaagcgagatctcccccggcttcggtctcctcccgcctcccgtcagtgcctggaccgatactgtgtggtggggtgcacggaacggcctgatctttacaagcggctctttctccgtcagaagtccgctcacactgtagatcttcgagatctcgatgctctcctccacgtccatccccggcatgatcgtcggcattctcctcgcaagcatggtctttccggcccccgcaggccccacgaccagaaggttgtgctttccggcggctgccacctccgccgcccgcctaaggagcggctgtcccgataattccgcgaaatccacatcatagcggttcatcgtatcctgcagatccttcatgtttaccggcggttccgggcatatcggccgttttccggacaacatatccaccagatgtttcagatcccggacaccgtagagcgaaatcccgccgataaaggatgcctccttcacgttctcagccggaagaaatacccgtcggaatccgctctcccgtgcctgtgccgtgagcgccataacgcccgggatcccccgcacagtcccatccagccccagttccccgaagaataccgcatcctccaggtcctttgcctggaatcctccgtatgatgacaggatcgccgcggcgattgccaggtcaaagccggtcccttcctttctgaaatctgccggagacagattgaccgtgatcttctttggcggcagggatagtccaagattcttgatcgccgtccgcacccggtctccgccctcccggacctccgaggccagatatcccacaaggatcagccccggaagtccgtcgctgacgtccgcctccacggtcacgtttttcccctccattccgaggagatatatgctgttgatcttgctgaacaaaaaatactcctttccagtctttggttgtcatctcaccacctatagagataggagaatccttgatgttgttagttgaaatcatccctgaaatcgagaatattttcaccgtttttgataaaatagatatggtttaagaattttaagaatttagactgcgaaccttgtatccgttcccctctcacgcctgcagaagagagcggattccctctcgaatatggggcgtccggcggaggattccttcctatttccgccagccccatatgcatcgtcctcccaccgcgcgggcaaacacccaccgcgtggccttaccatttgagctttcatccatgttttcgccgtcattgacaggaatcagccctcatgctccccgatccactccaggatatccgcggatacctggtcgcggttgagttcgtttaaaagttcatgtctcgcatcttcatagaagccgatggagagatcctccgctcctgccttgtcgtatcgctcatagacgcggcgcacgccttttgtctcctctcccaccgggtctttgcttccggacaggatcaggatcgggagatctgtccgcatttttccggctttttcaagctttgccgtttttaagatcacctcaaagaagtcacggtacgccccggctgtgaagataaaatctgtcagcggatcgtctccgaaatcccggtctttcttttcatccctggagagccagtcatacggtgtcttcacaggtttaaatttcctgttgtaatttccgagggacatctcatagagcagtttgctccggcagcgtgttcctctctgtctgcagatcgtgtccgccagcagatagccaagccggacctccgcgtccttcggagctccggtcccgagtaagatcactccgtcgatcccgtctttatagacagtcagatatcgtctcgcgaaaaaagatcccatactgtgtcccagaaggaagatcggcacacccggatattttctctgtgcgtggaccgtcacgcggcgcatatcacggatcaccgagacggctccgccatgctccccgaagtatccgcggtcttctgccgccgctgcggtctttccgtgtccaagatgatcatttccaaggacatagatcccgtgtcccgctaaaaattccgcaaactcccggtatcttccgacatgttccatcattccgtgggcaatctgaacgatcgctttcacctcaccgctcgggatccactccatacagtgaagattcgcgatcccactgctggacggaatataaaattcatgaatttccatttttctccctcctcacaccagatctttttgccgtcggcaggatccgcagacgggatccggtctccggtcaggatcaatgccccgccagttttcatacgtgttcagcttatctataagtataacacgcataccgtattttccccaggaaacatctgttaaaatttcataaagtttatataaacctaaaaaagaatgtgccacggcacattctcgcgccgagcgcggtcgctcgcgacgatcttcatcttcgcgcgagtgcgcatcattggcacgtagtgcctttttgttcaacagggaagttccatcgaactttcctgttgaacaaaaaatcccccgcaggtactcccgcacccacagggaactttctgatttttatttttccgctcagtctttcttcatcagcttgaccataacagccttctgtgcatgaagacggttctccgcctcgttgaagatctcgtcggcatgttcctcgaagacttcctctgtgatctcctgtccgcggtaagccgggaggcagtgctggaccatcgcacctgcatttgcggctgcgaggagctgtttgttgacctgataatccttaaatactttctttctctcctctttctccgcttcctcacccatggaagtccatgtgtccgtgatcacgatatccgcgccggatgctgccatgaacgggtctatctccagggcaaatttatctgcgtagccctttgtgaactcaaggacttctccgtccggcttataaccgtccggtgtcgcaactgcaacattcatgccgacctttaagccgccgacgatcagggagtttgccatgttgttgccatcgccgatgtagcacatcttaagacctgtgaagcttccgaatttctcacggatcgtcataagatctgcaagtacctggcagggatggcagaaatcagtcagaccgttgatgaccgggatggagccgaattttgcgagatcctcgacttccttctgttcgaaggtacggatcatgatgccgtcaaggtagcgggataatacacgcgctgtatcctgaaccggctctccgcggccgatctgcaaatcttttgatgagaggaacagggcatgtccgcccagctgatacattcctgtctcgaaggaaactctcgttcttgtggaagacttctggaagatcattcccagagtctgtccctctaagtgtctgtgcggaatgttgtgctttctctcatattttaactggtccgcgagatccaggatcccggtgatctcctccgtactcagatccagtaattttaataaatgattcatgatttaaaatacctccttcatggcctcaagtgccttatcgatctcttcatatgtaatgactaacggcggaagcagacggatcgcgtccgttccggctgtcagcacgagaatgcccttttccatgagctttgaaacgtatccggcacgcttttccggatctacgatgatgccgagcatgagtcccatgccgcggacatttttgactgccggggagtggaatcccaggactttttccttgatgtaagcgcctttttcctgaacttcttttaagaattccggatcattcaccgtgtcgagaacgacatttgcggacgctgcactcaccgggtttcctccgaatgtggaaccatgggttccaggtcccatcacgtcggcacacgctgcagatgtgagcacgccgccgatcggaagtccgccgccgagtcctttcgccatcgtcacgatgtcaggggaaatcccgtactgctcgtatgcaaaaagacttccgcatcttccgatgccggtctggacctcatccacgatgagaaggatgtcatgttccttacagaactttgcaaccccctggacgaactctttgtcgagcgggagaacaccgccctcgccctggatcatctccatcatgaccgcgcagcaggccttgtccgcttttgcggttacatccgccaggtcatttgccttcgcatagtcaaaaccttccgtgaacgggaagaaatactgatggaacttctcctgtccggttgcctttaaggtcgtcacggttcttccgtggaaggactggatcagtgtcacgatcttgtttctccctgccccgtatttatcgaaggaatactttctcgcaaccttgatcgcgccctcgttcgcctctgctccggagtttgcgaagaagatctttcccatgccggttgccgtcacaagcttctcagcagcactcaccatcggctccgtgtagtagagatttgacgcatgcatgagcttttccgcctgttttgtgatcgcaccgacgatcttctcatttccatgtcccaggctgttgacgccgatcccggacgtgaggtccacatactcttttccgtctgcatcccagagcgtcgcgccttttccgtggtcaaggacgatgtcaaaccgtccgtaggtatgcatgatatattctgaatcttttttcttgatctcttctgcagtcattccttgttcctcctatgaaaacatggttccaacgccttcgtttgtgagcagctcgattaagatcgagtgcggcacacggccgtcctggatgttcgcacgctctacgccctgacggacgcactccacgcagcagttgaccttcgggatcatgccgcccttgatgacgccctccttgaccagggacggaacatccgaaactttcaggcgcttgataagtgtcgtgtcatcggacggatctcttaacagtccgcgcacgtcagtcagcatgatcagctttttcgccttcagcgcgatcgccagcttctccgccgccgtatccgcgttgatattgtagttgcaggtgtcatcgattcccgctgcaacgcaggtgacaaccggaatgtagcctttttccagcatatcgagaacaatctgcgggtttgtctttacgatatcgcccacatagccgtactcggtgccgtccggatcatttaatttgactgcctcaaataatccgccgtccataccgcttaagccgacgccttttcctccggcattttttaagagcgtcacaaggttcttattgagctttccgcagaggaccatctggactgcctccatggtctcctggtcggtgtagcggagtcccttgatgaatttggactcttttcctgtcttctttaagagttccccgatctccggaccgccgccgtgaaccagaacgaccttgatgccgaccagatttaaaagaacaatgtcgcggatgaccgcctgttttaattcttcattgatcatggcatttccgccgtatttaacgaccacgatctttccataataatcctgaaggtatgggagcgcctcaacgagaacgccagctcttgtttccggtttcagattttccataacgtttttctcccctcttatcatctatattacgtttctgactgtttcggactcgcctgcatcttttctttctgcagacagccattcctttttacagatttaatcctgccgtttcctcaaatccgagcatcaggttcatgttctcgacagctgcaccggatgcgccttttccgagattgtcgaacagcgccgtgatgatcgtctgatcctcatgtccattgaccacgatttccatgctgtcctttccggccatagttcccgccgcgatcatcggatcgtcccagccgaacggatggacttttacaacgttctttccatcataatgagctgcaagtgcctcatggatatcctttgcagtcggatttccctttaacatcgagttctgcagcatcacggtgactgccattcctttatagtagtcatccacgatcgggcagaacaccggcggaacatcaagtccgcagatcttctgcatctccggcaggtgtttatgtttcaggcttaagccgtagatcctcggggtattgtagagcgccggtttctccggagattcatattccgcgatcatcttttttccgcctccggagtagccggtcagggagaatacagtgagcggtgtctccttcgggatgatccccgccgcaacgagcggatagaccgggatcacaaatcccgatgcatggcagcccggatttgccgtatatttcgcgtgaacgatcgcatccttatgtgcgtcggaaagttccggaattccgtatgcccagccgggagctgtccggtgtgccgtcgatgcatcgatgatccttgcggaatctttttccacaaagctcaccgcctcttttgccgccgcatccggcagacagaggaacgtgatatccgcagcgttgatgagtttctttctctcatccgcatcttttctctttgcctcatcgatcagcaggagttcaatatcgtctctcaatgcaagtctctcataaatctggagtccggtggttccttcttttccgtcaatgtatacctttggcttcataatcgtttctcctctcggtcataatttgctggatcccagtcagctttccttccggtccgtgttaaaaaagggaccggagcttttcttctctgcatgtttttgtgggggcagatgcataaagctgaatattttctgaataattatgcataattataatcctatatgtatatttatgcaagaggttttttattcttttttgcatttttataaatccagagcgaacacatataaaaaacggcacaggatcgggtcccgcagtccggaaatttctttccaaacaaaaacagcacaatgatccttttccagaccatcatgctgttctcccgatcctgtcttttgtttttccatgatccggactcataccgtccgtttcactctccgtatccgaacgcctcccgcatgcgggcaaccgcctttttctcgatcctggatacataggatcgggaaattccaagctgtccggcgatctcccgctgcgtgtgctcatcttccccgaacaggccgtagcgcatccgaatcacctttttttccgtctccgtcagacgatcccggtatgcctcatagagtatcttcacatcctgtccgatgatgaccgtctccagcacttcccggtctccggattccagaacatcaaacagactcaccgtctccccgtctttatccgcaccgatcgggtcatagatggagacttccctggagaacttcttccccgaccggaacatcatcaggatctcattttccacgcatttgacggcataggtcgccagtcttgatcctttttccgcattaaacgtattgactgccttgatcaggccgatggttccaactgacaaaagatcgtccgtctcatatccggactgctggtattttttgaccacatgtgcgaccagccgaaggttccggctgatcagcacctctctggcttccaggtcgccctctttgcagcgtcttaagtattcccgctcttcctgcgcgctcagtggtttcggaaatgtcttcaaagaaagccgccttaagcttcattactttattttatgcggtggacgcgcggcgggtgcttttacatcttttccttattttctccgcttgcggccagctcatatcccagctctcttcccagtgtctgggcaatgtccttcacctcacaggctttcagcactttctgcctgcaaaggcataaaggttatcatctctgtaccacataccgcccaaaatcaaaactgttatttcttcctatatggaacagttctcctgccagaagttcttccagtctctcctccggaacctcttcgaagatcacatatccctgaactccgcttaattccattccttttctgtgcgtgctggaatatcgtctgaccgaggtctctgccgatctcgcgtcgatgatctgcggccacgtctgcggtttttccagttctgtcccgatctcatcgaaggcgctcatcatctggatcttccggtggatcgcgcgccagatcgcttccgcatcaaaacatttcagatcgatccggtccttccgcagtgccaggggtctcaggaaatgaaccagataatcgccgttctgcgccggctgttctcccgaaagttcccattttctcttccagatatactctccgaccgtgtgtacccggaaatgttccatatggatctctgtatcatccaaaagcagctgctcttcttccgtgtagaccgccgcgatctcaaacttcgcctgttctttcccgagtccgcattgtccgaggcgccagaacgcatccagatactgggcgaacagcgggatattgcgcccaaaaagcttcaggcggaacacgaacccgtgcccctcgtccatcagcgtatccagattgtcgcattcgatcaggtacccaagactctcctttcccgtcacatacccgggtttcagccgcatcggtgtgtaaaaggcattccagaccatgcagttgtcctgaaaccggcacgcttcacagtcccggtccgcaatgcagtttttccggagcagcatctccccaagacctcctcgcagcgcggaaaccttgttctccggcaccgcgactctctgataaaatctcagacaaaacgtcagcgtgatatacgggatgtccatccaggtcatgttttcctcattttttctcatatcgttactcctaatttctggtcatatttcaaaacagccagtcatttttgctgcttcagacagaaccctttagtattccctgaactggataaactgaaagacgctcttcttctccgttcccgtctttccatatacttcctccaccacacgttcactgcaggcagcaacaacccgtaccccggctttcttcagcctttcgatcacatgatagctgaggcagaattctccctggcacatcacgcattccggctgcttttcaaggatcatggctgcatagtgttccgccagatcctgaacctctttcttgtctgcatgggcgctcaccgccgggaaaggcaggtcctcgatcagtccgtacttttctgcttccgtcttctgtttttcgccccacatgctgctcggatgatttgaaaaatttataaacatctctttttctccttctttaaccgatatctcctggttccggatcggaactctgtacttacattgtagtataggaatttcacaaatatttgtcaaatgcattcctggtttccaaattacccgcacacggttcctatccattttcccctccacttaatttataaaactaattttttgtttctttccctatttatctcgtaaaaaacttgcataattatgtattcagagttataataataaagctttttataaaatttttatatttttcataaaagtataataattcatgcacaaaatcaatattagaaatgggaagccgaatgcaatacacaagagagtccgcgatcgagcggctgttaaaaaactacgaacctttttacgatattcatatgatgatcgatggcgatcgctctccaatcacagcccgctgcgatttttttgagcattccggccagtatgtcatctcaaaaaaggcagaattatggtccgcggaaaacgaggaatttctctatctcgtcaacattccgcatctgactttagagaccttcgaggaattaaaatccgagatccatgctgacggcatgaaacga

SEQ ID NO: 1997 - DNA, 30358 bp, Unknown
  gut microbiota DNA sequence
tcatccgctaccggaatcatcagtacaatacatttatgaccacattatatcccttccctgcgatcagcgcttctcaccttctgatatgcagtatgtcgcgcagatcttaatggattattctgaaaatttcacgagataaatatgcaggaacaacgaaaagcttcaaatgcaaaaaaccagataccgcggtatctggcttcttgctgtagacgaaaaaatcccccgggggaaaaccaccggaggatctcataattcttaattagtcttcaactttaacgatttcacgcttgttgtagctgccgcatgccttgcatactctatgaggcatcattaaagcaccgcacttgctgcactttactaagttcatagcggacattttccagttcgctctgcggctgtctcttctcgctttggaagatttattcttaggacagatagacatggttacacctccttaaactgtttgaaaatatcctggatggctgccatccgcgggtcaggaacccatgtatcacagccgcaatctcctttgttgagatttgctccacatttgctgcagatccctttgcaatcatccttgcagaggatcttcataggcaggtacaacgataattcgttgcaaaccagcatatcggcatccagattataaccagataaataagattgttcatccaagtccttcactctgtcctcatcggaagcattcatatcgatctcctggtcgaactcgatgtctgtggtgtaattcaccggttccaggcatcttgagcagggaatcgcaagagtcacggaagtatttcccgtaagactcagtttcctgtttccaaggttttttacagtgatctttaccgggtccgcagagaccaccgtatactcaacttgggaacccttataggctttcgcttcaaacggaacttcccatgtcttctctttaccttccagagtaaaaacttcagataaattaatcagcatattacgtttctcctaatacgcactaagatattatatattaacaggaacaatttgtcaacaatttttctaataaaatattaaattttaaaagctctgtttttcatgcatttccccattcaaaacatgttcttgtgacaaattcttaaccgcgccagagcgcgcattaagagcaccagggacgaaatattttcgtacctgtgagaaccccagcgtatgtcgtgagggctccaaagccgtcctgaggccgttaaaacctccagacagcacagaagccaacccgctcatctcctgctctcacagggttctgaacgggtcagcgtcattgctaatcggttcaccgtgcagatatctgcacggacaaactgcccaaaattattttacgagagccagagtctctcttgcgatcgcaagctcctcatttgtcgggataaccataaccttaaccttggaatccggtgtggagatcacgatatcttttcctcttacgctgttagcctcgtcgtcgatcttgatgccgaggtaggataaatgctcgcaaacagcttttctcatggacttgccgttctcgccaagacctgctgtgaatgcgatcacatctacgccgtccatggctgctgtgtaagcaccgatgtacttaacaacgcggtagttgtaagctgcaagagctttcgctgcgcggtcgttgccagcctcagctgcttcctcaatgtcacggaagtcgctggatacgccggaaaggccaagaacaccagacttcttgttcaaaacgttcataacgcctgcgatgtcaaggttctctttcttagcgatgaattccatgatagccggatccatatcaccggaacgtgttcccatgataaggccctcaagcggtgtaagacccatgcttgtatctacggatttgccgttctttacagcggaaaggcttgcgccgtttccaagatggcaaacgatgatctttaaatcctcgtacggttttccagcaacctcagcagctctcttggatacgaagctgtgggaagttccgtggaagccatatcttcttactttgtacttctcgtagtactcgtacggaaggccgtaaaggtaagcctcctccggcattgtctgatggaatgcagtatcgaatacagctaccatcggtacgttcggcataagctcctgacaagcgcggataccgatcaggtttgccgggttgtgaagtggtgcaagatcgttgcactcttcgattgctttcatagcctcatctgtgatcactgtggaagaagtgaacttctcaccgccgtgtacgacacggtgaccaacagcaccaacctctgcaaggcttgcgataacgccgctcttcttgtttgtgagagcgtctaataccatctggatcgcctgtgtgtgtgtcggcatcggggaaacggtaacttccttctctccgcctgccggctggtatgtgatctggcttccttcgataccaattctctcgcagagaccttttgcaagaactgcctctgtatcagagttgattaactggtactttaaggaagagcttccgcagttgataactaaaatattcatgacagataaaactccttgtgattataaaatagaatctgtgtcttccggtctccggaacgaagactggatattacagttgttgccaaaaagggaacgccgtttcctcttgatcgattttgcgtcgttccccattgttgttaagtaattatagattaagccatctgagcctgtacagctgtaagagctactacaccaacgatatcctcagcggagcatccacgggaaaggtcgttgaccggtcttgcgataccctggagcatcgggccgtaagcttctgctttggcaagtctctgaaccagcttgtaaccgatgttgccgcagtcaaggttcgggaagataagaacgttagcatgacctgcaacttcgcttccttttgcttttgcttttgctacggacggaacaatcgctgcatcgagctgtaactcgccgtcaaggtcaagctgcgggtacttctcgtttgcgatctttgtagcctctacaaccttgtctacaagagcgtgctttgcgctgccctttgtggagtgggaaagcatagctacgatcggcttctcaccaacaagtgcacggaagctcttagcggagctgtcagcgattgcagcgagctctgcagatgtcggatcctggtttaaaccacagtcagcgaataagaatgtgccgtttgcaccgtactcgcagttcggaacgtccatgatgaagaaaccggatacaagctctgttcccggagctgtctttaagatctgaagagccggtcttaatgtatcagctgttgcgtggcaagcacctgcaacaagtccgtcagcgtctttttcttttaccatcataacgccgtatgtgatgtaatctgtctttaagatctcctgtgctttctcgagagtcataccctttttctctcttaatttgaacagggtctctgcgtagtggtcaaacttcggatcagtatccggatctacaaccttaaggccagtaaggtcaacttccagccagtgagcaccatccatgatcttctcctcttttccgatcatgatcaggtcagcggtcttctcctttaatacctgtgctgcagcaataagagttctcttatcgttgctctccggcaggatgattgtcattacatcctgttttgccttttctttcataagatcaataaatgccatgatgattgactccttcctcaatataggttttcatacgtatttttattatatcgcagctaaatactggatacaagactatattctccaattttttgcacttttttcagtacctctcgttaaatttaaaacaatgcggcaaaaaacgggcgcatcggaagtttgaccgagagcagctgtctgcctaccgggaaatctcatcgaacgttccggtaacaagtgaaaacacgcttcgcgagtttccccttgttatcgcgacagtcgccaaggtctcgcgcaagcacggactttggctcgttgttcgcgtaagcaaacagctccggtcgaccaggaatactgattgccggagctatttgtatcttttatcttttctctgcaggaccgcagtcatatttattgttcacattgctgcagcagtctctgtcagtatcatttttcggtcagatcttctcataccgctcaacatctacaacaaagatcgtcgcaccgccgacatcgaccgacatcggcattgttgcgcagtggaccatggaggaaccggatacatacggcatattgatcgtgatcttctggtggtggccgcactcctttttaataatatcgatcgcttcatcaacccgcgcttcttccgtcacgatcatcagagtcgtattcccttttttcaggaatccgccggtcgtggaaagacgggtcacactgaatttgtgttttgtgagtgatgtcgtcacatcgtcctcgttgtcataccggataattgcgtagatcagtttcatatagcatccatcctttctgcgtcttatttcgaagattgcggtatgcgccgcaaagatataactataacactaaggcagccgctctgaattctttctgatatttttgaatattcttatcatcctggaacaatcagtctttcacacgctgcttagtcgcagtatatcacattttttctttgagaacaataaatattgcattaagattttgtttcgactatgatattagataacgaatgcaggcaaatgatctgcacaagttgaggagatctactatgaaaacagctgccatcatttcagaatacaatccattccacaatggccataaatatcagattgaagagacaagacgccggaccggagccgatttcatcgcggtcgtcatgagcggtgacttcgtacagcgcggggccccggcaatctacagcaagtttctccggactcgctccgcgcttctctccggcgctgacctcgttgtcgaaatgcccgttttcggaagtctgagcgctgcccaggatttcgcacgctgcggaatctctttgtttcatcatatggggatcatcgatgtgctctccttcggcagtgaaacaggggaaatcaaaaaattgcaggaactggcagaccaagccggcacagagacggaagaacagtcggatctgatccgtaaaagtctccgaagcggccttacctacccacaggcactggctcttgccagaaaagattctgttcctgtatcgcccaacgatatccttgcggttgagtacctgaaggcattaaaggaattttcttccgctgtcgaaccctggaccctgaaacgctccgatcccgggtatcactccgaagggcgggacggctctttcgcttctgcaacagcgatccgaaaggcgatctctgcgcaggatccggattttctctcagctgttctcccggattcccactttgaaagtctgcaggccgaatccgaggttccattatttccggatgatttttctctcctgatagaacagaagatcctgacttccactccggaaaaaattcagagcatttccggtatgccggaggacctcgccgcaaagctctgtaaaaaccgtctggaatttctccggaccgatgcactgaccgcagccagaaaagaccggcagtatacttacgcgaaggtcagccgcgctcttatgaatctcatgctggatatcacagacaaagaccaaaggggatttgctgcctgcgattacgctccatgggtccggatcctgggattccgaaaaacatccgcagcacttttatcggaattaaaaaagcattgcgatatccctgtcatcgtcaagaccgctgatgccaaagagattctctccccggaagtctatccgctttttgagaaaaatctgaccgcatctgagatctgccggatggtgcgggagctgaaatcaggaaaggtacaaaaaaacgaatttacccgttcgccgatcatgatcccgtgaactatatcggcaattgaattaccgcgcatctgcattttagatcaccgtatctacgatgtagatgcttctttttttccggttccttttctccgcatatttggctgacacttcttccgactgcgacggacattggctggaatagctctcttcctgccggatctgctgtcacgcacgttttcagatcacgccgtccaatattctgacactgcttcccacgccttcccgaccgcgtttttttgttatcacgatctttttttcaatcctgtctttcagctccgcaacatgagaaatgataccgacaagtttttttccgtccgcaagatttcccagtgcctttaccgcctggtccagcgcatcctcgtcaagagaaccgaatccttcgtccacaaacatggcatccagctggatcccgcctgccatagactggatctcatccgaaagtcccagcgccagggaaagcgaggcctggaacgtttcgccgccggagagcgtctttacactccgctcacttccgttatagtgatcgatcacattcagttccagtccgctcttgtcctttttgttccccgatgtctcacttcttttcagttcatactgaccgctgctcatcgtcatcagccggatattcgcccgcctcaggatccggtcaaaatacgccatctggacataggtctcaagttcgatcttccgctttccattcagtgtcccggctgccgtgtccgcaagtgagtggacccagatatattcctgttctgtctgttccatgagattctgccaggtgcagaccttctcgtagatcttccggttgttctgtaaagccgaatggagctgttcccgatgttttaatgttcctgtttttttcgtctccaggcgttccagcatctctgagagttccgtttccttcagctcttctttttctccgatctgtttttccagtgcttccaccgcagaatccaggctcgccatatctctctggtatttttccattttagctttcgcgctgctttcttccagctccagctcccttttctgcgttttcatcattttcaggttttcttcgatctctgccgcattttgcccttccagcctttcctgaagctctttcacctgcaccttcagcattgacagggatgtcaacaggttctgctccgacaaggcaagcgccgtatttttttctttcgccgtctccagagccttttccagcttctttattgaatcttccagcgtttttagctgtttcagctgttctgcattcgatctgatatggatttccagttcacgaagttcttcctctatctttgttatcgccagccttgctgccgtcatacactccgcaggatccgatatctctgatatcctgttatccagatctgctttgaaaacggcaggaagctccactatcctctttatctcgagatccagattttcttttaagtttccggctctctcgctcagcctctcagacttcgctcctgcccgttcagcttccttctttcttagtttcagttcttcctgatccgggatctcttccgaaagctcagcaggagccggatgatgacaggaaccgcataccgggcaggggattccttcctccagatcctgtgcaagaataccggcctgggcattcagaaacagtgtttccaggtgtccataccgtatgcggctctcatcacgcagggaaattgagattgcgtactctttctgcacatctttcaattccctgtaagtcgactcaagccgctccaggtgttcttccagttcctttttctgtcgcaaaagtgcttctttcgcatttgacagctgctctttctccaccggtgctctggaaatcttctctctgtccccagaccggttctccagttctgtttgcagaagatccgtctgttcctgcatcgactttctatctgtctgaacgctcaaaagagtctgttctttccccgccgcttctcctcttttctgatccagttccagaaatctctgactttccagttccagtttctgaactttctttgccagttcttcgcgaagctccgactttttctccacttttttccattctgcaagagcctcttcgcactccggcttcagccgttcccgttcctgttttttattctccagttctgcctcgatccgtctgatctggaccgcctttccctttttttcatttaccgcgcggatctgcttttccaggctctgcacggatccatccagcgtttccagatgtaccttttctttttctgtctcactgcgcagcagctcgatcccctgcactgtttttccttcaaagtgtaccttttttaaggaattaaattcctgttccgccgccggatcttcctcaaagcaggcatcctccaagtactgggtaatgctacgacgcagatcatcataatcttttcgtctgcgcttttcctcgtcccgcagacgccactggatctcctgaaagatctccgtgtgaaagatctgacggaagatttctccgcgttccgcagtccctgcgatcagaagtttctggaaatccccctgggcgatcatcgcaatctgagtaaactgtttatagtcgagacccatcagctccgtcacagcctttgtgaccgcgcccatctttgtcacaggctgacgtccgtcgggatagatcagttccgcatccgcttttttcgttgtaaatccggttcctcgctttttcgagcattcatattccggatttcttctgacgatatattcttttccctgataggcgaaagtcagctccacaaacgtctctgtctctgctttcgcatatttgctccggaacattccggcttcccgcacagttccgcttgcctcaccgtacagggcaaatgtgatcgcatcaaagatcgtcgtcttaccggcgccggtatctcccgtgatcaggtaaagaccgtgttctccaagttgttcaaaatcgatcgtgttctctcccgcgtatgggccgaaggcactgatcaccagtttttcaggtttcattcttttatctcccggatcaattgttctgcaaaatccttctgctgtttcgtcataggctgattattctgaagttcatagaactcataaaacagttccatctctgtctttttttctacggcctgcgctgcatcgacctcctgagtggtttttgtcctctgattgtcatacaaaagctgcatgatattcgggtagatcacacgcagtttctgaagaccgtccggcacatcatcctcgtccgtcaaggtcacctggatataatcttcacggttcatatctctataaaaagaacggtcggtaagttccagataagtgccccggagcttcctcatatcccggagaggttttaacggcagcaggctggtccttactgttccttttttctccaactccacgactgtaattgatttctcctggtccacctccgaaaatgaatattttaagggagtcccgcaatagcggacccggtcagttcctacgttttgaggactgtggatatgtccaagtgctgtataatcaaacggtgtaaagaccgctgcgtcaatgttgtcgagaccaccgacctgaacatcctccgactcgcacctgaaagctcccgtgacaaactggtgtgcgacaaggatgtttctatccttcagatcgatctccatatggcggatcaccgtctccgccgcagtctggacatccgttaccagatccgcctcattctcaaatacatgccgcacagtcgaagggcggataaacgggagcaggtggatccagactgttccgtattgatccttcagcggaatcttcgtgacactcccatcatatacaggcgaaaggtagatcccccggctgttcaacagtcttccgccgaaagccagccgttccgccgaatcatggttcccgctgataataaaaacaggaatcgctctcccggcaagccttgtgataaattcgtcgaacacctggaccgcctccgcggacgggatctgcttgtcataaatatcaccggccaggatgatcccgtccggcttttcttcatccgccagatcaagaattcttttaagaatatatttctggtcttcgatcatcgaaaactcattgactctctttccgatatgaaggtccgataaatggaataatttcattggttcctcctattgctctctcttctgctcctcttattgtaccgttttatcccggcaatagcaagcaaggaacttttggccgccggtcagctggaatgcaagtattccggagaaagaacaagatccccggacatcattctgcccaaaggatctcgtttgcagcccggagagtctttctctccgcatcctctcttctgtatctttctgtcttatatcatcactttatatacgggtttcccggcgtctccgcataatactccacggaaatcatatcaccggcacggagttcgtcagaaaccattccgttgatcagtttcagctcatatacatattcccgcacggacataccggaatgatgataataagtttttgcaacagaccagagggtatcgcctttttccacctcgatcgtcgtataatagcggttatagacggcatcatcctcgtcttcattcgccataaccagggtctttccaaaaaagcaggacatgatcatcacgatcatcacaagagcgatcaaatacttcttcatattggttcctcctttgtattcagtaagtgcaaactcatgttcgagaacatctgttctggtttagattctatcacgcgaacatatgtttgtcaattctttttctccattttttcgaacaaaggtttgctttttttcgcagtttatgatactatgtatgcagagaagaaatattcttttgcagattattacagcggtcgtcaaatgtctccccgtgtatgcgcggttgccattttcctaatcgccgtgacgaataaaaggaggggtctcatgagtcagggaaaaattactgataagcagaaagaaatacttgaatatataaaagaaatgatcttaaagaagggatatccgccggctgtgcgcgagatctgtgaggcggttcacttgaaatccacctcctcggtccactcccacctggaatccctggagaagaacggatatatccgccgggatccgacgaagccgagaactatcgagattctcgatgatgatttcgctcttacaagacgtgaagttgtaaatgtgccggtgatcggtacggtcgccgccggaactccgatcctcgcggagcagaatatcgaagattatcttccgatccctgccgaaatgctcccgaataaagaagtatttatgttaaaggtaaaaggaaacagtatgatcgaagccgggatctacagcggtgataaagtcatcgttgcaaagcagccggacgccgagaacggcaataaagtcgttgcgctcgttgatgactccgcgaccgtaaaaacgttctacaaagagaacggtcacttccgtctccagccggaaaactccacgatggacccgatcatcctggatcacgtaaagatcctcggtaaagtcatcggtcttttccgcatgatgagctgatttgtttataacaaaagaaaaatccccggcagtccgctgtgtttttgcagtggaactgtcggagattttttcatatcttccaggctgtgctcttgcgctgttgtccctttccctatttcgagaataccaggcgaaatgtcttatgcccgaaatgagatgcagccgtttgtcgggttaaatattatttcatgatcttccaatgtatcatttactcctatagagctcggcaaaccagaatctgcgattctaatgtttttgctttaattcataggacggatgatataagccggttggttcgtaaaattcgtcaccaatatagtgaaaacccagcttacgcaaaacctttgcagatgcagtattatgaggattctgtcctgcaaacagtgcgtctgctttcaaaatggaaaacgcgtagttgatgacagccgatgcagcttccactgcgtagccttttctccagaattgcggaagcagatgaaacccgatctcatattcattcttacgatatggtcgcaatccgcagcatccaatcaattcatcggaagacagcgtaaaaataggccaatcggtgcgtatatcttgagcacctttgacactgtatttcggttccccgtaatacaggtatctggcagcaaattctcccacggtaaggtatccgtttgaattgtagagccgtataatccagctgtatagcagttctccaggatacggctggaaacatgtcggcatggttattgcattcatgtaatcttccctctttcatcattattttttgtgaaagaattatggaaagaaaacgatttgttttggcaaaaaagaagcacggaccgtgatgatccgtgcctcctgtcgtaagtacaaatgctttatattttgggaataccgagcgaaatttcttctgcctgaaatgagatgcagccgttcggatgaaaagtgatgtgttaagaatgccaggctggaatcttcgaccatttcaggtgcattgattatgtatatgtattgtaatataatatactataatcaattgaggaggtaacctttatggaaccaatgggaaaactgtcaaaagcatcctacacaaatgcagagaaaatcagcgaggtgtccgctgcgttaagacttgaaggtatgcatttggacgatgatgatatcttgatgatgcaggaagtacaacgtggagctctcagttttgaccaggcaagagaacggattttaaaagaagtgtgatttcacaagctctcccaaaaactggaatctgttttccatcaaaatataaaatgtactgtttctccggaagacaaaatatttgatatgtgttcactgattgtggcatgtttaacttcaaagagaatttccatttgcttctgtgtcaactaaactgtttcctgttccgggcttatctgaacttctatattcacttcgccgtctgtaaataaaactaactcatttttcatttctattcttctccgaacactttctttaatacctttggcttcccggtcctgcggtattcctgttccacttcggcccgctcctcctgcgtcagttccatcgataaatccagcatcaaggaaagaccgtagatatccgatttatcgacccacggcacagcctgagaaatctgagtaagggagaagccgtgagtgatcatattctaatcgctttcacaatacgaagcatcggatgagcggtctcgcggatctcttttacccatttcttccgcttttcctcaaattcttccatggacatatccataaatttgccatccttaatgtccgtgatgatatccggatactttttggttccccagatatccagatatgagcagcgggcttctaccggagtgaacagcacctccagcagatactccaaatcgggatccgcgtccactcttgaaccaagccccaacccgatatcatggctttctttggagatcagttcttccagtgtgtcgtacaaatcaaacatctcatgagtgtccgggataaacatagttttccatcatatgagtttctcctttccttccagaacaatagattttcttccgtattcttcgttttccagttcaatcgcatttgccgaagtttttattgaatccgatcagatatattttttgatccattgatcaaggaatgccatctgattgtccgtgtgaaaccaatgttccccgcctttcatgacggtcagtgtggcaccaatctggtctgcaaaacaggaaatggtttcataagatgtcaggctatcccgatccccgtacaaaatgtgtgtcggaacattccacgcaacaggatgttcttttacataacaaagatattcccatgaaagtgtttcaccgaacgctgtcgggatattcttcctgcacttaagttcttcttccgtaacattggcccacagcatcatatcagaaatcagctttttcatgtctacgactggtgaaataaaataagctttgctgatttttttgtccgttaaagcgttcatggaaaagaaagctcctatgctgttggcaatgatttccacaggctgagcattccggcagaccgtgtcaaagaatttcggaaattctttcctggcctcccatggtgtctgcgattcataatcaaaaccaatgacatcacagttgccaaaaagcggcttataatgaatggcttcttcggcattaccgcctttgccgtgaatgtatatgatagtttttgccataaaatgattctcccagtacgttcaatttattctgtctccagtataaaccgccgcacggactgcgtcaatcacacacttgtgtataagagaaacatagaatcccacgcggcacttcggagacgcaggttgagtgtgtaattacggcactccgcctgctgtcctttttacctgcattatgatagaatggacccataatgatcgaacacgcaaaggaaatgatgggtatgaacattgaattaagaaaacttctggattcggatatggagacatacttcgaattggaaaatgaaacatgggtaaacaagcgcatgctgcaggacgaagaagcgaacgaccgatcatggaaagccatgtttgccgataccgaggctcattatgccgttcttatgggcgatcagatctgcggatttgcttccattctgaaactgggcgaagaagttcaggaatttgggctggaactttttgaaagattccgtcatcaggggattggatatgccgctttggttcggttactggaaatctgtaagaatgaatatcatgtgaagaaactccgcagcaaggtatacccggataactttccaagcattttgcttatgagaaagatcggcggtactccctatgaaatcacggagaacccgtgcatcgaggaatctttacggacagagtttcaaaaagacaatgctgaactgatttcggataacgtgaaaagaatggcggaactctttggcgttgaaccggagctgctgctttccaatttgctggtatttcagatcccgctccagcctgcggaaatacgtttttctctttctttgaccggtgatctcagttatgagaaaaagatagaaaccaaagcaatcaaccacatgtatcaggaaacaactcggattctgaaatccatactggaaaaggcgaaaaacggcacagaagaagattttaggaaagaaatgatggatatgattgaaaatcttgaatcgcgtatgtaatacaggacgaagttttgctaatcatcgatttttcaggtaaagaaaaagcacggacgctgggttcgtgcttcttctttgggtaaattgttgagtttagattgttggaatgaaggtgccgttgttccaggtacctgctcgttttgtgaattcaggatgagaccagtatcctacaaacatattttcaaaatcggatacatttgtaatgtcccagtgtttgatgccgctttcctgccgattctgaaagactttgcggagatcaccggttccagactgaaaatccagcaaaacccgtggcatgacatcacggcaactttcagcagtcagtgcggcatcgatattacgccgagtgaaaagagaatgcgtatggtcatctcggccgccgatcatatcagcatcaataaacagactgattccgaccgggtggatttttctcttatcttcggttttccggatgatgcagaataagaaacaacagggatgtactgatcaatctaaatccgtcatccctgttttcgtatatatgattccatgatatcttaggctttaatcccggtaaatctcccatgaaattatgattccggttcatgtccggtattcagagacaattctttttccataacctgtcggatggaattcgatggtccgaactcctcatacatatccgccaacagcagtttcatatcttcatttggaatacaggagtcatcctgtctgaaacggtaaatgctgtttctggtagtgagtttgatgatgccgccatcttccgtctccaaatctccaggtgacgttttcaaatactgtcctggaaagccgcttgccggagctgtgaagaaaacaaatacaaactttccgggacgcgaattggattcatagatcatgagcaggccggaacgatcaatatacggcgcccgccaatccatatatgtctctccttccctgttgcctgctccacacaggtatcctttcttatgttcgatcaggtgcatgttgtctcctcctttgccccaaggaccaaaccagacgatgatggtgtttggatggttgttattgctgttgggaatgaatataacattacggattggaaaatacaagtgcttctgtaaaattcagagtgttgcatccagcagatatttttcgttcgtgttcgcgatataaaaggaataaaaaacagcgttttccaatcctatgttcaggatataaaaggaaaacgctgttgtggtttcagactgtcttgttcgcgatctcgcgtaaattacagatattcagtttaatacgcttgttcgcgatagtttgtaaaacataagatcatgtttttgactgcttgttcgcaaaatgaaaggaaaaatttacactttccgaacctcttgttcgcgatataaaaagcatgttcgcgaaatcaagggaaaactacatctctcctacagctcgtccaccgactccacgatctttccgtctctccagatcctctcaagatcatagaacagacggtcttccttggagaatacgtgtacgatcacatcgccgtagtccatgagcacccatgtggagctcatgctgccttctttctggtggcactcgtaacctgccttgaagagcttctcctccacgttatcaactaatgcctgtgtctggtttgcgttggaagcgctcgcgagaacgaagtaatccgcgatcacggaaacgccttcaatgtcgataatttttacatcttcgccttttttctcttccaaagcctcgactgcaagctttaccatttcttttgactgattcaactgattgttcctccttgtcttgatcggtctctccggccgcgccggctgtctctttctgtttttctgaaacgacacggcgcatatcctggcaggccgcctccgtcatcggatcgatctggcacccggtgctcttcagatactcgagaatgctctccatgatctcaaagcatgcctgatccaggtcaataaaggcaagcttccgcatttcaggaagatttgccgccttggaccgtctcggttcaatataatccgccacatagaggatcttgtcgagcagactcatgcccggctttcccgtcgtatggcaggtgatcgcgcttaagatctccggatcatccactccatatttgttctcagccatccacgccccgagtttcgcatggagcagggacgggtcgcgctcttcctcggctgtcaccgggatcccgcggtccagacatttctgaagcatgaccggattttcaaaacgttttgccgaatcatgcagaagtcccgcaagatcggctttatcaagatcgtacccataccgcattgcaagcgcctgacaggtaaattctacgccgagcgtgtgctcgtaccggtacgcatcgagttttttctttaaatgttttctgatttcaggtacccgactatccataatgaatcttctttctgaatctgccccgccgggatatctcccgcatgggtctttcgttttcacctgttttattacagtcaggagcaggactgtctcctgacagtttacctgcctctatttcctgtacaatcccgtatccctgatgtaatttgcaacggcttcgggcgtgtctttcgagaggtcctcccccagcgccgcccgtttccggatatccgcggacgcttcctcgatcttcgggttgtggaggatccggatatcagccccatattttttattgaggtaagaaacctcatcttcaagggaaacaccgccgtcctcgtatgtccttccggagaccaggagtaccgcctgtgccatcacctgttcgggatgataccaagattccagctgatacagggaatctgccccgatgataaaatagacctcgatatccgggtacgcttccttcaaaagcgccagtgtctgcgccgtgtaggtatttccttcgcgtcccatctcaaaatcggagaccaaaaaatacggaacggattccgtggcaagctccaacatccggatgcgcgccgctccgtctgtgatatgatgatcttttttgtgcggcggaacatgagacggcatgaaccagatctcatccagcccatactcccggtaagcctgttctccaaggagcaggtgtccgttatggaccgggtcaaatgttcccccaagaataccaacgcgtctcataggatcctccattaccgacaggattatcgtttttcctgttcttcccgttccgcagtccgtgcggagatcactttcgcaaatttccggcacaaagcggacattcaggaatacaggtatttccgcggcaattacggaagaacgatcttccggtctttctcttccttcgccggtttgtacagaacgatcatctttccgatcacctgtacaacctcagaatgagtacgctctgcaaggatctgtgcaaggtcttttccgtcatccgcacagttcttcaaaacatggatcttgatcagctctctcgcgtttaatgcttcctcaacggattttgtgatctccggtgtgaggctggatttaccgatctgtaaaacggcatccatcgtcattgcaagtccctttaaataggaacgctgtttgcttgtcataataactccttttcatatatggaaaagcgcggctccctggatgttcccatgaaacgcccggggaagctccggcgcattatttatagtaatcaaatacgagtccgtacatgcggacggtatcgccctcctggatccccgctttttcaagatctgcaaggattccggactgctttaagaatttctggaagaagtcaaagcctttctcggaatcaaggttcgtgtatccgagcatcttctcgatcctcggtccctcgaccacgtaaatgccgtcctcatccttctcgaccgtgtacggaagggaacgatcgccgacatactcgatctcgaactctttctcgaatatcttcggtgtgcggtctgtatttttgatcacgtcatagagataatacagaagttcgttcacgccctcgccgctgactgcggagattccgaataccgggatccccatcggctcgaactctttctttaaatctgcaagcggatctgcgccctcatcataaactgcatccagcttgttggctgcgatcgcctgcggaagctttaaaagctccgggttgtaggcggaaagctcatccatgatcgcatgaacatccgcgatcggatcacgtccctctacggaagccgcgtcaaccacatggagcaagactttcgtgcgctcgatatgacgaaggaactcatgtccaagaccggctccctcggatgcgccctcgatcagtcccgggatatccgccattacaaagctgttcccgtcaccgagatttacaacgccaaggtgcggattcagggtcgtgaaatggtagtttgcgatcttcggtctcgcattggaaacgcgggataacagggtggattttccgacgttcgggaatccgacaagtcccacatccgcgatcacctttaactccagctgtacccagagttcctgtcccggctgtcccggctgggcatatttcggaacctgcatcgtcgctgttgcgaagtgcatatttccgaggccgccctttccgccctttaagatcacttcacggcgattttcgccggacatatccgtgatcacttttccggtttccaggtccttaacgacagtaccttccgggaccttgacgatcaggtcctttccgtcagcgccgtggcagcggcgttttccgccttcctcgccatttccggccgcatattttcttacatgacggaaatctacgagcgtatttaatccatcatccacttcgaagatgatgtctccgcctcttccgccgtcaccgccgtcaggtcctccattcggaacatacagttcacgccggaagctcacatgtccgtttccgccgtttcctgatctgataaatacttttgcactgtctgtaaacatggaaaaccgtcctctcaataaatcttttgtaactactcagtatcttcaagcctgtgtcttattacggtcagcgcagcaagtgcgcagatctactggattgttacaatcttttacctataaaaaatgtaacagcaaaacctttctttcctgtttccatgaatcccgagtctcactgttacactgccatctaatcttaaaaaagctccataccatccagtatggagctcttcgttattattcgttgattgcctgaggatatacagaaacctgttttttgtctctgccctttctctcaaacttaacaacaccgtcaacttttgcgaataatgtatcatcgccgccgatgcctacgttaagacccggatggatctttgttccgcgctgtctgtaaaggatgttgccagctaatacgaactgtccgtctgctctcttagctccaaggcgtttggactcagaatcacgtccgttctttgtggaaccaacacctttcttatgagcaaataactgaaggttcatcttaaacatatcgttacacctccctgaatcgaaatttgatatattctgctccatattcatcccggatgttttcgagtccgaggatcagggatttcatgaggagctgcgactcagaacttattttatccgggaaggaaaaagaaaagcttccgccgtcttcccccgcacttccttcgaagtggtcgtccgtaaatttttcaacggagtttgccatgttgagagccagtgcggaaacagcagcacacaaaacgtcctgtccgtactccgcatagccagcatggccattgatctcgattccctttactacttcgtccctgtcacgcaagatatttacctgaatcataatcttaattaagcattgatcttttcaatcttaacctgagtataaagctgtctgtggccatttttcttatggtagccagatttgcgcttatacttgtaaacgataacttttttgcccttgccaactttctctactgttgcagatactgttgcaccctcaacggtcgggcatccgattgtaagctctccgttgttaacagcaagaacctgatcaaaagttactgcagaaccaacctctgcgtcgattctctcgatcttgatgctgtcgccctcggctactctatactgcttaccgccagttgcaataatcgcgtacatattgcacctcctattatcattactcgccagttatggtgtcctccgttatggagtccttgggaacctcactgtgcggcacactagataactatatcaaatacttctcttgttgtcaatcactttttctgcaattttttacatttttattttctgtctccggacgctctctcttcatatctgaaatccagctctcccagtgaatattttcattcagagcgaagattttttccgttccccaactgtcatcttctttctgtctacgcccgcacctgctcatgcagcggccgccggatcttctttctcgtgagctccacaaggcctaacggcgtcatgtccacgagaactgtctttacgggatcggcagcaaccgcctgccgcatcgccgccaggagcgctttccggctctcctcctctttcatgtcgataaaatcaacgatgatgatcccggagagattccggagtctcagctggacggcgatcgcctccgccgcctccatattcgtcttcagatacgtctcctccgaaggtttctttgagacactctttgccgtattgacgtcaatcaccgtgagcgcctccgtcggctcgatcacaagatttccgccggatttcagccagaccgtcttcgcgagcgcctgcgacaggatcgtctccaggtgatagagcgcggtgagtggaaattcatcctcataaaaccggatcaccggtctccctgcgcccatgcctgcggcgtgctctccggagccagccgcattgggagatgcaccggaaatcgcatctggaagaaccgccgcccccagtgcatcctgaagttccttataaacttccggcaggtccgtaacaacctcaagaccttccgaaatcttcagatcccgaaccgtgcggactgcaaatctctccggccggtacagcacgctgcagcatgtccggctcgcagctatcctgcagatctctcggtaacgctcaaacagtgattcaaactccgcaaacaccgcgtcgagcccggctgtctccccgtttgtgcggatgacgagaccgcagtttccgcgggaagtctcttcccagcggcgttttgccgcctcccgccattccttgtcgtggatctttgcggagatcccgagggaactcttccccgcagtgagcactgccgtctgcccggtcagtgtgaggttcgaggtgaggactgcgtccttcgtcttcacggcggaccgctccacctggacaaggatctcatcccccgcttttaacggaccatgatccggcttcccgtccgcatacagcgggcaactgttctccttcaagctgtaaaacccgttgactcccggccggtactccacgaacgccgcgttgatgttctttgcgatattctttacttttccgacgaagatgacccccgtctcttcctccgctgcctccggctcaaaatcgatccgggcggcacgtccattttcaaaaagcactgcggcggtcttcccgcgcagtgccgtaatgatcagcttatccaatcttttctccaatttcttccccgaaggattccagagtcacaaagtcatgttctcccgcgtccgcgtaaacttcctcacgattgatgcggaacgcaaactgcggatattcttttcccagagacttacagtatgcctcgaggaccagctccggctttacgttcgcagcacttccagaagaaagctgcaggaagagtccgtttccgtccaccacgcggtgtgcctcgtagatcagaggctttaagtccatctccttctcgccctttttcgtctttttcacgatattcaggtttccgttttcgatgaaatcaagaattccgttgtagaattcttccgctgtcatggaaagtccgttctcgtaatcgtctctcaggacgatggtataatcacatgccgcaacgatggacatggcgttttccgcgtcatccggcagtttccggtagctcaatacctcaacgccttccaccatcgtgtcgttcagccgcttcaccatctccgcggaagagtccgtggacagcacctcaatatccagatactcgccgcttccggtgaggcccacgccgagcggtgccgcaaaggacatgatctgatgcggggagaaaccttcggaatagcggatatccacatccgcgcggcgcatggccttctggaaataccgcatcgtgtcgaggtgtccgatgaacttcatggctccctgcttggaaaacttaattctgatcttcataacagacacctcctccaaatcttctcacgccacagccggaacagcgcattctgcagttcggggtgacagtctcttttgtagcgttgatccactctctctttaagaattcctttgtcacacctgtgtcgatgaaatcccacgggaatatctcatcgagagagcgtgctctcgtcgtatagaaatcgatgtccacgccgcatgtctcaaaggcattcatccagatctcattgttaaagctctcagaccatgcgtcatagagcgcgccctgtctgtaggcctcctcaatgacagcagcgaccttccggtctccacgggcaagaacgccctcgaggaccgtcacgtccgcttcatgccagttgtattttaagctcttgtggttcagcatctcatgcatcttgtggtttacggtgcgggcttttccgagaaactcctcttttgtactcatctgcgcccactgaaacggggtaaatggcttcggaacgaagaatgacgtactcgcaacgacctgtacctttccatttcgcttgtccttcggaatctcgtagtacttctccgcgatcttctcggaaagcagggcaattccttccatgtcctccacggtctccgtcggaagccccagcatgaaatacagctttacacggttccatccgccctggaatgccagtgcggagccgtttaagatatcttcctctgtcagtcccttattaataacatttctcagtctctgggaacccgcctccggcgcgaaggtcagactgctcttcttgacatcctgaaccttgctcataacgtcaagggagaaggcgtcgatacgcagggacggcaaggacacgttcacgcctttaccgtggaaggtattgatcaggaatgtcacaagctcttccaggcttctgtagtcactggaacttaaggagcttaaggagatctcctcatgtcccgtgctctttaacatcttataagccagctcttttaaatgctctacattcttctcgcggaccggacggtagatcattcccgcctgacagaaacgacagccgcggatgcagccgcgcatgatctcgagaaccacgcggtcctgggtcgccttgataaacggaaccaacggtttctccgggtagacggactctgtcatttccataacaagctgcttttccaccttctccggcacccccggcgctgtcggcagaaagctcctgatcgtgccgtcttcctcatatgtcacttcgtataaggacggaacatagattcccggaattcccgctgcctttctcaagaactcctgtctggaatccccgttctttctggactccttgtagacatcaagaagcttccggtaggagacttctccctctccgatataaaacatatcaaagaacaccgcgatcggctccggattgtaggaacacggaccgccaccgatgacgaccggatcatcccaggtacgatcctccgcgtgaagcggaatgccggaaagctccagcacctgtaaaatattcgtgtagcacatctcgtactgaagcgtgattccaaggaaatcaaactccttcaccgggtcctgggactcaagggcaaataatgggatatgtttctccctcatgatcttatcaagatccgtccacggggagtatacacgctcacagtatacgtcctcgtacttgttaaacatatcataaaggatctggattcccagatgggacataccgatgtcataaacatccggaaagcacatggcaaaccggatgtccacagcagacggatccttcttcaccatattcacctcaccgccgatatagcgggcgggctgctggatactcaagagtatctcttctggcaatgctaattttctcataaagccttattttacctgcatttctcacgtattttgcgatgtgttcatcgctgtttttgggttcttttttagtttttttctctgatcttttccgtaagcgaaaaaacacaaattcttgtcaagtgtttttttctacggacagtttacataatattttttgctcttacgacaaaaaaagttttttctgaaatacgcacaattcggattttccattttttacggatacatccgctctaaatgtacagatcagaccgcattattatacggtatttcccgcgtttccgcaacagattctttcccgaaagcaatttttcgagcttttatcgtcgaactttttatcaatttttccgaatactcgtcgaatccaaaaacctcttcacaaacttttgggctcggaacagcatagtgttgcatcgtgataatcatccgggaggccgtaaagttttttcagaaaattgaaacggagctgaaagctaattatgtttcttgcataactgtttatttttatacatataagcatctgcatcatccaataacatccgcattgtacacgacatatcaccggaggataatgcccatccgcatgcatagtcgattggtatttgattttcataactatttaatctgtctttttcttcgtacaaggattttattatttccttaatttccgcctcgcttgtatgataaatgactgccacaaactcatctccgccatatcttccaacaaaatccttttctggaataacacttcgcaaaagctttgcgaaattcattattaactgatctcctgcggaatgtcccattgcatcatttacaatttttagattatttaaatcaaacattatgcatgctgtaggatctgtaattatatcttttttatcaagaagctctttacaggcatttttatttggcagcccagtatgggcatctatgaatacttcctgttccagcagtctgttttgcattgccatcttcattgcccttagcgtctgcataataaccaatatcaccagactcaacatatcaagtgccgacaaaagctctatggtacgaatctttatagcgatcttttctgaatagttttctgcggcaaaaacagtttcatctgccatcgtaaaatatatttcactcatattaacaatatctgtattttcgtatcccttgtttcttactgctctaatttctgttttcaatttatcccagtaatcactctggatctgcaatttttcctgatattcttcgtcattgagttttaccagatcataatgtccatcctgatacctcaatccaagaaaaatatcatccaaatatttgattaactcttcatttgggtttcctgtaatttctaattttacttcgcgctgtgtagctccacgtaccagacctgcataatttattacgcgtgctgtcccctgcagcctactaatctgaatcatcataaaaataacaagaactactaatatcaatataaggaaactctgtataatacctattatattattacttttcttgtttttctgcatttcacaatttccctctcactataatggtatcgtaatttaagacactttaagagacactttttaatgaatctggtatactgtaagcactatagtaaagaaggatcatttttatgtctcaaacaagaagaaatctctacgcaaaattcaaatccgagttggtcattgacctgcgcaaaggagaaaaggactttatgaagttccaaacacctggtcaaaaacggcaagtattgtttttatatcaattggttttgcaatatgagcattcatacctgctttaaatgccttctttttgtcttcttcaaaagcatttgctgtcatagcgatgattgggatattggctttcttattgttctttaaagtacggatttccctggttgtcatataaccatccattttaggcatctggatatccatgaagatcagatcatacctgtcatcctctacttcattcatccgttcaacagcatctgttccgtcctccacagaatctactattatcccgatctcttccaacagagcagtggcgatttcacggttcagttcattgtcctccacaagaagaagctttttaccagaataacggttttctctttctgtttgctgtgatatttcttcttttatctccataggcttcgtcagaactctccttaattctgacatgaagatcggcttctccacaaatgcagtaacaccagcttctttcgcttcctgttcgatatctgcccagtcatatgccgtcagaataatgattggtgtttcatccccaactacagctctgatccgtcttacagtctcaattccattcatgtccggcatcagccagtcgataatatagactttaaatgcatcgttctcttcaaaagcctcgttcgccctgatgacagcttcttttccggaagttgaccagtctgcccgcatttcaatttcacgtaacattttgctgacactcatgcaggtatgtacatcatcatctactaccagtgcccttgcacccactaattcaggaatagccccatacacggtagctttttccagtgttttaaaattaagtgtgacaacgaattccgttccttttccttctttacttgtcaatgaaatggttccccccatcatatcaacgatatttttggtgatcgccataccaagtccagtccctttaattccactttgagtagaggatcgttctcttgagaaggaatcaaacacatgtgtctgaaattcttcagacattccgattccattatccctgattctgaattcaaagatagtaaatccccttctgctacatggtttctcagatacacggatattaaccataccacctaccggagtgaatttaattgcattgcttactatatttaaaaggatctggttcagacgtaatctgtcagtgataacattttcatggacaacatcttgcgtgtcaatgtagagatcctgctgttttgcctggatattcccctgtataatcatttttagatcatggaggatatccgggatgcagacttccttttcttctatcttaacaacaccgctttcaatacggctcatgtccagaacatcattgatcagactcaaaagatgctgacttgacgtcccgatttttgtcagataatcctttaccagatccggctggtccatatgtgctgctgcaagggctgtgaaaccaatgatcgcattcataggagtgcggatatcatgtgacatattatttaaaaatgctgtttttgccttatttgcatgttcagcggaagtgagagcgatccgaagggcgtcttcctgctgcagttccctttctcgctggtctgtcacatcatgtgtcagaaactggatatctgtcaccctgccattctcatcacgattctgaacaatggcacttagtgcgatccactgtttactcctgttacgataaatataccgaaggatcttatgattttctaaacgttcactgatcgtatcaagatctgtaaactcaagatatccctgtcggtattctggcagcatataattattaccgattaaatctcttaccgcataagcatcctggaaacactccaaaatatctgctttatcctcttgagtttttaaccattctgcttttctatcttccaaatggactatgagcatattagtaaatactgttccaagcgcctttaatgcatttgtaagctcttcatcccgtttttgactatcatgaagtgcatttgataattcttcattcttctgcaatgcactgacatcctgatatgtcacatagatatattttttcttacctacaacaagataagaaaaatctgattgcatatagaaccatttcccctgcggatttctttttctgtaaaaaatattcgtatgtgggtgctctatattgaggtttctcacagattcctctacatattgctgatcatccggatgtactgtttcgcaaaaagggttcttctgcagcagcatcatctgctgctgtgtagtctccatcatctctgcaaagccccgggtaataaaaacaggatcatagcatagcgttgtttttgcgtcctcctcttctgaaaggatgcaaaaaagaacagcactgttttcaatagaacgaagcgtagttataaacgcctgttgctgtggaactgtatagtcctccacaaacaggaacacattctttgtatctgcactttcccttgtaaagtcaaactgcatgaaacgcatctcaccattcagcatgaaattgatcataacatgatgcatgatgtgttctgctgttccctgtgtaattgcttccatcgtcatctgctgttttactcgatcaagatcctctatattgccagatgcataacgcattattttctcacaaatataatcatcaaacatttgctcatctgactctggaaaaatattttcaccatttaacaggtttgtatcctgatgaagctttatgcattttcctgtatcttcaaaatcaatgtacaggatttctatataatggtttttaagagctttttcatatattgcagcctgaaccgctttctccaacacctgaattcctccttgttttctcatgaactattaataattcaagttgtttcaaaataaaaaacactgccctatcaattatttcaccaatttatgaattacttttatcagtagttccacatcaacaggcttagcaatatgttcatccatccctgcttcttttgctattattctgtcctccgtgaacgcatttgctgtcattgcaatgatcggtacctcctttgcatcctctctgtccagagacctgattatctttgtagcttcataaccattcatgaccggcatcataatgtccataagaatgacatcaaattcacctggttcactatttctgaacagctcaacagcttcctgaccatcccaggcttttgtcacgtcagcaccttcattctgaagcacaaattcggcgatttccatattcagctcattatcttccgccaggagaatatgcactccctttatagatttttcggatacatccttctgttcttcacgtt

SEQ ID NO: 1998 - DNA, 84292 bp, Unknown
  gut microbiota DNA sequence
ggcgccgccgcttatgagttcgtagactttttaaagagagcgagacagaaatactggcaggtcctgccggtggggccgacaagctatggggacagcccgtatcagtcattttccgcgtttgcggggaatccgtattttattgatctggacacactggtgaaagaggaacttctcacacaggatgagattaacgcctgctactggggcgataatccgacccaggtggcatatgatgcagtgttctggtaccgtttcccgctgcttaaaaaagcgtatgcgagaagtgagtaccgggaggagcagggctatgagaagttctgcatggacagctggtactggctgaacgattacgcgttctacatggcactaaagttccattttgataataaagaatggctggcctggccggaagacatccgcttccgcaaaaaagaggcagtggagtcctaccgtgaggagttaaaggatgaaatcgacttctggaaattcctgcagtataagttttaccagcagtggggaaaactccgcgcatacgcgaatgaacagggaatctccatcatcggtgatattccgatctatgtggcgcttgacagtgcggacgtctggacacatccggaattattccttttggatgaggagaacctgactccgctcaaggttgccggagttccgccggacgcattcagtgagacgggacagctctggggcaatccgctttaccgctgggatgttcaggaaaagaccgatttcgcatggtggaaagagcgcatgaaagcgtctgcccgcctgtatgatgtggtccgcatcgaccactttatcggtgtgacccagtactatgcgatcccggcgggttccgaggacggaaagaccggagaatggttaaagggcccgggaaagaagctcacggatgcgatcaacatggtcatcggtgacacgaagatcatcgcggaggacctcgggatctttgttccggaagtcaaggaactcctcgaggagaccggttatccgggaatgaagatcatcgagtttgcattcagcggtgaccgcttcaatgagcatctcccgcatatgtactctccgaattctgtcgtttacggcggaacccacgacaatgagactctggtgggctattttaagccggaagcgcgccagtggtgggaattacagtacatcgcggattacatgggcgtctcccatcagcatgaggtcgtagacaaggtcctgaagaccgcctatgcgtctgtcgcgagtgttgtcatcttccaggctcaggatatcctgaaactggacaactgggcgagaatgaacacgccgggtacggtcggaaataactggagatggagaatgaaaccaggcgaattgaaccaggatcacatcaaccatctttcatggcttgtagatacatttggacggttctgacggtgcagtcacaggacaaaaataccgagtgacagagtcggcttttgtcgataaaaacagatgtgtgccgtacgcggtacagtgccggaaaataaggaaaaacgggcggtttgtaaggggaaaacagaccgcccgtttcttggaaattcgattgacaccggaccggaattgtgatattgttaagttaattccgatgcactattgaactcacatgtttttgtaagtcatttgcgcgatacgatgaattacaaaagcatgtgagttttttgaaataaagaccatcagcgatgtgtggagatttccagtagggcttagtacggaaaaattcaattttttatggaggtaccaaaatgaacaacggtacagttaagtggttcaattctgagaaaggctacggattcatctccaacgacaacggcggcgacgacgtattcgtacacttctccgcaatcgtaggcgacggcttcaagactcttgaagagggccagaaggttactttcgacacagagcaggatccgaagaacagcaagaagcttcgcgctgttaacgtagttaaactctaattcgaataaaagagaaaacaaagagctgccgttccagaactgactgggacggcagcttttttgtttgacaggaaattccgatggaacttcctgtcaaacaaaaaggcactgtgtgcctaagatgcgcactcgcgcgaagatgaaggctgtcgcaagcgaccgcgctcggcgcgagaatgtgccgaggcacattctttttttgcacacatgcgaatctgaagataaaaaacaggcttttttcaagaaaagccttgcaaaatgcggcatttcctaatagaataagaaggactttggtaactgctcggcttgattttatgatttgtggacagttgccattttgattatgcccggatatatcgatctgcggcagagtgtttgtgcccggcgcgggatgcgctaaggcgcattttgtgttatgatccacattgtacgtggatccgtaagtatttcacaggtaccccttgtcagtcaaaaggagatttagaaaatgattagtgcaaataatgtgacactccgtgtcggcaaaaaagctttatttgaagacgtaaacattaaatttacagaaggaaactgctacggtctcatcggtgccaacggtgccggaaagtccacgttcttaaagatcttatccggtcagctcgaaccgacaaacggtgaggttgtgatcactccgggccagcgtctttctttcttacagcaggaccactttaaatacgacgaatatacagttcttgataccgttatcatgggcaacaagcgcctctacgatatcatgaaggaaaaagacgcgatctacgcaaaagaagagtttactgatgaggacgggatcaaggcagcagaactcgagggcgagttcgcaacaatgaacgggtgggaagcagagtctgacgctgagaacctcttaaacggtctcggaatcgagacagagctccactacaaaatgatgaaagacctcctcggcgcgcagaaggtcaaggttctcctcgcacaggcgttattcggcaacccggatatcctgctcctcgacgagccgaccaaccacctggatctcgatgcgatcgcatggctcgaggagttcctgatcaacttcgagaacacggtcatcgttgtatcccatgaccgttacttcttaaacaaggtctgcacacagatcgctgatatcgactacggcaagattcagctctatgccggaaactacgacttctggttcgagtccagccagttaatgatcaagcagatgaaggaagcaaacagaaagaaagaggagaagatcaaagagttacaggagttcatccagagattctctgcaaacgcttccaagtccaaacaggcgacatccagaaaacgtgccttagagaagatcgagctcgatgagatccgtccgtccagcagaaaatacccgtatatcgacttccgcccggcgcgtgagatcggtaatgaagtgctttctgttgaaggacttacaaagacgatcgacggtgtaaaggttctcgacaacatctcctttacactcggaagagaagataaagttgcacttgtaggcccgaacgagatcgcgaagacaacactcttcaagatccttgcaggcgagatggagccggattccggaagctacaaatggggtctcacaacgactcaggcgtacttcccgaaggacaacagcgccgagttcaacaacgatgatacgatcgtagactggctgacccagtattccccggaaaaggatgttacttatgtccgcggattcctcggaagaatgctgtttgccggtgaagacggtgtgaagaaggtaaaagttctctccggtggtgagaaagtgcgctgtatgctctccaagatgatgatctccggcgcgaacgtgctgatgttcgatgagccgactgaccatctcgacatggagtccatcactgcgttgaacaacggaatgaagaagttcccgggtgtgatcatcttctcctcccgtgaccaccaggttgtagagacaactgcaaaccgtatcatggagatcgtcaacggacagctgatcgataagatcacaacctacgacgagtaccttgagagcgatgagatggcgagaaagagattcacatatactcttactgagagcgaagagaatgatgactgatcttgcggcctgactgatctgctataaaaatcagcagcgtgtaaaaataaaaaaagagcacaggttctgtggattccatggattaaactaaggaatctatagagcctgtgcttttttgatcaaatcagtttttcccggcttttgccaggatccccttcattgaaacgatatatacgatggccgatacgaccggtccggcgatatcggagaccggttctgcaaagaatgccgcttccgcgccgaacattgcaggaagcaggaacagggagacgaaatataagccctttcggaagaatgagagcggcagagcgacctgtacctgaccgagcccggtgaaaccgtcgacgatctcatactggaacgccagcgggatgattgcgagcgtgaagatccggatcgcccggagcgcctcagcggcaaccgtcggatcggatgtaaagagacggacgaacaggccgccgacggtgcgtgcgaggataaacagcaaggtggtgtacgccgctgccaagataaagatatatttctgggcaccttttacgcggtcggtgtttcctgctccgaaattgtaagcgaggaccgcctgggttccgctcgtgatgcctccgagaggcatagtgacgaccagcatgaagctctgcgcgatcgtcgcgcaggtgatgagaagatcgccgcgtgccgcaccgccgtatttctgaaggatcgcgttcatcgtgatgatcatgacattgtccatcgcgatgatgatgaatggggtgaagccgatcgtcaggatcctgcgtatcagccgccagtcataaccgccgaaagtgatgcgtaccggcacagtctttccgaagagcgttttcagcacgaaggcgcagcttgccgtctgggagaggactgttgccgtcgcggcgccggagacacccatgtgaaaaccgaagataaatacaggatccaggacaatatttaacaccgcaccgatgatgacggagtacataccggttttcgcaaatccctgacagatgataaactgattcatgccggttgacatgagcgcgaatacggtccctgtcagatagatcgtaaagtacgcgtttgcgtagggcagtgtggtgtcgctcgcaccgaaataccgcagcatcgggatccggatcgggtagatacaggcgaccatgaggacagaacacagcgcgagcattaaaaaacagttggcgaggatccgttcggcggccttgttatcgccttgtcccatcttcatgctcataagcggggcaccgccgatcccgacgagaaatgcgacggagccgatcatcgtcacaacgggaccgcagacaccggccccggcgagcgccatatcgccggaaacagggatgtttccgatatacatgcggtcaacgatgctgtaaagaacgctgacaaactgcgccagcatactggggaccgcgatgcggatcacaagtttttttatattgtcacggccgagatcattttctgctgccataattacctcctgatgatttactccaggtcgaaaacaggatgtgtgtaagacctggtgtgatcctgatcagtgcaggctgagatcagctgcatgtggctgtaaaagacctctgaatgtgtcggaacatgatctttttcaggatcacagcccatagagtatagcacgatttccggaagcggtaaatggaatgaaagaagattgtaaattacttttttccgggaagaaagatctggatgcggcggcatttgtcaacaatgggacaaagaaatgtaaactataaaacaaaaacaagttgacaaatggacgaaacatgcgtatgatatgggaagagtcaatcataacaattccatcttgagatacatatgccggaatgcggaatccagaagatccacagttcagatcacggcagcggaaacgatggatgttgggaggaaaataaaaatggaaaacacagcagcaaaacaccacatgtcaactgcacagatgacggtgacagcgctgatgacagcgatcacctgtattcttgccccgatggcacttccgatcccggtaagcccggtaccgatcagtctgacaaacctggtgatcttctttatggcatatattcttggaacaaagctttctgtagtgagctatgtcttatatctgctcctgggaaccgtaggacttccggtattctccggattttccggcggtgtcggcaagcttctcggaccgaccggcggatatctcattggtttcatcttccttgcagcgatctccggcttcttcgttgagaagttcccggcaaagatctatatgcatgtgatcggcatgatcctcggtatggcagtctgctacgcatttggtacggcatggcttgcaggccagcttggaatgagctttgtcgcaggactcggagtcggcgtgatcccgtatcttccgggcgataccgcaaagatcatcatcgcgatcatcgcaggaccgcagatccgcaaggcagtatccagattcatgtaggtatttcataaaactcatatacatctaaaaaagtccgcagcaatttttatgctgcggactttttgatgaccggggaaatttgcggaatctccgatccggacaaaaccggatcaatatccgtaagccagtgcgcccccatcaaccgcgaaatcctgcccggtgatgtaggtggcaccgtcgctgatcaggaacttagccattgcaccgagatccctggtatcgccgaacgcatgaaccggcattcttgcgaggatcgcggcttttctttctggagtcatgacctgcttgttcatctcactcgggaaccagcccggcgcgatgctgttgacacagatgttgtcgtttgcccactcgatggcgagcccgcgtgtcagaccgcagaccgcagatttgctgacgcagtacggaacgacttcggtgaagccgagatgcgcggccatgctgctgatattgatgatgcgtcctttatgtttactctcttttaaatacgggtagcagatctggctcaatgcgaacagacttgtcacgtccacatccaggatctttttaaagtcatccatcgggaaaacttccgcgcgtgcctttttggtgatcccggcattgtttacgagaaaatcgagaccggattttcctgcgatctctccgatcagctttttcattgcatcataatccgtgacatctccctttacatggatcacgccgggagcagacggcgcaagaccttctttttcctttccggtacggctgatcacatatacggttgccccgttttcggccagtacatttgcgatcgcgtatccgatcccgctgcttccgccggtaacgataccggtgcgtccttcaaattctttcatgatgatatatgcctcctcaaaatcataaaacagatcgaagatctgtagttataagctctggcagcgatagctgtgacagttttcgttgatcagatcccaatcgagctcggccccgacaccaggtttgtcaggtacatagatatatccgtcacggatcggcagatcacctttcatgggaagtctgtagttatcttccgggacaaagtactcgaaatatttacagttccggatgctgcagcttacatgcacgtttgcaagatccatgtaattcatggtcgttgtgtggatctcacagtttaatccgaagctgtctgccatgtgggcaatctttaaagtccctgtgacgccgtccttccagcttacatctgcgcggacgatatcggctgcatgctgtgccacactctgtgcgacgccccaatgacagcctctggtcgtctctgtagcggcgatcgggatgtctacggtcttgcagagttcggtgtatttgtaaagttcgaaatcgcggaacggctcctcaaaccactcatatccaagccgctccagctgtcttgcgacacggatggcatcgtccagcgtatactcgccgaccgggtcactcatgagcgtataatccggaccaacggcttcccggacagcttcgtggactttcatgtcaaattcgaccggtccgcccggatgtgccttgtatcctaaaatccccttgctcttataataaagtgcttcgtcgacatattcctgcacagtggcgtggaaatttccgctggcatataccggaagctttgtgcggtaagcgccgatatatttataaagcggaagaccggctgcctttgcacacatatcccaaagtgcgacatccaccggacccggaagaaatacggggaaaaatgcttcgtgacggtcaacattccacaactcataaaagatcgcctcatgatcgtgcggatcacgtccgagcaggatcggagcgatactgtcgtggagataactttcggttacaccgccgctgcgggcagccatacaggttgcgatcccttcggttccgtcatctgcggtcagccggatcgcgaaaacatcccaccccattttggcgccgccctggcgtttttcgtcgaagagacatttatcgcgggttacccaccatgtctcgaactttgtaatgatcataatgattctcctgaaatgaataaagtctctgcactgtaagataaaaactccattccggaagttttcagcgcagaatgtcacaattacacaacatagatatatcacaatgccaaatttgatgattgaattatatcacatattgcactataatacaaatataatatagaaaataaaggagaaagtgcacaatgagcaagtggaacgacgacaaagaactctttaagcttatgaaagaaaaactctatactccggtcgtaggagacatccttgataccatgggatataatcaccagttcctgcctccggagatcatgccgttaaaagatgacatgaaactggccgggagagcgtgtacgatcctggaacataatgtctatgaagcacagaaaaagccgtttggacttctgacagaagcacttgaccagctgaagaaagatgagatctatatagcgacgggagcgggaaacagtgctctctggggagaactcctcacggcgacagccaggacacgcggagctgtgggagcagttcttgatggatatacacgtgacactccgcaggtccttgcacagaatttcccggtatttgcaaggggacgctgggcacaggactcttcgatcagaacgaatgtggtggatttccgctgcacgatcgagatcggacaggttacgatccacgatggcgacattgtgttcggagacatggacggtgtgctgatcattccgaaagaagtggaaaaagaatgtatcgagaaggcgtttgaaaaagcagcgggtgagaaaaaagtccgcagtgcgatcgaaggcgggatgagcgcgacggaagcgtttaaagtatttggcatcctgtaataaagcggacgaatattaaaaacgaagacaaaaaagacgggctgccgtgatccggaatcggattatccgattccggatcgcggcagccttttggttttatcgtcagttatcgttttccatcattttcagtgatttgatcagagagtggttgatgtgcaggatgatcgcatcctggacggcatcttcgttctcccttaaaagtgcatcgataatggcacggtgctgttcaaggttgtcaacacggttctggtcatccttcaatgcggcgtagacggcgagacgcatctgctggatcatcacagactgatataggttgatcaggatctcgttcccggtgatatcgaccagataggaatgaaaagaggtatcgatctgaaattcatcataatccggaccggcggcagctttttcaaactgcttcagatattctaaaagcctgctcttggagtacatggagatatatttcctacagacagtcggctcgatcagcttacgtgtctgatagagatcgtcgatacttttttcggtaaaaggagtgatccgcattcccttgcgcgggaaaatatcgatcagattctcagcctgcagcatgagcagcgcctcgcggagcggtgtccttccaaaggatgtctcttccagaagctgcttttcattaagttcctgtcccggcaggtattcacaggatacgatcttgcgatagagatattcatatgcctgatttgtcaatgcttctgccattattctcctcctttttggtaaatatgctgtaacaagcatatataattttgtgacaaattgcaagtgaaaattcacagaaatccattgaaatatatcacaaaatagtgtaatataatgatagatatatcacatgacaaaaacaaagacaaaataataacgggaggaacaggaaaaatgaatgaaaatgagacatatatcaaagatatacgaatctaccaggctgtcagcaaactgagccatccgatcgcagattccactcatgatatcagcaagatcgcattttacgttcttgaggttgagacaaagggcggagtgatcggtcagggatatcttttaagcttccattacagcccgaacgcaattgaaggcgccttaaaagatatgaagaatttcgtactcgcgaaagattatcatgtatatgagaccgcacaggtccagaaggattacgagatcgaaagtgagtatttcggaatcgtcggacttcagagatgggcactggcgactttaaacgtagcaatgtgggatgcatgggcaagaaccatgggacagccgatctaccggatgttcggatgccacagaaaaccgatcccggtatacggaagcggcggatggatcagctacacggacgaggaacttgttgatgaggttgtaaactaccagaaacgtggatttacagcagtcaagatcaaagtcggaagtccggatatggagcgtgatatccgcagattaaaccttgtaagagaggcaaccggtccgaatatgaagatcatgatggatgcgaaccagggtatggatgttccgtcagccgttaaactgatcagcaatgtggaacatctcggaatcttctggtttgaggagccggtcgttaatacagattttgaaggatatgcaacgatccactcaaagacaaaggtcagccttgcaatgggtgagagagagtactccacagttgctctccgcgaactgatcggaagacgtgcccttgatctttggcagccagatctgatccgtctcggcggtgttgaagcatggagagacagtgcggcacttgcaaacgcttacaatattccggtacttcctcactactataaagactatgatgtaccgcttctctgcacagttgcgaacccgtatggcgcagagagctttgactggatcgacgcgatcatcgataatccgatggtcatcgacaatggttttgcccgcccgcgtgaaggcgaaggctggggcttccgcttcctgcatgagttcatgacagaggtaaaataaggagtgatctgaaatgagagcgatcgttcttccggaaccgtggaaggctgtgacagccgaaagagaaattccggttccaaaaccgggagaggcattactgaaaatggtctgcggggggatctgcggaagtgacctggcttcctaccgcggccagtccgcatatgtcagctacccgcgtacgatcggacatgaattcgcagccgaggttgtggaagtcggcgagaatccgtatgggatcaaaaaaggaatgctggtgacgggaaacccgtatttcaactgcgggacctgttattcctgccggcgcggttatgtgaatgcctgcatccacaacgagacgatgggtgtccagagggaaggagctttcagcgactacttcacgatgccggtagagaggctgtttgacggtgccgggatcgatccgaaggagctggcgctcgttgagccattctgtatcagttaccacggtgtgtccagagcggaattaaaaccgggggacaaggtgctgatctttggcgcaggcgcgatcgggatcctagccggtgttgcggcaaagagtttcggagcgaaagcttatattacggatattgccgaagaaaaggtaaaaaaagcagtcaatgatttcgggctggacggtggatttgtcaatgacagtccggaaaaactggcggaatttatcgagacggtcacaggaggagacggattcgacgcaacggtggaagctgttggtgccccggcaacattcttagcctgtgtgaaggcagttgccagccgcggaaagatggttgtgatcggtgtcgcaaagaaaaatgcggatttcaatttcctggaagttcagagaaaagaattgaatatgtacggatccagaggtgcaacctcagacgatttccgggcagtattaaaacttgtccgcgaaggatttgtggatcttacaaaactgatttccagaacatattccgcagatcatgcggaagaagcatttgaagatctcgataaaaattatggggaaatcgtaaaagctgaattcgagttttaaacagaaactgtaaaaatgtattttatttatgggaggaaaaaacttatgaagaaaagagcaatggcagccgtatcagcagttatgtgtgcatccatggtcctgagcgcatgtggcagcagcgcatcaacaagcacaaccgcagcaccggcagagacaaaagcagctgaggagtccaaaacagaagagacgaccgcagcggcagcatccggagacgttgtaacgatcaacatcggttttgagaacacgaccgaggagccgatcggacaggctgttgaaaaatgggcagagctcttaaaagaagagagcaatggcaccatggaactcaaagtattcgcaaacagcgcactcggaaacaagagtaaactgatcgaccagatggtcatgggtgagaacgtgatcacgatcgcagacggcgctttctatgctgattacggtgttccggatcttggtatcctctatggaccgttcttcttcgataactgggatgaggtttggaaactgatcgacagcgactggtacaaagagcagtgcagcaagcttgcggataaaggactcaccgttcttggttccaactgggtctatggagaacgtgagttaatgacaaaagacaaagttgttgtaccggcagacatcaaaggtaaaaagatccgtcttgcaaacagccagatctatgtagaaggcttcaatgcattaggagctacagcagtaccgatggcgcttggtgatgtttacaccgcattacagaacggtactcttgacggcgttgagaacccgctttccacattatacggacagagtttccaggaagttacaaagaacatccttatgacaggacatatcttaaacttcacaacatggtgcatcggaacagattacctcaacaccttaacacaggagcagcaggatctgttattcaagacatgtgaagaagctggtctctacaataacgagaagcaggaagcagctaacgacgactacagaaagaaactggaagatgcaggcgtaacattcacagagcttacagacgaagagagagcgcagtggaaagaagcaagcctttccttctatgagaaaggttcccagtttggatggagcgatggcctttatgatactgtaaaggcagcaatccagtaaactgcaggatgtgacagaaagaaatctcatggcggtctcagtcttccatgagatttcttttataaagatccggaaaacatgatttgccggatgatcgaaggatggtgaggaatgacaatgaagaaaatactggatatcctggataaaatcgaagttgctgtagcgtcattggttctcctggtcttgatctgtgtgacctttttcggcgtactgatgcgttacatctttaataatccgtttacctgggaagaagaactccagctggcatgcatggtatggatcacattcctggcggctccggcggcgttccgtacaaagagccatgtggcaattgaaattcttgtagacgcattgccaaagagcctgagaaaaatcgtggaacttctgatccctgttgttgtatacgcagttctgatctacttcttcttcagaagccagaattatatcgctgttatgctgcgtacaagcagaaagaccccgatcctgatgattccgtactctacgatctacgcgatcgcgccggtctccatcgtgctcatgctgatcagctatacggagcagaaatattatgaattaaaagaattatttaaaggcgacggaaaggaggagaagtaatgaactcagcagttggtattatggcaattgttctccttgcgctgttatttcttaagatcccggtttttgtagcggtacttggagcttccgttatctactttgtcatgactccgggaatcaatccggcggtatttgcccagcaggcaatcaccggatctgagagcgtgacacttctcgcaattccgtttttcgtatgtgccggtgttctgatgaattatacgggtgttacgaaacggatcatggacttctgttccgtactgaccggaagaatgtacggtggactttctcaggtaaatatcttattaagtacattgatgggcggactttccggttccgcgcttgcagatgcggcgatggaggctaaaatgcttgttcctgagatggaagaaaaaggaatcggacgcgcattctccacagtagtcaccgcggcctccagcatgatcacaccgctgattccgccgggaatcggactgatcctttatggatgtattgcgaacgtgtccatcggtaaattgtttatcgcaggtttcggaccgggaattctcctctgcgcgaccatgatgtttatggtatcgaagatctccaagaagcgcggatatcttccgcttcgcaaggagaaaatgacaggatccatgttctggacatcctttaagccggcaattctcccgttatgccttccgatcatcatcatcggcggcgttcgtctcggtatatttacggccacagaggccggtgctgttgcgatcgtatatgctgctgtcctcggattcggctacagagagttgggaccgaatgaaattcgtcagggcttaaaagagactcttatgacaacgtcatccattatgctgatcgttgctgcggcatccacattctcctggatcctcacaaaagagatgatcccgcagatgttcacccagtggatgatctctgtgatccataataaatggattttcctcgttgctgttgatatcttcctgatctttgtcggcatgttcgtagaaggaaatgccagcatgattgttctcgtgccgttatttgcgccggctgcgacagcatacggaatcgatccgattcacttcgcaatggtatttattttcgcaaacgccatcggtgctttcacaccgccgatgggaacattaatgtttgtaacctgcggtgttacaaagtgttccacaaaggatttcatcaaggaagccgttccgttttatgcactgttattcggctgccttctgatccttacctttatcccgatctgctcgaccggactcgtaaacatcatttattaggcgcagaaatcataaaaactgatagaaaacacgctggtttcatgatggtgaaactggcgtgtttttgtattctacagtggaaaaaaacgggagttttcccttgaaaacagcaggggttccactcgccggaaccactttccggcataatatctaaaaagcagttctgcaatttgtaatgtacgacaaaaaggtgattcatagttacaaaacattgcattgtcagtcaactgatgataaaatatacaagaataaatggaatttacagaataccattccacttggcggaataatagatgcataactcataaggcacaaagcggttgcctcaatggagactgcgatcattacatgacagaaaatggaggaaattatgcaactggttgatcgtgcattaaatgcactggatattttaagccggaatatggacgggatgtctgttacggagcttgcaaatcaacttgaaattccggctagctctacccatcgggtacttgcaagtctgaaaggaaacgacctggtcgtacaggataaacatacaaagaaataccatcccagttatcgaatctgcggaattgctgccaatatcataaagagcagcacgctggtacggaacgggaatccgctggtaaaagaactcgcggaaaagattaatcagaaggtggatctctgtgtgatggagcatggagtgatccgcaacatcgtgagcagtgactgcggtgcaccggtccagtatatggaacagccggagtgcgcaatggcagctggacaggtattccgcgcttatcagtatatggagccggatatgaaggagatggaacatatccgccggcagggatatacgctcgttgactgcgaagagaagagctacaagcaggaagcggcatgcccgatctttgatttttatggtgatatcatggcagcgctgacatttgtgtcgatcaaagatggaaatacgagagaactggtcagaaggatctgtcttttacgacaatttgcggaacagatctccaagtcagtgcgacagagataaaaagaccggagaatacagttggcaagtgggctgccgcatgaaatgtgcggcagcctgctttttatttaccaggaaaagaaatattcttgacatttacctataaaactatgtatgataagttctgcactataccagtagatcatgaatgatcagaggggttcgcagacacaaaacagagcactggtccgggaagagacagtcgatgggcagatcccgcaagtgtagtgaaggaggaaacaaaagaccatgaaacaggttcatgaaacattagaccggatccttccggagatcatcgcgatgagtgaggacatttaccgccatccggaacttggattcaaggaattcagaacgagagaaaaaacgatcgaggctctggataaagcagggatcccgcatgaggatgttgcttacacgggaatccgcgctgtgctggattcgggaaaaccgggtccgaatatcggtctgatcacggaatttgacgcagttccgactttcggacatccgtatgccagcgaggacagctatgccgcccacacatgcggtcattacggtcagctcggcgtcatgatgagtttattcctggcgatcaaagaatcagggatgttgaaagatctctgcggcaaggttacacttcttgtaacgccggcagaagaattctgcgatatggattaccggaaagagctgatcagagagggaaagatctcccacccatcaggaaaacaggaaatgatcgccacaggcgtgttcgacgatgtggatctcatgctttcctgtcatgcaatgggaatcgacatgacaaaatatcatgcggagatcggctccagcttaaacggtttcatcatgaaacgcgcgatctttactggaaaggcggcgcatgcgggcgcaaatccggaaggtggtgtaaatgcattaaatgcagtcaatctcgcaatgaccggaatcaacttcctgcgcgagacattccgcgctgatgatgcgatccgtgtccatttcttcgttccggaaggcggacagtccgtcaacacgatcccggcaagaacgcagctggaaatgtatgtccgggcgaaaaccgttccggcgatcttcgagacgaacgcgaaagtaacgcgtgcgatccgcgcaggtgcacttgcgatcaactgtgatctggagatcaaggatactccgggatacttcccgcttcatcaggacgagaacctgacagcgcttgtgaaaaaacatattctggattacatcgatgagagcatgatcgcccagggaacccacgggtttgcttccggtgatatgggagatctgtcactgatgtggccgatcgtcgagatcggagttgccggatttgaaggcagcatccacggaaaagattttaagacggtggatcctgaacaggcatattgtgttccggcacattattttgcggacaccgtgatcgacctgctgtctgacggcggtgcttctgcatggaagatcaaagaggcattccagccggtaatgaacaaggaaaactatctggagaccctggacagtttgaataaatcaacgttttacgaaaaggagaacaactagttatgagaaagaaaatcgtatgcagcacactggctatggcactggcagcttccatgctgttcggatgcgcgagcgagagcaagactgagacaacagccgcagcaggagagacaactgcagctgctgaaacaactgcggaggcagcaaaggcagagacaaacggtgagaagttaaaagtgacacttcttgttaccggttctttcggcgataaggcattcaatgattccgcgcaggccggcatgaagaagctggaagaagagctcggcgacaaagttgaagtcaacatggtcgagatgggaagcgataagacaaaattcgaaggttctatgttagacgcatgcgagtctgatgcagacctgatcatcacaggtctctgggacatgaaagagatcacagagaaagttgcacaggaattcccggagaagaaattcatcatcttcgatacagacgttgattacacagttggcgatctgagcaacgtatattccatgagctacaagcagaacgagggcgctttccttgcaggtgttcttgcagcaagcgtaacaaaatctgacatggaatttgcaaatgaggacaatgtgatcggttttgtaggagcaaaagatacagcggctgttatcaatgactccgcagtcggcttcatcgagggcgcacagtttgtagacccggatgtaaaggtactcgtttcctatgttggttcctatgtggattccgcaactgcaaaagagcttgcgatcactcagtattccaacggtgctgatgtcgttttcgtagcagcaggtccggcttccgtaggcgttatcgaggcggctgctgagagccagaaatactgcatcggcgttgactctgaccaggcacttgcttacgagggcaaagacgaagcaaactacatcatctcttccgcgatcaaaaacgttggcgagagcctctacaatgcggtagaaaaggccgttgacggcacacttccgtatggtgaatatcagatccttggtatcgaggacggcgttgtaggtcttgctgacaatgatatctatcagtctgttgtatctgacgatgcaaagaaggcagtcgaggacgcaaaagaaaaactgctttccggcgaggtcaaggttgattccgcttacggcatggatgaggcaaccttaaaaggcatcatcaacggagcacagtaaaggaaaacagctgagacatgcacccatagtttagttcacatctcctgtatcaggcagaaatgaagcagcaggcggaaaatgctgttcccggggtcatcccggagcagaccgcccggcgctttccctgtccgcggatcgcaggagatgttgctttttatcatcatgcataacggtggggacgactgccggaacatacaggcggataagagctttacctggaggagaatgaatggagcaggagatcattttagaggcccggaatatcacaaaagtatacccgggcggcgttgtggcaaaccataatgtcaatctgcagatcaaaaaaggtgagatccatgcgctggtcggagagaacggtgcaggaaagtcaactttgatgaaaatgctgtttggtatgctggcaccgacggaaggccagatctttgtggatggaaaagaagtacacttctcttcatccagcgatgcgatcgcggccggactcggcatggtacaccagcactttatgcaggtcccgtccatgactgtggcggagaacctgatcctcggtgcagagccgggaaccgcactgaaagtagacaggaaagaagcggtgcggatcacgacagaactttccgacaaatacaatctgaaggtagaggcaaaagaaaaggtcgaagacatttctcttgccatgcgccagaaacttgagatcttaaaggcactctaccggggcgcgcatatcctgatcctggatgagccgacagccgtgctgacaccgcaggaaacagaggaactgtttgaacagttaaaacttttaagagaacatggccacacgatcatcttcatctcacacaaactaaatgaagtcaaggcactctgcaaccgcatgacgatcctcagggacggaaagaccatgggaacgtatgagatctcagatcttgatgagagggagatctcccgcctgatggtcggccgtgatgtcagcctggatattgaaaaagaggagatggagtttggaaaaaccgtcttttcagtaaaagatcttgtctatgtggaccagttcggaaagacgagactggatcatgtctcgttttccatcaaagagggccagatcctcggaattgccggtattgatggaaacggacagtcggagctcgttgaggcgatcgtcggaaccttaaagcagcagcagggaacgatcacgatgaatggaaaggatatttccaatgctccggtactcgcccgtcaggaagcaggaatctcccatgtctcagaagatcgtatgaaattcggaacggctccgaaactttccctggaggacaacacgatctcaaaggtttactatacggataaattaaaaacacacggacttctcgacagcaaaaaaatcagcgagtttacaaacaggatcttaaaggaattcctcgtaaaatacgataattccaaacagtccatcgcggaactttccggtggtaatgtccagaaggtcgttgttggccgtgagtttgactatgaaccggatctcctgatcatgaaccagccgacgcgcggaatcgatgtcggtgcgatcgagttcatccggaaaaagattgttgacatgagaagcagaaagaaagcgatcctgctcgtctccgcggatctgagcgagatcctttccctgagcgacacgatcctcgtcatgcatgaaggccggatcgtcggacatatcgcggatgtgaagaagacatcggagaacgagcttggtctttacatgctcggtgtaaaagaagattccaaagagcagatcggaggtgcctgctgtgaataagaaatttaccatcgtaagactgctctgtgcattcgggatcgccattgccctgtctgtggcagtcatcttcgcagtcagtgaagaaccggtgacagcgatctacaacctgtttttgggaccgctgcagtcgaaacgtcacttttttgaagtatttgcgagcagtgtgccgctgatctttacaggacttgctctgggacttgtctttaagtccggaaacttctcgatgatcgcggatgcatgtctgtataccggcgcggtcgtgaccgcggcgcttgccatcaaaacatctcttccgtttgcagtccacccgatcgtcatcatgatcgcggcagcggcagtcggtggagtgatcggcagcatcccggctcttttgaaagtgtatttccacacaaatgaacttgtaacttccctgatgttcaactatgtattcttctatctcgggatttacaatgtgacaaaattcctggcagaccgcgaggcgggaacctttgcatcaaagaaatatcaggcgacggcagcactcggaaagctgatcccggggacaaatttccatgttggatacctgatcgcggtcgcggccgtgatcgccttatacattcttgtatacaagacgaaattcggatatgaagtgcgcatctccggaagcaatccggaattcgcaaaatattccgggatcaggacaagccgtgtcatcatcatgacccagatcattgcaggtgccgttgccggtctcggcggtgccgtggagcagatgggaatgtaccagcgtttcaactggcaggattccccgtcttacgcatgggacggtgtcatcatcgcgatcctgtccggcaacaatccgaaaatggtcccgtttgccgcgtttttcctggcatacatccgtgtcggtgcggacctcatgtcacgccgctctgatgtacagaatgagctcgtttcgatcatccaggccgttctgatcctgtttgtaacggcagagcggttcatggcgggatggaaacagcgcgaagaagcgaaaaaagcactgaaaggggaggcgtaacagatgaatcttttacaggaaattttaaaaacattaagtctcccggagttctacttcgcgatgttccgaagcgcgacgccggtgctcttaacaacacttggcgcgatgatctcgtccagatcggggacaagcaatatcgcactggaaggaacgatgctgatctccgcgtttgtcggcgttgtcgtcagcgccttttcccacagcgcatggatcggattcctgggggcggtatttgcaggctttgttgtcagtaacattctcgcctactttatcctgaaattaaactccaatgcggtcatttccggtatcgcattaaacacgtttgcatcaggaggaacgatcttcgtcctctatctgatcacgggggagaaaggcgcatccacatccctggaatctttaaaacttccgagtttaacgatcccggtcgtaaaagacatcccggtgatcggtgctgtcctttccggacatcatgtcctgacatacacagcacttgttttagtggcagttgtatggtatatgtttaagtacacgagactcggtatgcatatccgtgcggtcggggaatctccggatgcggcggaatcagtcggcattccggtaaagcggatcaaatatatcgcactctgcctgagcgggatcctgacaggtatggcgggcgccttcctgtccatgggatatgtaggacttttctcatccggaatgactgccggacgcggttatatcgcactggcgacgcaggcgatcgcggcgggaaatgcagtgatcggaatgcttgcatccctgctgttcggattctgccagagccttgcgaactatctgcagaattcttccattccgcttcagtttatccagatgatgccttatctcatcatcatcattgcctacacgatctactgcgcgatggtagaacataacaagaaaaagaaacagatgaaagctgcggctgggaagtgatcccggccggagaggaaacagctcctgggaacgggagctgtttttagaagacagaaaggagaatgaatctatgggtcatgtaacagaacttcacttacatctggacggctcactccgcccggagacagtctgggagcttgcgaaagaacaggggatcaggcttcctgcggagagcgcggaagaagtaaagtataaaatggaagtgccggaagactgcaggacactggaggaatatctggagcgctttgatcttccgcttcttgtccttcagagagcagacgcgatcgagcgtgtgacttatgagcttgtggaagaccttgcaaaggaaggtgtggattatgcggagatccgctttgcaccgcagctttccgtaaatggcggtctgacgcaggatgaagttgtcgaggcagcgatccgcggtgcggagcgcggcatgaaggcctatccggagatccgtgtcggactgatcctctgctgcatgcgcggagcagacaatgaagcgttgaacatgcagacggtggagacagcgaaaaagtatcttggaccggtcgtgtgcgcggttgacattgccggcgcggaaggcctgttcccgacggaaaactttgcacctgtctttgcgaaagtccgtgaatacggaatcccgatgacgatccatgcaggagaggctgccggaccggatagcatgaagacagcgctttccttcgggacaaagcgcatcggacatggagttgcggcgatcaatgatccggaactgatccggagactgatcgacgagaatgtgacacttgaggtatgtgtgacgagcaattaccacacaaaagttgtcccggcgatcgagatgcatccgatccacaagcttctcgatgagggagtccatgtgacagtaaactctgataaccggacatgttccagaacgacacttcagaaagagaaggaagtcttaaaggaacagctcggcttcagcgacgaggagatcgaaaagatgcaggaatatgcctgggaggcaagattcctgaaataaaaggaataagatacagaaaagcgacagaatgaacgaaaaaactccggggattctgtcgctttttctgtgctaaaaaacatatattccattaaacggaatgagaattgtcaaaaatatacaaaaactatcccatgaaattgtagtgtatgccaaagatgggaggaaaagtcacttgacattgcattgaagtgcggaaaatgttaaaatagataaaactaatttcagtttacggaataccattccactacacggaataaacaaaacaaatgacgagcgatgctatatggcagctgtttgaacgcagataagcattcccccgcttcaagtgcgcggagcactaagcggtgggtgagtgggatgcttatgtcagtgggagttgaaagctcccactgacagatcgcgaagcgactgcgttcatgagcaagtagcgaagcggattgcgaatgtccgctttactagctgctgctgcgacaataagtggaggcaattatgcagttagttgatcgcgcactgagtgcgctggaggtcctgagccggaacatggatggcttgtctgttacggaacttgcagaacagctggatatcccggcaagttctacccatcggatactcacaagtctgaaaggaaatcaccttgttgttcaggatgcacagaccaaaaaatatcgtctgggatataaaatctgcggtattgcggcaggtgttgtaaagggaagtgcactcacacaggcagcacagacatcgatgcagaaacttgcagaaaaaattgacaggaatgtagtcctctgtatcatggagcacggcgtcgccatgaacattgcatgcagtgaacgcggcgattccaatatgtacatgatgaagatcggtcatgtgatcccgttttattctacctctgccggccgtgtgtttatggcgtatatggacaggaaacaggcgcttgagatcctggaaaaagagacgagaacaaagactacgccgaatacaaaaacagggctgcaggagttaaatgcagagcttgaccgcatccgcgcccagggatattccgtgatcgatgaagaactgcagcttggtatccagggcgtggcgtgcccgatctttgatatcaacggggagccggcggcagcactggcatttacttcgctgaaagacggaaatgaagaagagatgcaggaacggatccgcctgttaaaggcatatgcggaagaaatttctgaggcaatccggtaaagaaaaaggaggaacgttatgagtgagtacagcgtagagttaaaaggcttaaacaaggtatacagcaacctcttaaaagaggatacagtagcgttgaaggatatcaatcttcagatccggccgggtgagtttatctcgatcatcggtccgtccggatgcggaaaatcaacacttttgcggatcatcggaaacctcgacaaaccgacatccggcacgatcgagtaccgtgacggcgcagaccagcagatgggctttgttttccaggattctgtcctgcttccgtggaagaatgtaagacagaatgcggaatttccgcttgtgatccagaaaaaacagacggaagagaatgagaaaaagctcgatgaactcttagaacttgcaggactttccgagttcaagacagcgctcccgcgagaactttccggcggtatgaaacagagggtttccatcgtccgtgcgctttcctacgatgcgccgctgctcctgatggatgagccgttcggtgcgctggatgccctgacgcgggaccatttaaatgaggagctgctgaagatctggcagaagacgaaaaagacggtcatctttgtcacacacagcatcgaggaagcgacgttcctgtcagaccgggtgctcgtcatgtcggcgagaccgggacgcgtaaaggagatggtcgagatcgatctgccgcgcccgaggggagaagcgacaagaaatgatccgaaatttacagaatacaataagtacctgagggggatcatcggatgaagaaaaatggaaaacttcagggtgtcttaagaacgatcggggagtatgcactttccgtcggtgtctttattgcgatctggtggatctatgttgcagtgaaacatgtaccggcgtacattctgccatcgccgccgaaagtatggaacagtctggaaaaaatgtttgtaaagggaacggtttatccccatctctggacgacaacatatgaggtcattctcgggtttgtgatcggagcgtttctcgggatcgtacttggatatatatttatcaaggtcgatgcgttgaaaacgatgctgatgccgtatctgatctttctgcagacagcgccgaagatcgctcttgttccactgttcgttatctggttcgggatcggacttgtatcaaaagttgtcctgatcatttccatggtactgtttccagtattgtcaggcatgatgcttggattggaatcgatcccgccggatgtcagaaacctgatgaagatcttaaaggcatcaaaatggcagatcttttcacaggttgagatgcagtattcacttccggcactttttgcgagcatgaaagtggggatcgtccaggcagtcatcggagcgatcgttgcagaatggatgtcgggaaaacagggccttggctacattttaacatatgcatcatcgacatatgacacaccgatgctgctcgcaggcatcatcgtaactatcatcctgggaatcgcgacataccaggtgatcagcgtgctggaagataaattcctgtactggcatgagtcaaagaactgataaggactgcgcctgttcggaaaaagacaaaggaagaaagtttttggaggaaatttgtgtgaattttacatcggcttcatcaccgacgatgaatggaaaaatgccgcatatccagtgtacggcagatgatattggagagatcgtgctgcttccgggggatccggcgcgcgtatcgatgtttgaggatctgctggaagattacaggatcgtcagcaattaccgggaatacgtggttgggacaggatattacaatggcattaaaattacagtgtgttccacagggatcggcgcaccgtcaacagagatcgctgtgatccagctgatcgcgctcggagcaaaagcattgatccggatcggcggaacaggtgtcctgaaggaagaggtgccgtgcggcgctatggtattaaacacaggtgctgtccggagaggcggttcatcgtgcttttacgcaccatcggaatacccggcgctggcatcgttcgaggtcctggactgtctgaaacgtgcgtgtgaagagagagaacagccatattccatgggagtctgcatgtcggtcggctctttctaccatggtcagggacgtcagatgccgtttgaaacgggatatgatgaaaatgcggtcctggaacagtataaaaaatggaacatcctgaacatggagatggaagcggagacgatcttcacgctggcgtcattgaacaatgttttctcgggaagtatctgcgcggtacactgcaaccggatcacggaccagtggctggtagattttgaacctgcgcagaaggaaatgtgcagaacggcactggcagcaggagaaaaattatataaggaatatcttcacagaaaatagcggaaaaagatactgcggataacggatctatgataatgacccggccggagacggcaggggaaattataaatgccgggaatatcatccggcgggagcaaatgtatcaatccattatgaaaaggagaaggagagtactatgagaaagaaaattcttgcaaccgtactgacagcagccatggcagtgtccatgcttgcaggatgcagctctgacagcgcaaacaaagcgagtgaggcagccgcaacaacagcagcagagacaactgctgcggaagagagcaaagcagacgaaacaacagcagccgaggcaaaggatgcaggagacttaaagactgtttccatccagatcgacggttccgctgttccgtattacgcaccgttatatcttgcacaggaaaacggatacttcgcagaagaaggtctgaatgtagagttttattatgcagcagctgctgatatcgtaaagaatgtcgcagcaggaaatgttgagttcggtttcccgaatgcagatgcagttgtagctgcaaaagcacagggaatcccggtaaaggttgttcacacaacataccaggaaggtcttggagcgatcattttcggaagtgattccggaatcagcacaccggctgacttaaagggcaaaaaagtagcggtaacaagccttggaagcgcaaactatttccagcttcaggcagctctggagtccgcaggacttaccatcgacgatgttcaggttgagatcgttggtacaggtgcgatcctgacagctctcactgagggtcaggtcgatgcgatcgtattctccaaactcagaacgatcgagttaaacaactccggtttcgctgcaagcgagatcacatgtgaccagttccttccgtccttcggaaacgtattagttgcaggcgacgcacttgttgagaaagatccggaaacagttgatggcttctgccgcgcattaaacaaagcgatcgaatacatcatcgacggccatgtagaagaggcagttgatatgtccatcgagaaatatgcaccgacattcgcagaaaagagagatgttgttgtccagatcttaaatgatgtattcgtaaagacattatggcagagcgactacacagcagagaacggaatcggcgcatctaatccggagaagtggcaggcactcatcaataaatccaaagagatcggcaacatcgatgagaccttcgatgcagcagagcttctttatacaccggcaaaataagagagaacaaagatttcccagctccgggctggaagagttatgaggtgagagatgttttacagaaaatacagaaaaatcattcttccggcattgtttctgccgttgtttctgatcgtgtgggaactgtatatccggctctttcatgtaccgaattatctgcttcccggcccggcagaactggcagattcaatggtaaagctgttcgtcagcggtgatatcatgaaacatatccgtgtcacgatggaagagatccttatgggaaccgtgatcggtattgtgatcggactgatcctcgggtatattatggcgaagatccggtttattgaacgcctgatcatgccgtttgtcatcattatccagacagcgccgaagatttccctcgcaccgttatttatcctgtggatgggactcggcatcgaatcaaaggcagcccttgttatcctggtcgtatcattcccgatcatgatcaacgaggtgtccgcgatccgttccattgaagataatgtatacaatctgatgaaggtgctcaaagccagcaaatggcagacattctgtaagatcgaggttccgtattccatcgaaatgatgctgtccggtatcaagcttgccctgacacaggcgatgacaggtgctgttatcggcgagatgatcggagccaaagcgggactcggatatctgctgacactgggaagcgagacatatgatatcaagatgatcttaaatgcagtcatcctcttaagcgtgatcggtctggcgctgtatctgatctcggaatttgtcgagaaaaaggcgctttactggaaagtcatcgataagagtgtggtcggttaaaaatcaaaagaaaaacaggcaaggttcccctgcggcgcatgatgctgcagcggggaccttgttttttctttagccggccatcatgtggatggggagagattgttactgcccgcgttattcaccggctgcagtccggagtattttatgatggtaaatcatatggaatgatgatatacttaacttatatgcggatcgcagaatatctgtaatttttcatgtctgcaggatacaattcagaacggtccatacaagagtgcgatagaaatggagagcgaatctatgaaaaaaatgatttcctggaacgtaaacggccttcgtgcctgcctgggaaagggatttttagaatatttaaaggagacggacgcagatatcttctgcatccaggagagcaagctgcaggaaggccaggtagatctggatcttccgggatatcaccagtactggaattatgcggagaaaaaaggatattccggaacggcgatgtttacgaaggaagagccggtcgcagtgacttacggactcgggatcgaggaacatgaccatgaaggccgcgtgatcacggcagaatttccggaatattacgtgatcacctgctacacgccgaactcccaggacgggctgaaacgtctggattaccggatgcagtgggaggacgcgttccggacgtacctgaaagagctggagaaaaagaagccggtgatcttctgcggcgatctcaatgtagcccacaacgagatcgacctgaagaatccgaagacgaaccggaaaaatgcgggattctccgatgaggaacgcgcgaaattcacggagctcctgggcgccggatttattgatactttccggtatttttacccggatcaggaagggatctactcctggtggtcttaccggttctcggcgagggcaaagaacgcgggatggcggatcgactatttctgcgtttccgagagcttaaaggacaggctggtgggcgcaaagatccatacggagatcatgggaagcgatcactgtccggtggagctggatatcgactgataaatagtggaatgctgaacgttggaaaatcaacgacgatagatcgaaataaaacaatggcaggttgacataacatgaacttagtaacggcagaacatctgacgaaatcatatacagaacgattactctttgacgataccgatttttccatcaacgaaggcgataagatcggtctgatcgggatcaacggaacaggaaaatccaccttattaaagatggtggcgggacttgaggagccggactccggccggatcgtccggggaagaaatctggacatccgctatcttccgcagaacccggtattccacccgggagagacggtgttagagagtgttttaagggaaaatgagggacatgagcacgtctgggaccttgagagccaggcgaaatccatgctgaaccgcctcgggattccggattttaacgagaaagtggaacatttgtccggcggacagaagaagcgcgcggcattggcatcggtgcttttatcgacagcggaacttctgatcctggacgagccgacgaaccatcttgacagtgagatggcggactggctggaagattatttaaagaaatttaagggcgcgctcctgatgatcacccatgaccggtattttcttgacagcgtgacaaaccggatcgtggagctcgataacggaaaactctacagctatcaggcaaactatgagggattcctggaactgaaagcggagcgcatggacatggaaaaggcgtccgagcgcaagcgccagtcgatcctgcggaccgagcttgcctggatgcagagaggtgcgagagcgcgttccacaaagcagaaaggcaggatccagcgcttcgaggcactgcgggacaaaaagggaccggtggaagacggaaaagtcgagatggagtcgatctccagccgccttgggaggacaacgatcgagatcacggatctctgtaaatcatacggggacaaggtcctgatcaaagattacacttactttttcttaaaagatgaccggatcggttatatcggaccgaacggaagtggaaaatcgacgctgatgaagatgatcgcgggctgggtaaaaccggattccggtacgatcgagatcgggcagaccgtaaaactcggctatttctcccaggaaaacgaggacatggacacgagtctcaaggtcatcgactatatcaagaatgtcgcagagtatgtaaagacgaaggacggcagcatcagcgcatcccagatgctggaacggttcctgttcccaccgtctgtccagtacacggtgatcgaaaaactgtccggcggcgagagaagacgtctgtatctcttaaagatcctgatgagtgcaccaaatgtcctgatcctggacgagccgacgaatgaccttgatatccgcaccctgatgatcttagaggattatcttgacagcttccagggaatcgtgatcacggtttcccatgaccggtatttcctggaccgcgtggtcggaaggatttttgcgtttgaaggagacggaaaactccagcagtacgaaggcggattcacggattatcaggcagcaaaggcggagcgggaggtgaagcttgcggagagcgcggcggagaatccggcatctgcgaagaagtctgcggataagggggacgggacagccgcagagggcgatccggaaggaaatgcgccgcggacaaacgtgaaaccgagggaaaagaagctgaaattcagctacaaagagcagcgggagtgggatacgatcgaggacgatatcgcgaagctggaagaggcggttgagaatctggaaaaggagatcgaggcgtccgcaacgaactttacgaagctcaatgagctgatgaaggaaaaggaagagaaggaagctgcactcgaggagaagatggaccgctgggtatacctgaacgacctggcagaacagatcgaggcgcagaagaataaataatactcatgtcggggaaaacgggggatttaaaatggcagaatatcgaaacagtaacagaatcctgtatccacttggtgtcacgcaggaagaaaaaagcgctcatgtcctggtgcagggacacggggaggaggttttcctgctcttataccggccgggcgagaagaagccatgtgagaagatcccgtttgatccgaaacaccggatgggagatgtctggtcactggaactggatcgggctgatcttgcatcatttgattataatttcatgattgatggaaaaattgtggcagatccctatgcgcggatccttaccgggcgtgaaaaatgggcggaccggaaatgtgccggaaagccggtgcagtgccgggtattgtcggaagcgtttgactgggaagatgatgcaaatccggaaatcccgtatgccgatacgatcctctacaaacttcatgtccgtggatttacagcgcatgcgtcctcgaatgtttctgcccgcggaacgtatgcaggcatcgtggagaagatcccatatctgaaagacctcgggatcacggcggtggagctgatgccggtgacggagtttgacgaggtcatgatgtcgtcatccggaaatggatttcatgatgcgaaatcggaaccgacgggatatatcaattactggggatatggaccgtcatatctctatgcggtgaagtcggcatacgcgtctcacggggagatgtcggcggagagcgagtttaaaacgctggtaaaagagctgcacagggccgggatcgaatgtattccggaactgtattttaccggaaaagaacttccgggggagatcgtatcggtccttcgctactgggtagaggagtatcatgtggacggctttcatctgtcgggattcccgaatcttttgctggcggcggaggacccgttcttaaagaggacgaagctttttgcggaaaactggaacgaggtgatggatcgccgcccgaaaaagggctatatcacgccgggagacggtccggtttccgttgcggaaaagaatcttgccgagtacaacatgcagtttatggaggatatgcgccgtttcttaaaaggtgatgaaggaatgctccaggcgttcgaattccggagccgcaggaatccggcggagtatgcggttgtcaactacatggcgaacacgaacggcttcacactgatggatgcggtctcctacgaccggaagcacaatgagaaaaacggtgaggagaaccgggacggaagcgattacaattattcctggaactgcggagcggagggaccgacgagaaagaaaaagatcgtggagctcagaaaacagctgattaaaaacgcatatctgctcctgtttttgagccagggagtaccgcttttgatggccggcgatgagtttggaaacagtcaggacggcaacaacaacgcctactgtcaggataatgcggtctcatggttaaactggaagctcctggagacgcataaggaccaggtggagtttgtgaaacgcctgatcgccttccggaaatcccacaagatgttccacatggaccgggaaccacggatcatggactacaagtcctgcggccgtccggatgtctcctaccacggcgaaaacgcctggaaaccggaatttgaaaatttccggcggcagttcgggatcctgtactggggcgcttacgcaaagaaaccggacgggacggatgacgcgaacttttatgtcctctacaacatgcactgggaaccgcatatgttcgggcttccccatctgccgaaaggcgcgaagtggcatgtgatctgcagcacggcggatccggatgtggaagatctgccgtctgatggaaccggagaagtcctgaaaaaccagatgatgctggcagtgccgccgcgcgggatcatgatcctcgaaagtgttgcggatccggattcggggaaggagacgaaaaaaggaaagagcgggagcaaaaaagagaagaatgagaagacagatctggtcgaaaagtcctgtgaaaaggaagagaaaagtacaccagaaaatggaaaagagctgtaaaagtaaataaactgaaaattgtgcactgcgttcctggatataaaaaatccctgccatgagatgagaaccgccggaagcttaagaacttctgttttgcggtatcatttcagtggcagggattctgcttattccggataaactaactgctcttcccggatattctcaaggacctcatcatagaactttccggcaagatattttgccatcggaaggttcatatcgagatagtttccgcagtcgcgggcagcggcacccggaacatctccctcaaaatcgcggatgaagaggaacatttcctggaggagcggcacgatatctgcggattcgtaatcacccacgaggagcagatagaagccggtccgacatcccatcggtccgaagtagagaactttatctttgtatacacggtggtttcttaagaaagtcgcaccgagatgttcaattgtatggatctcagcagtattcatgaccggttcgtagtttggacgggtcatacggatatcgaaggtggtaacatgattgtctccggcgatatctctccgggatacataaacacccggaaccagtttcagatgattgacagtgaagcttgtgatcttttccataataagatacaccctttcatgagttttacagattgttgtccgcagacgtgatgatgtctgcctgtatcagttttattataaagggaatggggaaagaatgcaagttactgtgcgatggcagaaattttccccctccccaatttttggaaacaaaaatgccgtatgatccggttatgagtgcagattttgccgctctggaatccaaagcatcggcaagatcccggggagatattgcgcttcaatttgaccttgtttcgcaagaatatttgtactataataactgttaacgggattttgggtaactagaataacgtcccataaggagtagttatgaaattactggcatatgaagtagacaaaagaccatttttaggtgttttcaatgagaatgaaacctgggcttatccgatttcggcagcgggaatggaataccggtccatgaaggacctgatccgcgaggcaggaccatctgagatggaaatgctggattatatttcaaaaaaggcaccgggggatgtgaacggagcagcaccggtggaagagatcaggattgtttctccgatcccggagccggatcaggatatcatctgcctggggatcaactatatggatcatgcggcggaatccgcgaggttccagaaagaggagtttgcaagacctgagaaggcaatctatttctccaagcgcgtcaaccggacgaatgacccggacgggatcattccggcacataaaaatttgacgaaccagctggattacgaggcagagcttgcggtcatcatcaaaaaggacgcaaaggacgtaaagccggaggaggtaaaggattacatcttcggctatacgatcatgaacgatgtcagcgccagggaggtgcagacggaacataaacagtggtacttcggaaagagcctggatggatttacaccgctcggcccgtgtatcatgacggtcgattccactgcgtttcctccggtgttaaaactccagtcaaaagtaaacggagaactccgtcaggattccaacacaggactttttatccatggaatcgaagaagtgatctgcgaacttacaaaaggaatgacattaaaggcaggaacgatcatcgcaacaggaacgccggcaggagtcggcatgggattcgtaccgccgaaattccttaagacaggcgatgttgtggagtgcattattgaagggatcggaactcttaagaatactgttggggagtaaaatgagaccaggtgattgcttcatgcatgattgaaagcacatctcataaaacgaaaagttgccatgaagggagcaaaaaagtcagtcagaatgactggctgctcttttcgtggcttttttgttttatagggaaatttcggaggaacttcctgtgaaacaaaaaggcattgtgcgtctaagatgcacactcgcgtgaaagagaaagattgtcgcaagcgaccgcgcggtacaggactatgccagagcataatcctttcgggcatccagctgccggtaaatgccgtcgcagcagcagattttgacataaggagagaacaaaagtggaagatatacgcgaaatgttgaaaaaggtggcagcaggcgaattgtctgtggataacgctgtcctggaactgaaaaaggagccgtttacggcggcgggatatgatgatctgggatttgcaaagctggacacgcaccggaaactgcgtcagggcgcggcggaagtgatctacggggcgggaaagactccggagcagatcgccgggatcgtggaagcaatgaaaaaacgcgggcaggagacgatcctgatcacgcgggtggatgaagagaaaagtttaaaaacagaaaaactactgtcggaaatctatccggacggcagcggataccggtattttaaggatgcgaaggtcgcgatctgcggaaacttcccggaaaaagacggcgtcggcacgattgtcgtggcgaccggtgggaccagcgatatcccggtggcggaggaagccgcgcttacggccgaggcactcggaaatcaggtggagcgcctctatgatgtgggagttgcgggacttcaccgcctgatgtcccatatggattcgatcatgaatgcccgcgtgatcatcgcgatcgcggggatggaaggcgcactcgcaagcgtgatcggcggtcttgcggactgtccggtgatcgcggtgccgacgagtatcgggtatggggcgtccttcggcggtgtttccgcactgctttccatgctgaactcctgcgcgagcggcgtcagtgtggtaaatattgataatggattcggagctgggtatctggcgagcatgatgaaccatatgcggggatgatattagagataagcggaggtatttcgaatgaaaacattatattttgactgcggaatgggcgctgcgggtgacatgctgatggcgtccctctatgagatctgcccggacaaggcaggatttttaaagacaatgaatgagatgggtttgccgggactctctgttgaggcagaaccggctgtgaagtgcgggattaccggaacgcatatgaaagtgacgatccacggtgaggaagaggagagcgtggatgtggatctgcagaagcatgtacatgaccacgcagagcatcacgagcatgctaataaccatcatgaacattgccacgaccacgaagcggcggggaaccatcaccaccatgaggctgaggtccatcaccatgagatggccgctgatatggcggacaatactcacatacatgcatacgaccatgatcaccagcccgatcatgaccaccatgatgagcacgacttccatcacactcatacccacgaggaaacccatatagaagaggattccggccacccacaccatcatcacgccagcatggctgggatttctcatattattgaacatttaaatctgcctgatgaggtcaaaaaggatgttgttgcggtttaccacttgatcgccgaggcagagtcccacgtccacggtaagactgtcgaggagatccatttccacgaggtcggcactgcggacgcgatcgcggatatcgccggagtctgcctcttaatgcatatgatcgccccacaaaaggtcatcgcatccccgatccatgtcggaagcggaaacgtccgctgtgcgcacgggatcctgccggtcccggctccggcaaccgcctttattttacagggacttccgatctacagcggagcaatcagaggagaactctgcacgccgaccggtgcagcactcttaaaacattttgtgacagaattccgggaaatgccggtgatgcggacatccgcgatcggctatggtatgggaaagaaagactttgagcgcgcgaactgtgtgcgcgtccttctcggtgagacggaagagagcggagatgaggtagcagagctttcctgcaatctcgatgacatgaccccggaagcgctgggctttgttcaggagatcctgtttgcagcaggcgccctggaagtctatacgatcccgatcggcatgaaaaagagccgcccgggcattctcctgacttgcatgtgccgctgcggagataaagagaagatgatctcattgctctttaaacacacgacaacacttggaatccgtgaaaatatcagcagacgctatactcttacaagaaccatgaaagaacacgagactccgtatggcgtggttcgcgagaagatcgcggaaggttacggcgtgaaacgcggaaaatttgagtatgaagaccttgcgaagatcgcgagagagcaggggatgagtcttggtgaagtcaggaagatcgtaaaaaataatcagtagagaatgacaataatagtgaactacatcggcaattgaataaccgaggattccggcttattatcctaagcggtgattccggaattattacagtgcatggacttcctcagcccatgcactgtcgatcttttgtttcacaaattggaaatattaagtccaacattgtatcttgcgcggcttttgtgtcgggcagtttaccatttttctctataaccataaaagatagattcacagcatagtttttaaggctaaacctgaaaactatgaaaaaacagcatgatacaggatctgtagcgccaacaaacaagaaccggcatctcatccgcagatggaataccggttcttgttacatgacgttcttataacgcgcttattatcaattagccaaaatatctctttaagagaccagcaaatgccttaccatgtcttgcctcgtctcttgccatctcgtgaacagtgtcatggattgcatcaagaccagcggcttttgctctcttagcgaggtctgtcttaccagctgttgcgccgttctcagcctcaactctcatctcaaggttcttctttgtgctgtctgtaacaacttcgccgaggagctctgcgaatttagcagcgtgctcagcctcttcgtaagctgctttctcccagtaaagaccgatctccggataaccttctctgtgagcaactcttgccatagcgaggtacataccaacctcagaacattcgccgttgaagtttgctcttaaatcttcaaggatatcttcacttacgccctttgcaacaccaactacgtgctcggaagcccatgtcatatcgccggactgctcagtgaacttggaagccggagcgccgcactgcggacatttttccggagcagcctcgccctcatatacataaccacatacagaacatacaaatttcttcatagtatttttctcctttttaagatttattatctgggatcagggagtatcaaaatctctgatcataaatgatgcaacatggatcacagttatttttaaataaataatagtaactgttatcgttattatactctaattgacaacgaatgtcaatagaatttttgaatttttagcttttctttttcagacagtcctcgcattcgccgtaaaagaaaacagtgtgggagtcaacgcgtcccggaaacggggcggagagaagatccgatgtatcatgaaccagatcgagaggcatatcaatgatcgctccgcaggtcctgcatacaaaatggtaatgtggatcagtattgtagtcaaagtgctctgagccgtccccgctggaaaaacgctggatctcgcccatatccgccagaagatttaaattgcggtacacagtccccagactgatttttggatagtctttgctgatcgtcacatatacggcatcggcggtaggatgatcagtgcggttcttcaggcattcccggatggactcacgctggcggctgaattttaatgctttcatgggaaacctcctttctggatcatttctaaatttaaatagacaataataatgataattgttactgaaataataacatcataacttttgaaagtcaagtatctgtgataaaaagttacaaaacagaagaacaaaaattccttgaaaatgaaatgtgaggtgtttatactatttctatatcatattttcataaatcagatatcaaccccacgaaacggaggtagctccatgtataacagacacatccgccatcttgtgacagagcttggaaaccgcctgtcagagaaagaatttttaaaaaagatcggcctcagccgccgcagtatgcagcagctgtttgataaagaccgctgggaagtgatcttcgagaaagcctttccggtgacgagacgcttttcctgcgcggaaatcctggaattctgccgggaagatatggaaaagctcggaaatgagccggaagagggctggctctccttcacttataaatatgtgacacacatcctgtatccggatgatgaattctctgcgtccgcggctccctgtgcgccgtctgcgctctacttcttaaatgttctccagtatttctttgatgaagaacggaaagtgatgccgttcgatccatatgatgatttccgctttttaacaaaagaagaatatgcgcattttgagcgtgcggatgaatatgagcactttatccgtgagttccgcgatcagtacgtctacgagatgatgcggttaaaccgtgaggcgacgcctttcgagacactcggtcatatcgcgggtgtccactatgttgccatgacggtagctcagggactttatgcggcaggcgttccgatcgatctggcgctggcatccggcgcggcggccggccatgatctcggaaaattcgggtgcaaaccgaatgagcgggttccgtatctgcactattattatacgaaccagtggtttaccgcctaccatatggaagggatcggtcatatcgctgccaaccattcaacctgggatctggagcttgacaacatctccgtggagtccctggtgctgatctatgcggacttccgtgtcaagcagatgcgcggcgaggacggaagagaactcacgaagatctatacactgaaggattccttcgacgtcatcctgtccaagctcgacaacgtggatgaaaagaaacggaaccgctaccgtgtcgtttactcccgtctgtacgaatttgagcgctacatgcgttcaaaaggcgtggatgtggacctcacaggccatccggacccggcagaaaagccggtggacatcgtcctgcagtccggaaaacaggtggtgcgctcgtttgtattctgggggatcgagcacaacatcgacgtcatgcaccggctcggcaccgagcgccagttcggaaacattctcgaggcggcgcggagcgagaaagactggaagaatgtccgcgcatatttaaacatgttcaatgaatattcgattcacctgaaccaccgccagaaagagcagacgatcagcttcttatatgagctcctgttaaacagagagggagacatccgcaggcaggcggcggccctggtcggaaaaatgttcgcggacttcaacgccggataccggaaagaacttccgaaaaacatgccggatccggatgacaagacggctctgacgctctgggaagaatacatggcgcagctcgtatgcccggactatcgcctgacattacagcagaagcaccggatccagaactccttaaaatttgtcctgatatctgccatggagcgaagctcggagaaggtccgggaggagctgttcggggtatttatgaaatggtttgacggaagacaccgcctcgtgggggatccggtcttctaccttttagactgcatcttttccctgccgctcgatctcagcagcaaggatggacatctggagagcctgatcagtttcgcgatcgaacacatggaagacgaggatgagaagatccagatcgctgcggtccgtgtcctgaaagttttgacgcaggcggtgacaccggagagcgcgtgctaccggcttgcctgcgatgcggcgaaaaagatcgatccgaagacgatcacactcctcttcctgcagtaccggatctttacaaatctgcgccttgatacgagcagacagagagaagtcctgtacggacatgacgtggttagcgatatcttccttgaaaacctgaaatcggcgaccccgtggatcttaaaatccgtcaatatcaagttgctggcagatcaggtggaccatggaaaacgagagcatctgctccatatctgtgcccacttctcgaacctcatcaaggtcagtgagcaggtcggagtccgccacgatgcgggacgtgcactcctgcgcctggcccaccttctgacgacggaccagaggaacgagatcgcggtcgagctgttaaaaggcctggaagtcggcgagtacgagttctcgaagtatattccggaatatctcggcgaatttgccttgtggcttccgccggaacagctcgatgacattattgagcgcctgcatatcctgctcgcgaacggaaatgagcggatcgtgtctgtcgcactcgatacactggggatcattctggagtgctattccagatatccggtccgcttccaggagccggatgagatcgccgaggaccggaggatgaagatcctgggactgatcttaagctgccttgcaaactacagagaacaggtccgccaggaggcgcttcttgtgatcgggcagcatattttcggctcccagatccttgcagagcgcgataagaaccggatgttctctctgtgtgcgaaaaaactgctgttcctcctgaatgagaataaaggcggagagctcagcctctactaccgtgcggcgaccttgtcccacatcggacgtttcatctcccgctaccagctcttcggcggtgacgtggagaccatgacgagaaataaagtggcattcttcccggggaccttcgatccgttcaccctgtcccacaaggagatcgccagaaagatccgtgaactcggatttacggtatttctcgcggtggacgaattttcctggtcgaagaagacccagccgcatctggttcgccgccagatcgtgaacatgtcgatcgcggatgaattttatgtgcatctgttcccggacaacacgccggtcaatatcgcgaacccggcggaccttcgcagattgaaggaaatgttcccgaatgaggaactttacatcgtggtcggatcggacgtcatccacaatgcaagttcctataagaaagagccggaagaaaattcgatccatttcttcaatcacatcgtattccgacgggccggagaagcacatccgaccgaggtctacaatgagatcaggggaaaagtcgtgcagctggagctgccgcgcgagctggaagatatcagctccacaaagattcgagagaacatcgataaccaccgtgatatttccagcctgatcgatccggttgttcaggagtacatttaccataagggaatgtacctgcgtgagccggagttcaagccgatcctgagagcgaaagcgaccgcttttgagaatgcctccggaagagaccatgcggtcctggacgagctcggaaataccgtcctctacggacatccggatgcccagacgattctcacgaggatccaggtggagaacgacagcctgctgatcctgaggaacaccgtggaaggcgagcggccggtcggttttgcgagctaccgggagatcgggaatgatgagctgtacggagtcttaaaggacatggagcttgcgaatctggtgcgcggaaagagcagccgggagatcctcctgatcacggggatctacgcgagagaggagaataccggggacagcgagatgatccgggatgccgcacagcagctcctggtggaggtcgttgcgaaagagctggagaagaattacagctttgcgctgttcgtggcagagcgcggaacggcggcgaagcatgtcgtgtacgcgctggaaagacagggctttgtgcgtccgcacctggcagacgaaaatgacaagaggacgatctacctggtcgacatgcatgaaccgctcatgttcctgcataacctggagacaacgatcaaggaaccgtttgccagcaatccggcggtcctcagggcaatcgagaagaatcataagaaactgcagatcgcgatgacgaagctgtatccgggaaatctcgtcctttccttatcctccggagtcatgcatcaccgtcttgtggacaggattacgtcgctgaacgatgtgccgagagaaccgctcgttccgagacggctcggaaagaacatgtgcgttccgttcggcaagatcctgagaggaaaagttgtcccgaatacggtgacaaagacgctgcacacggataaggtctatgagccggatctggaaagctacacgatcgagccgttcccgtattattcaccgttaaacagtcagatcgagacgatccgttccttcgaccgtccggtaatcctggtcgacgaccttgtccacaaggcagaccgtctccgggtactcgttccgaagctcagggagacggggattccgatcaaaaaagtcgttgtcggagttctgtccggctacgggcgggatctgatgcagcagctgaaggtgccggtcgagagcatctactcgatgccgaatgtgcgccagtggttcgtggaatcgacgctgtacccgtttatcggcggtgacacggtgcgccgggaggaaatgaaagttgcgggacttcagccgtccatcaacatgatcctgccgtatgcgacaccgaagctctccggctgcagcagggaggcactggtggagttttcggcctgctgtatcgagaattccagggatctattacaggtcctggaggcggagtaccggaaacagtacgcgaagaacctgacgctgtcgcgcctctccgaggcagtcatcctgccgctctgcccggataagggaagctgcatggagtacgatgagaatctcgcggcatcggtttatctggaaaatgatctggagatgctgcagaggatgagaaagtttatggtaacgatccggtaggtctgtgtattggctgtactgactgtaaaaacggacttgcaggaaaaagtcttgttgacggaaggtgttatgaaccagagatacacgtcggcatcgaccggggcagagatatcttaatggagttctgcctgcagatatgaaactcgcgaagcgtgttttcacttgttgatagtaaaatagagaggggcatcataaaatggttacatattataagatcggggatgcgttctgcgcgtccgttcacggcaatctgccgtatgaaaaaacagaaaaaccggcagcgggaacgaagcttacctggctgtttaccggagatccgggaagccgccgcgcgtcatttcttgtcgatcacccggcggaactctttgcagaaaaagaggatgtcagctggttaaatacaaacagattggatgcgtccgcaactgacggacagatcggggagctcccgcaggaagtcatggaccagatcaagaccgggacactccgcgcggtcaacgcatcccatccgaaatttaaggaaatcctggcatacgagccgaaagacggcaaaaagcgtgtccatgtgctggcgatcggcgatgtcggaagcatgcttttgacaggacttcaccttctcggcggagatgtgatctcctcgatcgggatctgcgatatctccgacaaagtgaccgcccgctgggagtttgaggagaaccagatcgcatatccgtgggactacgacgcgatgccggaggtggatgtcgtggccccggaacatctctttgactgcgatgtgttcgtatttgtcgcgtcaaagggaatcccgccggtcggctccggcgtcaaggacgtccgcatgtaccagtttgagaataactcgaagatcatcggccattacgcgaagatggcgagagagaagaactttaagggacttttctgcgcggtatctgatccggtcgatccgcttgcaaagaccgcatttctcgagagcaataagaatgaggccggggaatatgactggatgggacttctcccggagcagatccagggattcggtctcggagtcatgaatgcccgggctgcatattatgcaaaacgcgatccgagattcaaacagttcctgacagaggggcgttccttcggaccgcacggacaggaccttgtcattgcggattccatcgaaaattacaacgatgagctctcgaaggagctgacaaacctgactgtcaccgcaaaccttcacatgcgcgccatcggctacaaaccgtttgtcgcaccggcattctcttccggcgcgatctcgatcttaatgacgttgagaaaacagtggcactgcggatccgtcttcctcggcggcgtctacatgggcgtgaagaaccgctatacggatcatggactcgagacggaggcactggcgctgccggaaaagctgtacgagaggatcgaatttgcggcggagaacctggcgaagatcgtgtagaggctggggaacgcatattgtttcttttttataggagagtgagacatcatggagaacgacagattacttgtattgtacccgcaaaaacgtggttcggagaaagagcgggcgcggctggatgaggttttagaggcggcactggacgggatcgatgcagagatcgtggagaacatggatctcctggaacaggacccggaaagataccggggacggcggctcctgttcgcagttccgctcggaaaaaacggcatcaaccgcggttactatgaagtcctcgcctggctgcgcggcggtgaacaggtcctttccggtgctgtcggcggcatgatcatcgatgcggagagtgaattttacacgaaagcgacggcgcgggagctggcggtcgcggcgaaccgtgccggctgcgcgtttgtcggacggccgctggtggaaggaactgcctctctcgacaactatctgatccaggctgcgaacatgaacacggaccggttcggtgcctataaaaagagtgcgcagatcctggctcatgagattctggagacagagtgggagccgaagaaagaagcacatctgctggtgctccacgcttccaaccatagaacgtccaatacgctggcgatctggcagaaggtgaaggaacaactggatgatcggatcaagatccaggaggtcaacctgcggaacggtacgcttgtggactgctcgggatgcccgtatcagatgtgtctgcattttggtgaacagggaaagtgtttctacggcggagccatggtggaagcaatctatccggcggtcaagtgggcggacgcgatcctgctcctctgtccaaactacaatgatgcactctcggccaatatgacggccttcatcaaccggctgacggcgttgttccgcacaacgagattttatgacaaggcactgtttgcgatcatcgtatccggatattcggggagtgatctcctcgccggtcagctcgtcacggcgttaaacatgaacaagacgttctatctcccgggcaacttctgtatgatggagacggcgaacaacgccggagcggcgatgaagctgccggggatcggggacaggataagggagttcagtgagagagtcgcggatacattgctggagaaaacgcagaaataaagataagtgaaaggcagactgaaaatagaactgtataggtatggcggcacagaagagaaaactgtgccgccatattttatctcagtcagataagacttccgttttttggatggtggataatacagattcatcttagtgggaggagtatgatctctgctcgacatgaattttgagatattgtaataattgcacaacttatgcatatatgtacaatttaaaagtataattacgcacaaataaacgcaacaattttataattttaagtaattgaacagcaatactttatattatggaagtaaacatttctgatttcgataaagaaaagaaaaaagtcgaaatttcagacgtttacaagaattaacaaaatttgttgcaaaagttacagacgcgttgtataatgaattcgtaagcttcctttgttaaaaactgaacaaaggaacagaaaaaaggaggtagaaagatatgagaaagagattttccgcagcaattgcccttgcactgtcctgtgcgatgatgttgaccgcctgctccggcagcaaaccggcagagacaaccgccgcagctggtgatacaaccgcagccgcagcagagacaaccgcagccgcagctccgagcggtgacgttcagaagctgacaatgggaaccggcggtacaaccggtacatattacgcgtacggcggcgtaatcgcgaatgtccttaacagcaaagacatcggtgtaaacatcaatgtacagtccaccggtgcttcaaaagcaaatatctaccttgtaaatgacggtgaagcagatctcgcaacggtacagaacgacgttatggattatgcttacaacggaaccgaccttttcgcagaagaaggtgcagcaaaagactttacagcagttgcagccctctacgctgaggtttgccagatcgttacatccggtgatatcaaatccgtcgacgagttaaaaggcaagagagtatccgttggtgacgccggatccggtgttgaattcaacgcacgtcagatccttgaagcttacggcatctccttcgacgatatccaggtcaataaccttggtttcggtgattccgcagatgcattaaaagacggcaagatcgatgctttcttctgtacagcaggtgctccgacaacagcgatcgtagagctcgctacaacaaacacgatcaaccttcttactgtagacgatgagcatgcaaagatccttgctgatgcacatccgttctacacaacttatagtattccgggcggttcctacaagggcgttgacgacgatgtacagactgtagcgatcaaagctactctgatcgcatctccgaagctttctgaagagaccgtttacaatatcacaaaagctatcttcgagaacaaagatgaaatcgctgctacccatgcaaagggcgaagagcttgatctcgattatgcagtttccggtatttctgttccgttccatccgggtgctgagaagtacttcaaagaagttggagcgatcaagtaattaccttgaaaaacaggaaagcaagattctttacagcggcggcaataatcacggcaattattgccgccgttcttgcatatacctttcgaagcggggactgtctggtcttaaggaacggggacacgaatgaagagtttgcccgcttccgggtaaaagagggggatgaattctcagtgacattcatccactcggtcaatcagtatccgctgacggatgtctaccagatccgcgaccataaaatctatgtggtccgcaccatctacaacaattttggcgcgggcgtccagacggagctcgaggatgggcagacactgacgtatgatgaaaacggggagatggtcatttccggatttgataaggagatgccgtatctttcgtacatcgtgggtacggtctcggaccatacactcacgatccatggaaaagaaatcagtctgagggaactctgcgggcgaaacagtaaagtagagttctcgtgtgaacataaaggactctgagacagaaaacgtgaacaaaaggcagaaagcattccggaactcttcaggggtgtaagggagaaagaacggaatgtgaaaaaaaggagggatttgcatggcagagaaagacaatatgaaagtcaacacatctcctgttgcggatgttgagaccggtaccgcggaagacgtcgaagccatcatgaaaaagtatgatcgtgaatcgaatacccgagtctgggaaggcgttccaaaacaggtgatccgctatcttctggcagctttttcactgttaatgctctacatgaacctgtttgcaaactgggatgagcgtgtgcgccgttccctgttcgtaggcgttgtcatcatcctttcattcctcatatatccgatgaagaaaggcagcacaaagaaaaactcgatcccgatctatgatattatcctcatggtactcggagcgggtgcttacttctacttcgttatcaactttaagacgatcatcggtcatgcgacccgaatcagccagacggaggttatcgtcggcgtgatcggtatcctgatcctcgcagagacctgccgccgcgttgtcggtatcccgatcctctgtgtagcgacattctttatctgctacgcattctacaacggactcggacagggcagagaatttgcagtcgttttaaaatctgttgtatacaacctgttctacacgacaggcggtgtcatcggtactccgatcggtgtctgctcgacgtacatcgcactgtttatcctgttcggtgccttccttgaggcgacgggaatttccgagttctttatccagctcgcaaactccttagcaggcgcttccaccggcggcccggcaaaggtagccgttatctcctccgctctctgcggtatggtatccggaagctctgttggtaataccgtaacaaccggttccgtaacgatcccgttaatgaaaaagaccggttacgaaggcgaattcgcaggagccgttgaggcagcttcctccaccggcggacagatcatgccgccgatcatgggtgccgctgcattcttaatggctgagatggtaggcgttcagtacggcgagatcgcgatgagagcgatcttcccggcacttctttatttcacaggtattttcatcacagtacacctggaagcaaagagacttggcttaaagggtatcccgaaggatgagcttccgaaattcggaccgttatttgtccgtcagggttatcttcttattccgttagttgcccttgttgcaatggttatgatgggctacacgatgtcccgtgcagcgatcatcgctaccgctcttgcaattcttgtcagcatgccgaacaaagaaacaagaatgaacccgacaagattcatcaacgcgttggaggcgggcggtaagaatacactttccgtagccgttgcctgcggcgttgccggaatcatcgccggtgtcgtaacaatgaccggtcttggacagctcctgatctccgcaatcgtcggcgttgccggtgaccgcgtgatcgtagcattattccttactatgttaacctgtatcgttcttggtatgggtgttccgacaactgcaaactacatcattatggctaccacatgtgcaccgatcctcgtaaacggtatgggaatcaacaagatcgctgccaacatgttcgtattctacttcggtatcgtagcagatatcacaccgccggttgctcttgcagcttacgcaggatccgctatcgcgaaatccaacccgatgaagaccgcgttaaacgcatcccgtcttgcgatcgcagcgttcatcgtaccgtatatcttcgcattcaacccggcaatgctcttcattgataccggtgttctcggagttgtgacgatcatcattacctccctgatcggactgttcggtgttgcagcaggtcttgaaggctacatgtttgcgaacctgaatgtgatcgagagactcttatccatcgtcggaggtctctgcctgatcattccgggaaccgtgacagaccttgtcggcatcgttctcgtcggaatttcagcggcactgcagatgatgaaaaagaagaaagcggctgtggcatagaagaaatggatgaaagttatatcggagtatattgcaaagaaaatttgcatatgatataatggctaagaaagaaatagaacatagttcaaatttacacaaaatgaaacccctcagagcggcatctctgaggggtttcttctcgttttatgtagttgagcatctacaggttagttaccgatccagtttactgtctaaccatttgatgatgtagtgacataccacaccagccatgacagcaactataaaagaaaaaacataatccaaatttacacctcctttctgtcaccagattggagtgggtaacgagacgagtatatcataggcaggagaaaattgatagttactccagtataaaacagagataaaaaatagacttttgtgaggaatatttgtgtatgaggagatccctgttttcattgattttatcttgcaagcgacattaaagtatgctacactttccgtaaagtttaccactgtatctgcgtaaagagaggaaggaaaaacgatggaattattatatggaagtacccgcggcggggagactggcgtgacagcatcccaggcagtgttaaaaggacttgcagatgacggcggtctctacgttccggagcgcatcccgacgttggacgtgacgatggacgagcttgccggaatgacatatcaggagacggcatacgcagttatgaaacagttcctgaccgattacacggaagaagaactgaaatactgtatttcccatgcatacgatgagaaattcgacacagaggagatcgcaccgctcgcaaaggcggacggtatgtattttctggagctgttccacgggaagacgatcgctttcaaggatatggcactttccattctgccgtaccttatgacaacggctgcaaagaagaaccacgcaaagaacgagatcgtgatcctgactgccacatccggagatactggaaaggcagctatggccggatttgccgatgttccgggaacaaggatcatcgttttctacccgaagaacggcgtaagccgcgttcaggagctccagatgctgacccagaaaggcgcaaacacatccgtagtcggaatcgagggaaactttgatgatgcccagacaggcgtaaagaagatctttggtgataaagaatttgcgaaagaactggatcgtatgggattccagctttcctctgcaaactccatcaacatcggccgccttgttccgcaggtcgtttactatgtatacgcctacgcgaagcttctcgcaaacggtgagatcgaaaaaaatgagaaggtcaacgtcgtagttccgaccggaaacttcggaaacatcctggcagcgtacttcgcaaaacagatgggtgttccgttcggtaagctgatctgcgcgtccaatgacaataaggtcctgtatgacttcttccggacaggcacatacgataagaaccgtgagtttatcctgaccacatccccgtccatggacatcctcgtttccagcaacttagagcgcctgctctacttaagctgcggaagagatgccgcaaagacaaaggcgatgatggagcagctttccacgaatggaaaatacgagatcacagcggacatgaaggaattcatgaaggacttctgtgcaggctatgcggatatggaagagaatgcaaaggagatccggaaagtattcgacgataccggatatctgatcgacacgcacacaggagtcgcagcagccgtttacgagcagtataaggcgaagaccggcgataccacaaagactgtgatcgcgtctacagcaagcccgtacaagttctccagaagtgttatggaggcagttctcggaaagaaagaagatgccgatgagttcgccctgatcgacgagatggaacgtatttccggtgtgaagatcccacaggccatcgaggagatccgcgatgcgaagatcctccacaaccgccagtgcaagccggaggaaatggaagaaactgtgaaacaaaccttttcaaagtagggtaaatcggttataatgaaaacagcatgacgacagccgctgccgtaataaatgctgatatggctgaacggtcagcatagattgagtctgtttcgcataataatggaaacagacggcagatccgcggacaggctgttctgtcgaaataaacgattcaaatggaggcctatatgttagtaacagcgaaagaaatgcttgagaaagcaagagacggcaagtacgcagtaggacatttcaacatcaacaaccttgagtggacaaaagcgatcctgcagacagcagaggaactgagatccccggttatcctgggtgtttcagagggcgcaggaaaatacatgacaggctttaagaccgtagtaggtatggtaaacggtatgctggaagagatgaagatcactgttccggtagctcttcacttagaccatggtacttacgagggatgcttaaagtgcatcgatgccggattctcctccatcatgttcgacggttctcactacccgatcgaagagaacgttgagaagacaaaagaactgatccgtatctgccgtgaaaagggaatgtccctcgaggcagaggttggagcgatcggcggcgaggaagatggtgtgatcggtatgggcgagtgcgcagatccgaacgagtgtaagatgatcgctgacctcggcgttgatatgctcgcagcaggtatcggcaatatccacggaaaatacccggcaaactggaaaggtttaagctttgagacactcgcagctgtcaaagaggcagttggcgatatgccgctcgttcttcacggcggtaccggtattccggaagatatgatcaagaaagcaatctccctcggcgtagcgaagatcaacgtaaacaccgagtgccagcttgcattcgcagcagctacaagaaaatacatcgaagcaggaaaggaccttgaaggaaagggattcgacccgagaaaacttcttgctccgggcttcgacgcaattaaagagaccgttaagacaaaaatggagttattcggttctgtcggcaaagctgactgattcgtttagcttgcattatcatgcagttaaagaaatgttctccctcgcagcagggagaacattttttcaagccagtattttcctactgatcagtgcagtagatgcgcagacttgctgaatcgttacgatttttgaaccaaatccgtctgatcctggtctttttgcggaaagagccggagtatcaggtaattgcatacaggataaaacgtatgattttcccgacagccgtgatcagctgtagccgtgtgttttacgcgcgtgacgcagcaaaatgccccatacggcggctggctatttatacagaaacgaggaggagaagtttatgagtgaaaacatcaatgtagaggcgatcttcggagagaatgtgttcaacgactccgtgatgaaagaacgtctcccgaagagtgtctacaaaaagttaaagcagaccatcgaggatggcagcgaactggacccgacgatcgctgacgtggttgcccatgcgatgaaagactgggcagtcgacaacggtgcgacccattatacccattggttccagccgctgaccggcgtgaccgccgagaaacatgattcctttatcggaaattttgattcccagggaaaagttctgatggatctttctggaaaagagctgatcaagggcgagaccgacggttcttccttcccgtccggcggtctgcgcgcgaccttcgaggcccgcggctataccgcctgggactgcacttccgcggcattcttaaagaaagatgcaaccggcgtaacactctgtatcccgaccgccttctgctcctacagaggcgaagcgctcgataaaaagaccccgcttctccgctccatgcaggccatcgacaaagaggcgacaagaatcttccaccttttcggacacacagaagtaaagcgtgttaccccgtccgtaggaccggagcaggagtacttcctgatcgatcgcgacaaatatttaaagagaaaagacctgatctacaccggacgtaccttatttggtgcgatgccgccgaagggacaggagatggatgaccactattacggtgttatccgcgagcggatcggttcctatatgaaagagttaaatgaagagctctggaagctcggcgttaccgcaaagacccagcacaacgaggtcgctccggcacagcatgagcttgcaacgatctacacaaaggcaaaccttgccgttgaccacaaccagatcgtcatggagacgatgaaaaaggttgcaagccgtcacggaatggcgtgcctgctccatgaaaaaccgttccagggcgtcaacggttccggtaaacataacaactggtccctggcttccgataccggcatcaacatgctggatccgggcgtgactccgcatgagaatatccagttcctgcttgtccttgcctgcattatgaaagcagttgaccgccatgcggatctgctccgccagtctgcggctgttccgggcaacgactaccgtctcggcgctcaggaggcaccgccagcgatcatctccatcttcgtaggtgagcagcttgaggatgtgatcgaccagctgatttctacaggttccgcgactcactcaaagatcggcggtaccttaaagaccggtgttacgacacttccggatttcgataaagatgcgacagacagaaaccgtacatccccgttcgcattcaccggaaacaagtttgagttccgtatggtcggttcctccgactccgtttcctccgcaaacgttgtgttaaatacgatcgttgcagaggcattcaaggaagctgccgatgaacttgaaaaggcagaggatttcgaccttgcggttcatgatatgatcaagaaacttctcgcagagcaccgccgtatcatcttcaacggcaacggctacagtgaggcgtgggtggaagaggcagagcgccgcggactcccgaacttaaagtgcatggtggattccatcccggcacttgtgaccgagaaagcgttcaaactgttcggcgatttcggtgtatacacgaaggaagagcttgttgcgagagcggagatcgagtatgaatcctacgcgaaatccgtcaatatcgaggcgaaatccatgatcaacattgccggaaagcagctgatcccggcggttgtccgctatacgacagttctcgcacagtccttaagcgctgtgaagactgcatgcccggaagctgacaacagcgtccagacagaacttctcatcgaagtttccgacctgctctccgacatgaaagttgcccgtgcgaaacttgaggaccttgtagaagagtatcagcacatcgagagcatggaaaaacgcgcccacttctgctacgacgagatcatcccggcaatgcaggcactccgcagcccggccgaccagctcgaaatgatcgtcgacaaagaatactggccgatcccgagttatggggatatgatctttgaggtgtgatcactgtaacataaaatgatgaaaattggtacataaaaataccgctctgggaggaatgtatgatttcctgccggagcggtgttttttgtaaacggaaaaattccaaataattcaaattcggccctacttcggtccgcccgtctgatactcggacagatttccggaggacgaagaaccggaacttcccggtgtgctggtgctggatgagccggagctgtagttgtagttcgcgccggcgcttccagggccggtcacactgccggtatttgtgtaataattgttattgctgctcgttccgctatttccgccaggacttacagtcgaagtacctgtactgccgccggggacggttgtggaagccgagcttccggaagtgctgccggttgaaccggatgagtagccaggaccgccggtctggtaactgccggtcgagctgcttgtgttattggaagaagatgtgccggacgttccgcttgaactgctcgttgatcccggtccacctgtctggtaatttccagccgccattccggttcctgacgaatttccggtcggattcgaagaaggagaagtcgcagtcgttcctgaatttccgcccggcgcagatcccgcctgcgttccggtcgtaattccattctggctgtttccggtcgccggagttcctgtataattacttccgttgatctgcgttccggatgttccaggcgtgtatacacttcccgcggacccgccgccgatcgcagacgtctcactcaggcagacaccgctcttattgaaggtatagttgacattgtttacaacgaatgagccgttggaaaccatctttccatctgccggatttagataataatactttccgccgtcgttcagccagcctgtgatcatatgtccggactggttaaagtaataccagctctgttcgatctgcttccagccaaccgacatcacaccggataccgtatccatgtaatacttgttcgttccgtcactctgccatccgatgaccatgcgcccgtcggtgtggagataatagaacttcccgtcaagctgcatccatccggtcatcagctttccttcgttattgaagtaataccagtaaccgtcaagcttcgtccatccggcagccatcgcaccactcgcgtcaaaatagtacagaagcccatcgatcgtttgccagccggtcagcatcgttccgtcctgttggaggaaataccgctttccgtcgatatccgcccacccgcggacgagctttccgttgctgccaaaataataatattttccgtccatcttccgccagccggttaccatcgaaccatcgccgcgcagataatagtaatctgtatcgatccgcagccatccggttaccatcgcgccgtttaacagatagtaatatttcccatcgacttggatccagtcctttgccatcgtgccgtcggaattcagatagtaccatgcgtcctccgcctgcagccatccggtcttcatctgcccggtggtcgggagaagatagtagtactggttgtttaagaggagccagcctttatactgggtcccgtcctgattcagataataccagctctgcccgtcattgatccagcccgtctgttttacataattcttataatagtaccacttgtccccgatcaggcgccagcggttcgccggaagttttccactcaggtccttaaaagaaaagttgatatccacatttccactgatcccgtttacggttccctggtttgacgcctgccagaatgccgcaccctggtaggacggttttgcgttgtagcgggcgatccagacatcatagtggaccttcgtcatatcgatcttattgctgatccagtaatcattggtatagatcatcggataatatccggctgtctcgacttttttacagaatgcgttgataatatcagaaagctgcgccggagtcagattattcatctcctgtgcttccacgtcgaggacgaccggataggagatcgggtagtccttgataaggttcaggataaaatctgcgtcggattccgccatcgcagttgttgtcgcgtaggagtagaggtaaacgccgacccggagaccagcagcggccgccccgcgcacgtttgtctcaaaatatgggtctaccgcgttgttgtagcgggctccgatcatcgcgaactggatatcatcagcggcgactgcagaccagttgatattttgctgccactgggaaacatcgacgccccgcgacaggatcccggtaagcacggacccatcacttccaatataggagccggacgcgttcttctgccaggccgccgcccaggccggaagcgccggactcacagcggaaaaagccatgacggcacttagaagaagcgccgccgctcgtttcttttgtctcatggagatcccccttttaaacttgtatttcaataagaacggggtcaaacagtctttgccccggtattttcaatgtaaaagatcccgggacagctggcattttatcacagctccatcccgggatcatatggacgttatctgcgtattttcagtatagcataaaaatacagatacgtcttgaaaaaattcacagaaaaatgcggcaactattcggcttttccgatcccaagaaattccggcgcagtgatgatcttcttataaaactgcttcgcataccggtacatcacgatcgtgtaatcgccaaattcctcgccgacactgctcttatacactgcccacaggcaccacaaaaatccgccgagagcgatatatgcgtagtagacgaaccgctcctcggaagtcggctccctgtgcaggtaagtcgtaatgagcttttcgacctcaaaatcattataataagaatagatcgcgcacatgctcacatcgatcagtggatcgcacatgccggagtactcccagtcgatcaggcggatatcaccgtccggcaggaacaggaaattgtcgcacacactgtcgatatgggacaggaccttcggccggttcagacggtcgaggcggtcgagcagtgtgagcatgtgagcttttacttccggataatcttcaaagagtttcttttcgtaaccgcggcacagcgcttcataaaaactgatccgctcccggatatcgaaagaatggtcgacatggagctttgaatcatggagtttttccacaagcgccatacatttcgccacatcatcccagttgcgcggatcgctgttgcgcgcgccctcataatattcagaaatcttgtaaccggtctccccgttcatgtatacaacatgctcggtgatcccggatccttttacggcatcgtagacagccttttcctgtttccggttgatcaagagctcggtgcccggaccaggaattcggcagatataggacttatcatggaccttgaacaggaaagacttgttggtcatacccgttttcaggcacttgatccctgtaatctcagattccggaacatgaaggacctcggagatcagttccatcgcgatattgtcggaatgattctggtagcgttcatcgaaaaggcggagctcctcaaggttctcaaattcgtacacctggttgtccggctgtttgttgatatacatttccggcaccgggaagtgatgcttgcccggaagatggctgtcgacctcgccgtttaagaggtctgcgagaacctgctcccagtacatctgctccgttcccggggtatgataatattcttcaaggatcgggaagaactgttccgaaaactctttcgagaagaacaccggaccatacatgacccaggagtccgcgccgccgaccttaacgccggtgagcagtccctttttgctcgtctcaagacaccattcagaagtctcgcctttcataaatacggaagagtaccatgcgccgcattcataagtatggtacatgttgttccgcatccagttgtcagaagagagaagatatgtgtttctcccgataaaacactcgcgggcgcggtagagtgttgttagcgtgttcttgttgtggtattccgggttatagagaagcttgacaccgaatttgtcgatcaggtactcgaacttctcctttaaataaccgaccacgattgtgatatctgtgacaccggcctcatggagctgcttgatctggcgctcgatcatgcgctcgccatagacttctaaaagtcccttcggcgtctcaaatgtcagtggtacaaatctggacccgaatcctgccgccaggatcacggcgctgtccatccggtattttcttaaaagatccacaccgccctttaataaggaataagtcccctcagccggatcaaacgtgaagagctcctgtgccaacccatccttcacgagatggttgcaggtcccgagcgaaagatccatcgctgccgccagctcccgctgtgtcatcttgttgttctcataaatatttctgcagagtaatcccaaacgatccatagtcatcctccgaatcagttgaatcatgtttgcgacacttatcatgaaacatgcggccatggaaacgtgggagagtgtccacacgtttgtgactgaaaatatatgtttaataataaggaagaaactgataaaatgaacgtgttcaaaatagtaaaaacaatagctatatatgaacattataacacgtacttccgataatacaagatgatattttgaatatgaatttgcaatgttcaaaacatccgcggtcatgcatcaaaatgaacataccattatgacacattcctgccacaaagctgccacaaagtgaaaaaacaagcaaattgtactaatatcagtacaaaaacaccataaaatggcgctcgtgtaagaatttcgtaagaaaataaaaacaaaaaagatatggaaattcttaagaaattatactataataccagtgtattcgaggtacagagtatttctggaagcgcagtaagatagttccctttattaaaaaatcttcattttttgtaaaaaaactattgataattttacttatcggaagtataatggcttcgtaatgcaattaggaatttcaaaaagcgtttcaaaaaaacaaaaggagagtgcattaattatgagaaagcagactaaaattgctgcagtagtatccgcagcagctctgttagcattaggcgcttccatgacatctttcgcagcttccaagggaacctggatgatggttgatggcgagtggtattgctacgacaaaaacggtgacgcatatacaaacgtattctgctccagcaatggtaaagagtactatgtaggagatgacggacagctcgttcgctccgagtgggttgactatgatggttcctactatttcgtaaacagcagcggtgctaagatcacaaacgactggagattaacaactccgtatgatgatgacacagctgatgaggagtggtactacttcaagtccaatggtaagagagctgagaacgagaagatcacatacaaaggaaaaacctactactttgatacagacggaaaaatgctcacaggttgggtaacaactggtgacggcacatcttctgtaaacgaggctactggttatgaagctgaccacacattctactgcgacgagacaggtgctcgtgtagagggtgcatgggttaaagatacagagccgggcacagatgacgacgatgcagatgcagacgagtactggtactacttaaagaaagctactggtaagccggcaacaggcaagcagtccaacatcaacggccagatctacctcttcaacgaggaaggtcagatgcaggttggctgggtagctcgttctgattccaagacaaagaactttgttcagttagataaggaagacgaagagcaggatatgatcctcttaagcgattatgcagacagcgaagtttactactgtggtgatgaggatgacggacacgcaaagaagaataaatggttaaagacatggcttccgagcgatacagaagaagaggaagatgataaagagtggttctggttcgataagaatggtaaactctacagagctgatgcagatgcaaagtccgcttctaacgctcagaagtacaaactcgaagagggcaaccttgtatatgatggtgctgcagaagagcagaaagttaacaagaagaaagttaactccaaagattactggttccgtgaggatggcgtaatgctctccaagttctacatgctcaagaacgattccgctaaggactccatgttctactttggtggatctgatgatggttccatgaagacaggcgctcagactgttaaagataacacaggtgattcctacaagttctacttctacaccaaagatagctatggctatgctaagggtgcaggtgttatcggtaaccagagcaacaagctttactactatggtctccagatccaggctgatgactacaagtatcagttagcagaagttgctggaaagaaatttatcgttaactctaacggtacaattcagcattctgcaaatacagaatacaaagaggacggagatgttctgatcaaagctgatgacgctaagtacgagacaactggtcagttcaagtatgctatcgagagcggtgttacctctaacgtagcagatgttgacatcagcggttttgtacagggtaaataatttatttatcttgaaaaattagaaattctaattgcaaacagatcgggcgggaattattcctgcccgattttttgcttgtgcgcccggcggcacacaaaaagaaacccctcccctcaatcttgaggggaggaaagttgaatagacgaggcttattttttacggatttgtgcaggatgaggtggacaggatccttgaagatgctggggcagaagaacattcggaaagtgtgaaaaaatggtacgatggatatcattttggaaattttgacgtttattgtccatgggatgttatgaactatattctggagctgcagcataatccgaaagcaaaaccggcgagctactggaagaacaccagtgacaatgcgatcatacggtcatttattgattatgcaggcagcaatatcacgaaaaagctggaaacattgctttccggtggagcgatcattcagtatattgatgaaaatttgacatatgattatctgcattcttcggaagagaatctctggagtattctgtacctgaccggatatctgacgagagcgcgcgatcagaactacaatggggaacttccagaaggaacagttgcgcttgtaatcccgaatgaggagatcagggaaatcttcgagacaaccgtgaaaaaatggtttgctgattctgcaaaaatctggaatcgcagcagattatttgaggcagtctggtctggaaatgcggagattattaccgaggagatggcaaaacttcttagaaaaacgatcagttaccatgattacaaagaagacttttaccatgcattcctcgcaggaatctttacaggagccggttatacggtggactccaataaggagcacggagaaggcagaagtgatgtcgtaatctacgacgatactaatgggcgtgtcgcgatcttcgaggcaaaatattcgaaaacatcggaccggatggaaatggattgtgaccgcgcgatcgaccagatcaatgatcggatgtatgcagatgaatatgcggatgagtacgaaacagttctctgttacggaattgctttttataagaaacggtgcagggtgaaaaaaatgaaaacaatacagccacagacagaccggtccaaaggtatgcctgtggctgtatttgtattatttaataataatttcataaaaaaccccacaaaaggaaggaaattcccggtggcgcaagttgcgggaaaagtcgaaggatgttataatataatagattttttatgacatacgggtggaagagagaaaaaacgatccacggtatttctgacggtacatgatacagaccttggagagggtctataaacactactactttataatacgaggaagtaaatcatggcaaacagaataaagaagaaagaggatacgaaaagcagctatcgggataatgttgctttgatcatgggggcgttcacgctgatcgtactctgcgtgctcccgcttgtgttccacgatttctattttgatatcctggagacaaaatatcagttttacagtgttgttgcgatcgctgcgcttgtgatcatgggcggatatggcctcgcgagcggaaagatgctcgagtggttctcgaagttcaatttccagacatggagaaagagcatgagcgtcggggactgggcgatggtcgttttctggctcacaaacgtgatctcctggatcctgtgcaaggactggagatgggaggcattctggggaacatccggacgttataacggcgtattcctcatgacgatctacatgatgacatatttccttgtcacccgtttttaccggttaaaacagtggtatctggacgcattcctcgcagtcggcgtgtttgtatgcgtgtttggaattactgactacttccagatggatatccttggatttaaggtaaatatgatggatacacagaaatccatctatacttccacattcggaaatatcaatacttatacgatctatgtggcagcgctgttagcaatctcaatgatcctgtttacacaggagaaaaaccagaagagaatgttctggtactacggaaatatgatcctgacaagctttgcgctgatcatgggcagcagtgataacgcatatctgtccctcgcagcgattttcggtctggcaccgttatggctgtttcagacaaagacaggacttcgcagatatgtgatctccctagcgacattctttacggtgatcctctgcatcaacgggatcaataaggcgtatgcggcatccgttctcgggatcgacagtgcgtttaatctgatcgcggggacgaagtttcttccggtacttgtagtgcttctctgggtgatcgctgtggtacttatctttatgaacagaaaaccacaggccctgatgaacaggacaacggacgattctatgaataagatcgcagtctatatctggatcggtgtgatcgcggttgtctgccttgcggttcttttcgtcctttatgatgcgaaccttggaggtcatgcagataagtatggcgcgctcagctcctacgctgtattcaatgatgagtggggaacccagcgtggatatgtgtggaagcgcgcgatggagatctatacaaagaagctgaatcttctccagaagatcttcggatatggaccggatacgtttgcactgatcatgcagtattattatccgggcgaaatgcagaacggacatatggtgatcttcgacagtgcacataatgagtacttacattatctggtaacgaccggtttcgtcggaatggcgtcttaccttgtatttatggtttcttcgatcgttgcgatggcgaagaagatcaaggagcagccgatcgtggcagcagtgatgttagccgttaccgcgtatgcgatccaggcggttgtcaatatcaacctgccgatcgcaatgccaatcatcttacagcttcttgcgatgggagtcggaagaaagaaaacggccgacaaagcggaagaaaaagctgaataacaggaaaatcaaagcagagacaaacacagggaggaacgaacaatgcaggcagtcatcatggccggcggaaagggaacgagactggcggcgctcacaaaggatgagatcccgaagccgatggtcccggttgccggaaaaccgctgcttttatggcaggtcgaaaggctaaaagagaatgggatcacggatctgatcatggtgatcggacatctcggaaataaaattaaggaatattttggcgatggagagcagtttggcgtttccatccggtattttgaggagacggaaccgctcgggactgcgggatccttttattatctgaaagacatgatccacggggaccggtttgtgatgatgtccggggatctgttcttcgatattgattttcagcgcatgatccggttccatgaggaaaaaggcgcagttgccacattatttgttcatccgaacggacatccgtttgactcggatcttcttgtcctggatgcgaatgataaggtaacggcgttcgactcgaagcacaatgtccgcgattactggtataagaactgcgtcaacgcaggaatttttgtgtttgaaaagaagatctgcgattacgtgccggagccggtgaaaaggaatctggagaacgatgtgatcaaaggaatgctggacgcgggagagtcgatctacggctattgctccccggagtatgtgaaggatgttggtacggttgaccgtgtgcagcagacattggcagacatcacgcgaggcgtgatcgcggataaatgcctgaaaaataagcagcgctgtatctttatggaccgtgacggtacgatcaaccagtataagggactagtatacaaagaggatgacttcgttctggaagactgtgcggtcgatgcgatccggaagatcaaccagtccggaaaactcgggatcgtgatcacgaaccagccggttgttgcgagaggtctctgtgggatcgaagatgtggaaaatatccataagaagatggaaacacttcttggaaaagaaggcgtgttcctggatgatgttttcttctgtccgcaccatccggacaaaggatacccggaggagaatccggcttataagatcccgtgcgagtgcagaaagccgaagaccgggatgatcgagaaggcggcggagcggttcaacattgacctcaaggaatcctggatgatcggggatacgacgatggacatccagacaggcgtgaatgcgggaatgcggacagcgcttgtgctgaccggggaagccgggaaggataagaaatacgacgtgaagccggatctggtgtgtgaaaatctgctggatgcggtggagaagatcttgaaaagcgaagatcgttaagataaaatatgaaaactcagcagaagagaacagttaaatgttaggaattgctgagtgaaaacgtcagaaataaatgatatatagctgcgtaaaattaaatggacaagagatatcagcatcgcagcgagggtactggcttgtttgccataaattttgatggacagaggcgatgcgagcagccagagagtaaacgattgatagagtaaatcacaggagaacagaaaaaccatgatcattacacagacccctttccgcatgtcttttttcggcggcggaacggatttcccagacttttataaggaacacggcggagccgtcatttccacgacatttgataaatattgctatgtaaatgtgcgtcatctgcctcgcttttttgactattcgaccgagctttcctactcaaagatcgagcgcgtgacagatgtcaacgacatcaaccacccggcgatccgcgaggcgatgaagtatctggatatgcaggaaatccgcctgacttacgaggcagaccttccggcgagatccggactcggaacgagcagttccttcgcagtcggcatgttaaacgcattctatgcattaaaaggaaaatatgcggataagagaaaactcgcagatgatgcgatctacttagaacgtgtcctctgcaacgagagcggtggcgttcaggaccagatcgcggcggcattcggtggattaaacaggatcaacttcaatgcagacggatacgaggtaaatccggtgatcatctccccggagcggaagacacagttaaacaataacctgatgctcttctttaccggattttcgagattttcctccgatatccagcagacaacggagaaagcgcttgtcgataaacaggcacagctccttgagatgctgtctcttgtcgatgacgcggagaaagttctgacttccaagacggacctcaacgaattcggccgacttctcgactatacctggaagctgaaacgcggaatttccaaccggatctccacggattccatcgacggactctacgcgaaaggaatcgaggccggtgcgctcggcggaaagcttcttggagccggcggcggcggattcctcttattctacgttgagccggataaacaggaacaggtccacaaggcgatggaagaactcttatatgtgccgtttgagtttgagaatagcggtacgagagtgatccattatacaccggagacgtatgagaagaggtagagtgagaaacgggaagttgatgtgaaatccagtttcagatcggaagaaattaaaaagaaaacattatcaggtggcccagtatcgtgaaacaagcatattcagttttgatgtcggtatatcaaaaagaaaatccggaatatctccgggcggcggtggagagtgttctggggcagacggtgccgccggaagaggtggtgctggtctgcgacggaccgctgacagaggcattggacggagtgatcgcggagtatgagagccgattcttgaaaaatacagagaaaatcctggatttgcgggaaagcggtttgcagggaaatggcctatcggaaaacgatcagcaaggagatacttgtcagaaaggcaagatacagggaaaaaatcctcaggaaagtcagagacaggaaaacaacaaccagaaagtgatctttcgcgtagtccgccttccggaaaacggcggtctcgggaaagcgctgaacgaaggactcaagtattgctcctgcgagtggatcgcacggatggatacggatgatctttcggtgctggaccgatgcgagaaacagctgaaatttctggaagaacatccggaggtcgacgcggtgagcggaacgatcgcggagtttcagggagatgcgctcgatggaaaaacggcggaaacagcggtgatctcctataagaccgtaccggaaacacagaaagagatagccgcctacatcaaacagagaaatccgatcaaccatccgtgcgtgatgttccggaaatcaagagtggaatccgccggaggatatcagccatgcccgtatttcgaggactacgacctttgggtgcggatgtaccgggaccatgcacaatttgcaaacctgccggacacgctgctttacatgcggatcgacggaatgcaccagcggcggggcgggatcaggtacgcgaagtgcgtgatcgatttccgcgtgaaaatgtaccggaatcaggtcatcacattcggagagttcctgccgatgacggtagttcgggttttggtgagtctgatgccgaattcgctgcggcggtttttgtatgagaaaaaattaagaaagcagcagtagaagaggcgggaaagcattagcagggaaattgcaaatatagaggtatggaagtgccgggagaaaacggaaactgttaagactccggatagtaatgagaaatttgcaattgctaagacactgggtattacgaaaagacaaaccagtgaatatagctgttggagcggcgggattgtgcgtatgaactgcttgcagattgtggaaaatcaaatcagtgaacgcagctgtctggatggaaagaagcatatagcagttcagacaaccgtgaggacataaaacacttcgcaaataagaaattacaaacaggggcatgtgaacgaaaaacggatcacaatgcccctgtggtgtatcaaaataaggaattttcagtttggaaaagtgaaactgtgtaaaataagatgaaaataacccataaatggatggaagacccatttacccaatattgcgaaaagccccattaggtggtatactgtaataagggtttttttgcttaattgaataaactaaatgaattgaagcaaaaattttccgggattacagcacagcttttaccggatcgatcagaaaatggtcagcgacagaatgctaagggcagctgcaaagaccggatgaagttacgattaaggaatcataaatggaatgaatgctaaaaagataaataacaactttgagccatataagcgcgtggtaaaatttgccggctcggcgatcatcgtgctcttggaactggccgcctattattatgtgtggatgaactactataaccgaaatatgacagtggccttctggcggcgcggaaactggctgatcgcaggcgaatatctgatcctgtctctggtgctgcaccggctgtacggcggtctgaaggtcgggatctataaatactgggcacttgtatactcccatatgctctcgattgtcggagtcaatgccttttcgtatgttcaggtcgttctgttcgacaagaaaatgcataatccggcagcgcttttaggactcactgccctggatttcgtgatggtcctgctctgggcactcgcattcaaaaaaatctatgcggcgatgttcccgaaacggagacttctgctgatctacggaaagaaaccgatgttccaccttgtgaacaggatcgatacccgcgacgataaatatgagatcgcggaaaatatctcgatcgacacaggcctggagcggatcatcaaacaggcagaagattatgacggtgtgatcatcggagatatcccggcgagagcgcgaaaccagctcatgaaactctgctatgcaagaaatatccgcagctatacggtcccgaagatcagcgatatcctgcttcgcacttcggtagaactcaatatcttcgattccccgctgtatctttcgagaaatgacggcggtcttgcctgggatcaggcagtcgtaaaacggatcgaagatatcatcgttgcgggggcgatgctccttgtgacgagcccgttcttcctgatcatcgcattcctgatctggaataccgataaaggaccggttttctacacccaggaacgcctgacgaaggacggaaagatcttccggatctataagttccggacgatgatcgtcgatgcggaaaagaaaagcggaccggtaaaagcgggcgaaaaagatccacgtattcttccggtcggacggtttttacgcgcaacgcgtatggatgagcttccgcagctgttaaatatcctcaaaggcgatatgagcctggtaggaccgagaccggaacggccggagctcgtgaaagttatcacaaaaaatatcccggagttcgagtaccgtttgaaagtaaaggcaggactcaccggatatgcacaggtacatggacgttactgtacgaccagctacgacaaattgaaactggatctgacctatatccggaactactcgatctggcttgacttaaagctgatccttatgacaccgaaggttcttctcatgaaagaatccacggatggtttcgaggaaggtctttgggaggatccggctttaaaagaatagaatggacaaaaagatgggaaaaatattaacagtagtcgttccgacttacaacgcggaaaaatatctcagagacaatctggaatcctttaaaattccggagctgatggaagatcttgagatcctgatcgtcaatgacggatctacggaccattcccttgagatcgctgaggaatatgtccggcagtatccggatacataccgtgtgatcacaaaagaaaacggcgggcatggctccgggatcaactgcgggatcgcaaatgcgcggggaacgtatttcaaagtggtcgatgccgatgactgggttggcgaaaaagctttttgcgatctggtccggaccttaaagacaagtaacgcagatgttgtctattccggattcttatggacttacgacaatggcgaggccgacaagacgaaattccagacaaaagcagagatcacgatcccgtttgagggagtggaataccagaaaacgtactcgtttgattcgatcgcggacaagctctatatgaagatgcataacatgacgatcaaaacagaaattctccgcgaaaatcagatccacattgatgagcactgttactacgtcgataccgagtacatcacttacccgatcccgtatgtaaagacgatctgctttgtggatggatttgtctattactatcgccttggacgggcgggacagagcgtcggacttgagaagatgcagaagaatgaggagaattacaacaaggtactggaatcgctgctgaaattttatcgccaacttggtaatcaggtcccgtgtacggaaatcaaaaaacagtacattgcaagactgatcgcccgcgtcattgccggcaaattcaagatcatgctcagcttttcaccatctgcaaagaaaaaacagcagattaagcagtatgatcagaatctgaaaactcaataccgggacatctacgacagcaatatcaacaaggcagtctcactgctgagaaaaacacagtatcatacatattatctggtaaatctgatggtcaggagcatgtgcagatagaaaatatgcaaagaggtttttatggacaaaatcatatcgtttatcataccatcctataatgtggaacaatatctggaaaaatgtctctcgtcctttttgaatccgcaggcaatcgaacagatggaagtaatcattgtggatgatggatcgaaagaccggaccgcccggatcgccggagactatgtaaaacaatatccggagctgtttcgcctgatctcaaaggaaaacggcggacatggttccgcaatcaatgcgggaacggcagcagctgtcgggcgatatctgaaggtgatcgatgcggatgactgggtagtcacagaaaacttaaaggagtttgttgacaagctggcagcatgcacagcggacgtcgttttaaatccatatcaccaggtcgatatgaagaccggagaaaaaacggtctggaaaatgttcctggaccggtatgaagtgacctatacattggaggatgtcgtacaaaactggaagaaatttgaccgttgttttgcattccacggaatctgttataaccgggaattttaccagagacaccgctatgaattgccggaaaaaatcttctatgaagatcatgaatacacaacgatcccttgctcgtatgcggcaagcatttatccgatcgacctgtatctgtatcagtacttggtaggaaacgcggaacagagcgtatcggtcacgaaccgattaaaacgaatgagccatgtggaaaaagtaacggaggatctgatccgccattataatgcacatccggaattttcagatgcagcgaaggaatacatctacaaaaaagcagaaggtgtcattctaagctactatgtagcaggatgtatcatgaatccgaataaaagaacaggacgcagcgattgtcttcggtacaatacaatgatccgaaatctgaatccggaaatctggaaccgcgtcagcaggaagttccggatttatctttggatgaaccgatttggaatttcgtatccgatgtatgagaagatgctgcattccggggtttataatagattgagacataatcataaactcgaaaaagaaaatgaagcaaaaacggaggagaatctgaaatcacgatgagtaaattcataaaaaggctggcaacctttcagcactataagccgctgttatcgcagctggtcatgaaagatattaaactaaagtaccggagaagtttcctcggatatgtatggagtatcttaaacccgttaatgatcatgggaatcatggtactcgtattttccaatatgttccgttttgatattcagagctatccggtatatttgatcgttggtcagacaatctttaactttgtctcggaatcaacaaaccaggcgatgtggtcgatcacgggaaatgcggcactattaaagaaaacatatgtgccaaagtatatctttactttatcgaaagtgaccagttcattcgtcaacacactctttgcattaggcgcaatgcttcttgtatttattttttgcagagttacgttcagctggaatatgctttttattccggttatccttattcaggtatatattttttcactgggactgggaatgcttttagcagctggaaatgtatttttcagagatattcagtatatttacagtgcgtttttaactgcatggatgtacgttactccgatcttttatccgctcagtcagctccctgaaaatttacagacagcgatcaaaacttttaatccgttatacacctatatcacccagttccggacgatcgttcttgatgtagcctgcccggatatgggaatggttttatacggctttgtagttgcttttattatgctgggagttggtacactggcctttttaaagagccaggatcgttttatcctgtatatttaattgaatggggacaaaattatgaataacgaatatgcagtgcgcgttgaacatgctgtcgtgcgctttaatatggcctccgagcggatcgacaatcttaaggaatactttgtaaaactggtccgcagagaactgatgttcaaagaatttttcgcattgaaagatgtaagctttgaggtaaaaaaaggagaggcctggggaatcatcggtacaaacggatccggaaaatcaacattactgaagctgatttgcgggatcttaaaaccgtataagggaaaagtcctgatcaacggttcgatcgccccgttgatcgagcttggggccggatttgacggtgacctcaccgcaagggagaatatcttcttaaacggagctgttcttggatacgataagcagtttatggaacagcattttgatgagatcgttgatttcgcagagctatgggatttccttgatatgccgatcaagaactattcttccggtatggcggcccgtcttggctttgcgatcgcaacggtcgtaagaccggatatcctgatctgcgacgaagtcctttctgtcggagactatgcgttccagcagaagtgtgagcagagaatgagtgatatgcgaaagaacgggaccacgcttttgtatgtgtcacattccattgagtcagtaaagagtgtatgtgatcatgcactgtggctcgataaaggaacggtcagaatgatcggggatgtggaaacggttggagatgcctatatggaggcactgagctaaacgaaagggttacttttataaaaaaagtatcatggaacagttgtgggaaacataaagattttaatttcgtgtcataaacagagcattgtgcctgacagtgagatcatgcttccgatcgaagttggagctgatctgcgcagcaagcatattgagggttatattcaggataatagcggtgacaatatttctgtaaaaaataaaatgtactgtgaattaacggcacaatattgggcatggaagaatctggatgcagattactatggcttttttcattacagaagatatctgaatttttcagagaacaaatatccgttagattcatggcagaatatcacggaggaacgcttaaacgatacctgcctgaaaaaatataatctgaacgatgactgtatccgaaatctggttgaaacatacgatatagttttatcggaagaaaaaaatgttgcaaaaatgccggacagaaatacgtctgtgtatgagcaatataaaaatggaagatccttaaatatccgggatttggatctggtgcgtgatatcatcgccgttaaatatccggattatctggatacctttgaagatgtcatgaaaggcagaaagacctgcctttgcaatatgtatatcatgaaaaaagagctttttcatgaatatatgagctggctgtttaatatcctctttgaattcgagaaacaaacagacatgagcaaatatacggttgaaggttaccgtacgcccggacatctcgcggaacgtttgttgacggtgttctgttggtatatggagaagaaaaagagtctcagggtaaaaagactccagacggttctctttttgaaaacagatcagaagatgacgttagctcaggcgaagtggactgcccctgccttttcagaaaacaatgtagcgatcgcagttgcggcgaacgattactttattccgtattgtgctacatttttgaaatcggttgcagagcatagcgatagtaaaaagaactacgatattcttttgctgtctcaggatgtttcggatatcaatgtaaaacacgtagaaaaattgctttctgcatggagcaatatttctttacgggtgattgatccgagtgtattaattgatcaatacatattctatattcgtggacattttagtaaagaaacttattatcgtcttgtattaccggagttgttaccaaactacgataaagtcctttatcttgattctgatatgatcgcgatggatgacgttgcaaagatttatgatgaaaatattgacggctatctcctggcagcgtgctatgatgcagatactgctggattatataacggatatgaaaaggataaaaaagaatataccgataaggtcctgaaattaaaagaaccctaccagtattttcaagcaggtgtcttgcttttaaaccttgaggaattccgcaaacgatatacaacgaaacagattctggactttgcagtttcggaaaagtggcagctgcttgatcaggatattttaaataaactgtgtgaaggcgcagtcaaatatatcgatatgagctggaacgtcatggtcgattttgccggtgtaagaatcaatcagattatcgcattggcaccgagatggctgaatgagatgtaccaggaagccagaaaaaatccgaaaatcatccactacgcaggcccgcaaaagccatggtttgaaccggaaatggattttggaatgcagttctgggagtgtgcgagagggacagcgtattatgaaattatgctggggcggatgaacagagcaaccggtaagaccggaaataataatcataaaaatatattccgcggtgcagtacagtgtgtcctggatcacggaatcgtgtatacgatcggctatattccaaagagagtatttagaaaaaaagataatgcagcattttagatgtgatatacatccgtgagaggaattattacgatgaataaagatcctaatattaagatttatgtggtatgtcataaaccttcatatgttccggaaaatccatacctttgtccgatccaggtcgggacagctttttccggaaatcaactggaaggaatgcttcatgataatgaaggtgacaatatttctgatcggaataaaacatactgtgaattgacagctcaatattgggcatggaaaaatgatgatgcggattattatggattcttccattatcgcagatattttgcatttgatccgtccatcacacgtgaagatggatggggaaatattgtatatgaccgaatcgacgatgaagcaattaaagagctcaagcttgatccggttactatgaaaaaagtaattacccagtatgatgtgatctctgtaaaaggcagaaaatatcctcaggagatggaagaagactgcccgatggatgtttaccatgagtatggcgttgttccattccagcatcgaaaagatctggatcttacattaaaaattttaaaacagaagtatccagaattttcagagattgcagatgaatatatgaaatccaatgttgcacatgaatgcaatatgtttatcatgaaaaaggacgtttaccggaagtactgtgaatggctttttgatattttatttgaggcagaaaagcagatcgatacaacatggtatagcgtagaagaataccgtgtcatgggataccttgcagagcgtctttgtggcatttactattcatacctgaaaaaacaggaagggatcaaggcatttgagcttccgaagactttattccaggatacagcaccacatgctgttttagagcctgcttataaagatgcagttccagttgtcttatctgcaaataaccggttttctccgtatctggatatcatgatccgttccatgatcgcgaatgcatcagagaaaagaaactatgatcttatcattttatataatgatatttctgagcgaaaccagcgcttgatcaaatcggctgcaaaaggcaaggataatatttcaatccggtttgcgcgtgtatgtgaatattttgatgccaaaaaattatttgtagaccagcatttatcggtagaaacatactaccgcctgatcattccggagatcatgccgaattatcataagattttatatctggattgtgatatggttgctgatcgggatgttgcagagctttacgatctggatttaaagggtgcaatcatcggtgcggcaaaggatattgacgttgccgggcagttaaacttaaatcagaataactggcagacttacgcaactgaaacattgggactggatagtccatacgactattttcaggcgggagttctgatcctggaccttgatggccttcgaaagacggcatcatcccagaagatgatcaagctggcactctcccagtcattccggtgtcatgatcaggatgttttaaatattatctgtaaaaacaaggttacatatattccacagcagtggaatacattaatggactggcaggagccgggacgcagccgtatgcagatccttaagatggcaccaagaaaactctttgaggaatattccgcagcccgcaaacagccgtatctgatccattacgcaggatatcagaaaccatgggatgttgtagactgcgattttgcagagtgtttctgggagtatgcaaaactgtcaccgtattatccgatgctcttacggagaattcgtagatgttttgatgatgaagcaaacgcaccggttgtttccactgaaccagaggttcgatatattcctaagaagtccaaaatgtggggaattgtagatgttattttgccatatcatagtggacggagagagtggattaagaaggtttattggagcttgaaaaaataatattcaaaagtataatgtgaggcaattgcatatgtgcacaatatcgatcattgttccagtttataatacacaaagttatcttgaaaagtgcattgaaagtctgatgaatcaaacttttcgcgacattgagattatatgtattgatgattgttcttctgataactccaaaaaaattttagaacaaatgtctgcaaaggataagagagttaaggttatctatcacgaacaaaatcaaggaacactgcaggctagaaaacatggtgtcaacggggcaacgggaaaatatatcatgtttgttgacagcgatgatcaactagaattacatgcttgtgagaacctgtatgagcatatgtgcaatgaaaatgtagacatgattcaatttggaacgaatcttgttacatcaagcaatgtatcggaagaattaaaacaatgggtttctaattttttgattccttatgaaggttatctatatgaccgtgacattctgaaaaaatgtttcttggaagataaatttgattttaatattacggataaaatatggaaagcagagttatgtaaagttgcatttaataaagcagaatcaataagattgattgcttcagaagatagatatctttttttcctgttaaccttttatgccaaaagctatttaggtttaaaaaatgaaaaatattacaaatacaatctgggagttggtgtcacaggtggagacactttgaattatgaacaatttcagaagagatgtagtggggcgaaagcagctgaggcagtacgaaaatttttgatttcagaaaatgcatttagtgattattatgaagaatataaaaggtttgctgacttgatcctttgggattgtgtacattgttggcataaaaaattggacttcacttatcgcaaagaaggataccaggttttaaaaaaatattggtcttctgtagatattgtcacatctattgctcgtatgttttttgaagattcagaatctattttaaatgatgtttattctactgattcatctcaaaaagaaacagttggaatttactatcgatacttaggatatgatcctatgaatgaatatattcagcaatatataaacttgtgtgagagattaggatatacagttgttttatacacggatgatgatacaacttttaaaacggaaaaatttaaaaatgaaatagtatgtttacccaattctgcaaatgctaattgggataaatactcaccgcgtgcgaaagcattagaagaaaatttaatgaagtgtcatatttccatagtattatatctttctccggcctcccatattgcatggttagatacgttactaatacgttcacttggaataaaagccatatatgcaaatgaaagaattagaatagagcaaattgaattgcaacaacaagaagatactctttcaaaagaaaatgtagaattacaccaacaaattgaagatctaaaaaaaatgaatgaagatctaaaaggaaacctggaagaaatccaaaatgtaaatacacatttatgtaattccaagaaataccgcttaggaaaaaatgctgttatattggcaaaaaaaataatacatcgttgccgtataatacaaaggagaaactaatggacgtaataagtgttattgttccaatctataatgtagaaaaatatttagtacggtgtttacagtctattattaagcagacatatcaaaatttggaaattatactagttgatgatggatccacagatactagtggcaaactttgtgacaaatttgcggaaaaagactccaggattattgtaattcataaaaagaatggtggtttatcagacgcgaggaatgtgggaattgataagtccagtggatcgtatcttgtctttgtggacagtgatgattggattgatccggatatgatcagtatactatataatgttgctcaaaaaaataactccgatattatagaatgcagttatagaaatatctataaggatcatatccttgaagaaactaattgcaatgcggagattattaatggcgattatgtaacagcactggaaggtatgttggattggagatatttcaaacctgtcgcatggaataaattgtataaaagaaacgttataaaagatatccgttatccggttggacgtttgcatgaagatgaatttactacatataaatacttttacaatgcaaaaaaggtttcttatattgatgtttctaaatataattatgatcggactagagaggatagtataacagggcgaggattcagtgaaaaaaatcttgatgcatgctgggcttttagagaacgtgttgattttttttatgaacataatattgttcagctacaacgcaaaatgaatgatatctattgctggtttgtattagataaactggataagtgctttcaatataaaatacaaggaacaaaggtaaaaaagctgctagatcagatgcaaagtgatatcattttttttgagaacaaagatgtagattcaggatacattgatagatttaaaaaggtagttggagaatacaaataaaaagggaaaaaagaatggaaaaagttagcattattgtacctgtatacaatgcagaatcatcgataggatattgcctcaattctattacaagccagacatataccaatctggaaattattttggtaaatgacggatcgacggataattcccttcaaatttgtaaaaattatgcggcaattgataatcgaattatagtagtcgatcaaaaaaatggaggagtcagtcacgcaaggaatactggattatcatatgcaactggcacatatgtagagtttgtagattctgatgattgtattgcacttaacatggttgaaaaactagttgaatctattaagacatatgcaacagatttagcaatttgtgggttcaagattgtcaaattaacagaaaaattacccactaatattttacactgcacatgttctggattgggaaaaacatgtgtattatcccaaaaaaatttctttgagcactttgcagagattctctggaaaacggcaacattagaaatgccatctaataaattatacaaaaatagtattctaaaacaacagaagctgacttttgaagaagactgttcgttaggcgaagatttcctgctaaatatgcattattttgaacacatgaaaaatggtgttgtaatgctttcggaggaatactattattatttgcagactaatacggaatctttgacacataaatatagagatgatttatttgataatgaactactgcttttcaatggtatcaagaatttattaaacaacaatgtaaatttaaccactgaagaacaagtttatatgtatgaatatatgctctctaaagcgattttttgtatgacaaatgttgtttctgcgaaagatgccttgacggaaatgcaaatgaaacagcaactggaaaaaattataaataatgaagacgtgcgcaaagcaataaaaaatagtaattatattgttccgggttttgaatggcttagaaatatatatattttttcggatattgatacgttatatgagaaagttaatgaatatgtttttcatggaaatgatagcgagacgaataggcaggttgacgatgatgc

SEQ ID NO: 1999 - DNA, 38304 bp, Unknown
  gut microbiota DNA sequence
catccacggagagattttttacatttaataatggttctgacatatcggattcctccatgtattttatataagataaaaatgtaagtttcagcaatttccggacagatatgaaccggcaccggagctgatctccgggatacattccgtctgccgggactaaacctagtcacttactaggtgatgcaatgatattatacctgtattgagaaaaatatgcaagaagcaattcctacaaacatgctatgaattggtatttattcctgtacaatccgatatttccgggaaaatctgcaggattcatgaaactgcaacaatcggaaaacaattctgaaacatgggcatggtaggctgagcaaaacagcggaaatcacagacgggatcggaccggaggcaggagtttctatacagaaattttgcaaaccttacgaaaatataaaatcattataaactggaaaaacagatattgacagaatgacagggtgtcactataatggtgacgggttgtcactttttgaaccggtttttatagaagaggggagatggaattatgccgaccgaacggtttatgcggcttccgaaggaaaagatcgaagcaattcgggctgcggcggcaaaggaatttatgagggtagctccggaggaagtgtcgatcaaccggatcgttcacgacgcggatatatcgagaggaagcttttacacatattttgaagataaacaggatctgttaaaatggctgatctgcaaccaggcggaacagcatttcacatcgtacatcacgatgctggacgaaaacggcggagacctatgggaggtcctggagcagatctttgatctcgggatggaccggcttgaggattcagggttgtctgcgatctttcacaacctggtcaacagcgcaagactggtagaactattcaaaggcggaccggattcgaacccggaggcgatggaggcaaaccggaaatttttaaaactgttgtatgaacatgtcaacaaagagaaatgtgatctggatcatcaggagtttttcgagctgatcgagatgcatatgatcgtattcatcatgtcactcaaacgttttttccgggacggtgagtcgagaacggaagcttccgaatattacaaacgtcatatccatatgctccattatggcatatgtggatataaaacagagggcagcaggaagaaaacagacgagggacgttcataaaaacagaacaaccggagtcgtaccacagcagcatgttacagaaaatgaggaggaaccatgaagaaagcaggtaagatcgtaatcgggcttgtatgcgtcggcgcatttggagccctgatgttcacaagatttacgaaaaaagaagagccgatcgaggccgttccgaacccgaccgtcgtcgtccagacaccggagacaggaaatattgaactttccacaggactgacaggtaccgtggaaccggcagatcaggtatacattatcccgaagggaagcggagaagtactggaggtttatgtaaatcagggcgataccgtacagaagggacagaagctgttccgcatcgacaacaagcagttagacgcggcaagaatcacgttaaatacgacccaggtatccttaaatgatgcccagacatctgtaaacaggatgaaggcgctctacgagagcggggatatttccgcccaggcctacgagcaggcggtaagcggtctgtccatggcgaagctccagtatgattccgcaaaattaaactatgatactcagagcgagaacacggtcgttaccgcgccgatcgccggtgtcttagagcagttcggcgtgcaggtgcatgatatgtctgcgggcggttctgtcgcaggcgttgtatccggtgcaggcggaaaaacactgaccttcaacgtgtcggagcgtgtcatgaagggattaaatatcggtgatcctgtgacggtggagaagaacggaacggattacagcggcgcgatctccgagatcggcagcatggtggacgcgtccacaggacttttcaaggtgaaagcgaccttgggggacgcggacggacttgccagcggaacgatggtaaaggtttatgtgacagcggagaaggcggacaacgtcatggtcgttccggcagactgtgtcaactacagcaacggaaacgcctacgtctatacatatgatgctgcgacagcaacagcgaaaaagactccggtggaagacgggctcatcgattccgacaagatccagatcgtttccggactttcctatgatgacaaggtcatcacaagctggtccaaggagctttatgacggcgccgcggtaaatattcagggcagtgatgacagtgcggaaacgacagccgacagcagtgagacaacagcagaagagactacagaagccgcggaaacggcagcaaaataaggaggcacaaggaacatgggacttaccaaaaaggtcttaaaacggccggtcacaactgttcttgttgtgctctgcctgatcgtattcggtctcagctcgatcttttcatcccagcttgagctgatcccggaaatggagatgccgatgcttatcatcagcgcagtctacccgggagcgagcccggatgacgtggatcagcttgtgatcagtaagatagaggatgagatcggaacgctttccggtgtcgattctgtcaccagcatgtcttcggaaaacttcggaatggttctggtccagtatgactatgaccagaatatcgataaagcctacgatgacttaaagaaaaagctggacgggatcaagtcggatctcccggatgatgtcgataccccgacgatcatcgagatggatatcaacagtacaccgtccatcaccctcgcagtcaacaatgacagcgtggataacctctataactacgtaaatggcgatatcgttccggagatcgaaaagctgacctccgtagccagtgtcgatgtatccggtggccaggaggcttacatcaaggcggagctgatcccggaaaaattaagccagtatcatgtgaacatgaatacgattgttgcggctttaaagtctgcggacttttccatgccgatcggaagtacctccgttggaaacaaggagctttccgtgacatccggaacatcctttgacacgatggagcttttaaagaagatcccgatcacactgggtaacggaaatatcatctatatggaagatgttgccaatatctacaataccgttgaggcaaaggacagtatcggacgttacgacggcaaggacacgatgacgatcggtgtcaagaaaaatcaggacagcgaccacattaccgtttccagggcagtccaggagacaatggaaacgttaaaagcacaggatccgtctctggagtatgttgttgtcaacgattacagtgatcagatcagcgattccttaaaaagcgtattccagaccatgatcatggcagtcattatcgcgatgttcatcatctggctgttcttcggggatatcaaggcatccctgatcgtcggaacttccatcccggtatcaattttagcggccctcatcctcatgaaggtcatgggctttacgctaaacgtcatcaccctgtcgagtctggtcctcggtgtcggaatgatggttgataactcgatcgtagttctggagagctgcttccgctttacggataagggcggcggctttattgaaacgagaaaagccgcgatcgatggtacggcagccgttctggaatccatcatcggtggtaccgctacgacctgtgtcgtatttatcccgttagccctgatctccggaatgagcggacagatgttcaagccgttaggcttcacgatcgtattctgtatgatcgcgtccttgatctccgcgatgacgcttgtaccgctctgctacgtgtactaccgtccgaaggagaaggaaaataccccggcctccggcatcatgagagctctgcagaatggataccgttccctgatggagaagcttttaaagaaaaaagcgatggtcatgggaaccgccgttgtgcttgtgatcttctccctgttccttgcgacaaagttaaagacagagcttatgccggcagatgatcagggaacgatcgcggtgacgatcgagacccagccgggtcttaagatcgaggaggtcgataagatcctccagagagcagaagactatgtgactcaggatccggatcttgattcctacatgctctcctacggaagttccggactttccatgaatatgggcggaagcggagcgaccctgacggcatatttaaaggatgacagaagcagaaagacggatcaggtgctcaaggaatggaaacgcgatatgcagaaatggtcggattgttcggtcagtctggaaagccagagctctctgggcagtgggatgtccatgggaaatgcggaggatctcgaatatattcttgtcagcacacagtacgatgacttaaagaaagcatcggatgagatcgtttccgagcttcagaagcgcccggattcgacaaacatccactcttcccttgaaaacagcgctccccttgtaaagatcaatgtggatccggtcaaggcggcagcggagggactttccccgaccgccgttgcttcccaggtatacatgatggtcagcggaacgacggcaacgaccctgaatgttgacggaaatgatatcgatgtaaaggttgagtacgcggatgatgagtacgatacgatcgataagctccagggaatcgtccttccgacagcgcccggcggatccgtagcccttatggatatcgcggatatcggcttcaaggacagcccgcagagtatcacaaagagtgataagcagtatcaggtgacgatcaccggtacgctgacagagggagcggacagcaccacgaaggataagatccagaaggaggtcattgataagtacttatccggcacgatctccatgcaggaaaacacatccacaaagatgatgaacgaagagtttgcgtccctgggacaggcgatcgccacagccgtattccttgtatttattgtaatggctgcacagtttgagtcaccgaagttctccatcatggtgatgacgacgatcccgttcgccctgatcggttccttcctgttcttatggttagtggactgcccgatcagcatgacctccctgttaggcttcttaatgttagtcggaacggtagtaaacaacggtattttgtacgtcgatacggcgaaccagtaccgggcaacgatggactttaaggaggcggtcattgaagccggcgcgacccgtatgcgtccgatgttcatgacaacactcacgacgatcgtggcaatgatcccgatggcggcggcttacggaaatgccggtaagacgatgcagggactcgcccttgtggatgtcggtggactgatcgtctctacagcgatggcacttcttgttcttccggtcttctatgtgatcatgagcggaaagaatacggataaggaagaaatcgttgacgtagattaagctttgaacattgaaagcggatccctgcagagtctgcaagagacggccgctgcccggtcgggaggcggtcagccggaatgcggaacgctctgcggggcttcctgcttttggaggcggcagccaggggataaaaattgccaccggattgccgtatttggaaagaaaatgtaagagaaatgttattgcgtttctgcgatgaaatcgttatgctcatagatggagggaaacctatgagacagaatcaatggaaaaaggcaggtctgaccgtgctctcagccgtttttatgggaagtctttccctggcggcagcgggtaccggaattcctgcgttagctgcgacgaaggatgtcgcggtcacagaatatgacgaagcagcgcttgaaaagtttaaggacaacacgctggaatactgggaactccccggactcattgagcgctacaataccgattatcagaaccagctgcagaagtattattacaatccggacggatccacgggtcttacgaaggatcagatgttagcgatggcggcggatctgcgcgcggaggcggatgaaatggaacgggatgcgaatgatgttcagtatgacgagacagtatcccgcgacgtgtataaaggatataaagcaaatatgcatgctctgcgggcatacgcgcagcagctggaggatgccgcaaagggaaagggagccggtggttcctctgcactccgcggactccgcatcacgagaaatgagaagacaaagaccgcgagggaagcaatgcggacctatgagaccttaaaggaccagtatgagatcgcccttttaaatcaggagatcgcaaagcagaattacgaggcggcgttaaagaaaaaggatctgggaatgatgtcgaaggaggatgttctgaccgtggaggacgcactgaattccgcgaacggaagtgctcttcaggcagcgtccggcctcaatacccagaaacagacgctgatcacaatgttgggctgggattacaacgctgatccggagatcgcgaaggttccggagccggatctttccgtgatcgcgtcctttgatccgaagaaggatgaggcgaaggccatcgagatgaactacactctgtatgatacaaggatgacgagttccaaatcggcgggcggagcagtcacgaaggcaagaaatatcaaggatcaggaagattccgtccgttcttctctggatcttatgtataaggacctgaaacagaaacagaaagcctatgaggcatcggaaacgctctatgaggcggcaaaggccgataaagcggctgctgaccggaagaatgagctggggatgttgagccgtcaggaataccttcaggcagagtctgcatggctttccagtgaagcatcccacacggcggcgaagctggatctcacaggagcgatcgaaaattatcagtgggcgcttgagggacttctcgatatcggttcctcatcacagagctaaaggagaagcagaatgaaaagaaatttgacaggacgtgtgatcccggcagcacttgcgcttgcgcttgcggcagcgcctgtgacttcgtttgcaaagacaaaggcggtcgaggcgaccggaatcgcggacgaaaacggatttgtatcccagccgggaaatgagtacgatgatgcgacgatgaagaagcttgcggataatgtgttagaatatgacgagatcgggaagcttgttgaggtctacagcccgacgtttaagacgttgaaggagacctattctgacaaaaaggatgcatccaaggatgtcgcaaaattgaaatcccagttatcagataaatcggcatcgatcctggatgccgcggatcagatgaacgggatgacagatcagatgaaggacctgatcggtatgctcccgacggctccgacgacatatgcccagttagtctacaattccgagcttctggactatcaggcggagcaggtacttttaatgggtgacagtctgacccagatctccccggagcagatgcatatcaaggtgatcgatgcgaaccgtgcagcgctggaggccggcgcccagagtgccatgatcggttataagcagctgctgcttaatgaggagagtttagagagtggtcttacgcttcttaacgcagtgtatcagtctacccagaatcaggcggccaacggtcttgcgacccagagtcaggtcctttctgcgagacagcagttggagtctactcaggcgacaaagctgacactgacggcaaatgagcagaagctgcgccagacactctgcacgatgcttggctggaagtacgacgcagtgccggagatcagggacgttccggcggcggatcttgcaaggatcgacggaatgaatccagagaaggacaaacaggcggcacaggacaataacttcacgatccgctacaatgtgctggatctcgataataaggacgccggatccgtcgagtaccagaatttacagcgcacgatcaatcaggagaaggaagaagtctccttatctctcgtaaatctctataacgatgttctccagaagaggaacgagcttcagaccgcaaaggcagcttacgagctggaaaagacgaagatggagactgccgagagaaaatggcagttagggaccatcggacgtcttgagtatatgcagcagcagaacgccttaaagacaaaggagatcgcagtgaaaacgggtgatctcgcgctgtttcaggcgatggagacctatgactgggcggtaaaaggaaatttaaagctcagccagtaatccgggagcggccaaaggaggccgtcctttatgaaaacagttcggcgatccggaaacggatctttacagtgggcagggaagcagtttcctgctcacttttttttgcggatgattcctcatcagacggcgagcgttgtggtccggagcgcagcaacgcttcataatcatcctctgggatcagacttttcaacgtcttcttcgatccttccggcatcgatgcatgaatgctgtccgtgtagcatagggatggatacaggacgcaccagaagttgtgcccggcaccgtttccgatggtcacccggacagcttcatacatcccggcgggaaatgtcatgtccccgtaggtgcgtaccggaaatctgcaggtctcgatccccacatgtacaccgtaatcatacccgaagctgtggataaagtcttctgcggcggtttccagtgtggaagattcagacaggatatatgctttcagatcctcttttccggcaatctgatctgcggcggcaccgtcccggatcttttccagcagaagatcctttacgcagagctttaacgcctgatcttcagcagagtcactgttcgcaagaacatggaaccgcaggatcttcggggcaatatccgccgccagtgcctcgtcccttgcccggatcccggacatggcgaggagaaaacagatgaaaaaacataaaatggagagggaaaattggttggttcgattcatgacacgcccttctttttacttttataaacatatattttctgaacagaaaattcctacccgtgaaaagtaacgtgaatttttccgcttcagaattgcttttatttcctatttgtaattattcccagttgtgctataatctaaacgataacatgagaaaactgcccgtccagtgcctgtacatctgaaaacacattcgggtgcacaggcgctgaccgggatttttagaaatttattagaaaatcagagaggaatcaaatcgtcatggaaaagaaaaatatcgttgtcctgtttggcggacagtcatcagaacatgtagtatcctgtatgtctgtacagaatgtggcagcaaacatcgatcaggagaaatataacgtcatccttgtcggaatcacagaggatggtcactggttaaaggtagattctttagctcagatcaaggacgatacctggagagaggcaaaggcgggcgcagtcctgtccccggacgcaaaggagaaatgtctcattgtcacagaaaacggaaaattcgagaaagttccggttgatgttgtattcccggtccttcacggactttacggggaagacggaacggttcagggaatcctggaacttgcgaagatcccgtatgtcggctgcggcgttctcgcttccgcagtctccatggataagctttccacaaagcgcatggtaagcggactcggcatctgtcaggcagcatatgttccggtattgaaggaagagttaaaggatatggatgctgttgtcgcaaagatcgagaaagagatcccgtatccggtattcgtaaaaccgtcaaatgcaggttcttccagaggcgtgacccgcgcggataacagggaagagttgatcgcaggcttaaaggaagcagcagcaaatgaccgcagaatgcttgtcgaggagatgatcgtcggccgtgagatcgagtgcggcgtattcggtgatggcgcttccactaaggcatccggagtcggtgagattctggctgcggctgagttctatgattttgatgcaaagtattacaatgcagagtccaagacggttgttgatccggaacttccgaacggagcaaccgagcgcgtccgtgaggcggctgtcaagatcttcaatgcggtggacggctacggcttatcccgcgtggatttctttgtgaaggcagacggaacggtcgtattcaatgagatcaacacgcttccgggcttcaccgccatcagtatgtacccgatgttatgggaggcaagaggcgtaaataagaagcagctgatcgatgatctgatcaaccatgcttttaagagatacgagagataaaacgactggatcattcagaaagtccagatgttatcagtcacgcagacgattccggatcatggtgagatctgcgaaaacaatatatcaggggagttttatatgacaaaggatattcttgtccgtgtccggggaactcagacgatcggtgaggaagaggacacggtcgagatgatcaccccggggacgtattatgataagaacggcaagcagtatttcatctacgatgaatcgcttgacgagacgggggagccgacccacaatacggtgaagatcatggaaaaccggatcgaagtgacaaaaaggggacttgtggacagccacatgatctttgagccgggaaaacggacgacggcaaattaccggactccgatgggactgtttctgatggggatcacaacttcgtttctcgagattgcggaggacgaggaatcaatccttctgaagatcaaatattcgatggagatgaacgggcagtacgcatttgactgcagtacggagatcctggcatcttcaaaaaaggatgaggttctgggaatcgtggtaaaagactaagaacattacttgttacttttcacggatgggaatttcctgaaaagaagttctttgcatattgcggtttgcacagcggtccggtattctggcatcgtgccggaccggaaaggaaatggggggtgcagctatagcggatggaacggcgcggaagatgagatccgggctgttcacataaataaataagaaagggcgcagctgactagcgatctgtatgctcgcagatccaacagtacagtccggctgtgagaggattcaaaagaggtatggagagttttttagtcgcggtcaacgcggtcatcccgtttttctgttatctggctcttggatacacgatgaagatcaaaggtgttgtatcggaagaatttctgcagaagctgaaccagatggttttccgggtattttatccgttcatgactttctacaatatctataaggcggatgcggaatctctgccgcgtccgctgctgctgatctttacgggtgccagcatcctgatcgtggaggcgatcctgatcgtgatcgttccgaagatcgtaaaggagaacccgagaagaggcgttatcattcaggcaatcttccgaagcaacttcgtattgttcggactcccgctcacgatcgcagtattcggagactccgcggcatctatcgccgcgatgatggtaaccgttgtcgtatcgatctacaacacgacttccgtgtttattcttgagatgttcaacggagagggaaaatcggatatcaaaaagaccctgaaggcggtggtgacaaacccgttgctgcagggtgcggttgtcggactgatcttctttttccttgggatcaagcttccgggaagtcttgtgactccgatcgcagcattttccaatatgacttccccactggcgatctatgtactcggcggaacgctgcagttccgtgcgatccggaagaacctcaagtacctggttccgacccttacctgcaagctgttttttcttccggggatcattattgcgatcgcatacgcatttggccttcgtggtcttgagttattccttctgatcgcagtctacgcgacaccggtcgctgcggcttcctatccgatggcccagaacatgggcggagacggagaactcgccggacagtttgtcgtgatcagtacggcggtgtccatgtttacattattcctgtggatcttctttatgaagtcggtaggactgatctaagtaaatgataagatgtatgaaatacccgatgaaacatgagctttttacgctcgtgtctcaccgggtattttgctgtcggtatgtctgaaaggcaggggaaggaagaagccggcagatagaaaaagatccgcccatcggatggcttgtccagccattccgtgagcggatcttttgtttcatctgttcttgtcgatttagtcttttttgaaaattcctttgatacgctgaccgagagttttctttttcggaagcgggatcagtcctccgcgcggaacggatttgatctctgtgatgtagagaccgctgatcacaactttgacctcagtctttaacggaagctgaaggaaaactttctcatcggcgatcatggtcatgatctttgtgccgatctttgcttttactaccggaaccttcatccgctttgcataccatggagtctgctcataaacgatcggcgggagtccggcctcttttattttcaactttttcttgtcgatcgccatcagacttacggtctgtttagcggcatcgatcgcgctctgctgttctacctggcgtttttccattttacggccgaggaagtagagcacagcgaggacaacgacaaggatcaggagaatgacaagaatgacatttgctacgatactccagttcatgtggatacctccaatgtgttcacgttcgccctgtaggcagggcattacttttagattatatcattggaggtataaaagcgcaagcgattttcgaaggttagttgtggcgcgagttgcggcggagaggattggcgaggggcgggacgcggcgctgaggggcagatcgctggcgctcccgccaattacagttactttgcgcacagaagttaaaaaaggttgcggattcaaaaatgagatagtataattagtgataactggttggaatttgtataagaattcagaaaaaaactcgaaaaacaggaattcgagagtttcgttttgacaagtttgaagtgtggtacagactgcagccggaaatcatgtacaagaaaggtgatatggagatgggaaaacagacagcttgggaagagatcgacaagaaaacagcagagatcttcgctgccagcgatgagatctggggctgtgcggagacagcttttacagaagagaagtccatgaagatcctctgtgatgttttaaaggcagaggggtttgaggtcgagacgggtcttgcaggtgtaaagacagcttttaagggtactttcggctccggtaaacctgtgatcggtattctgggtgagtttgacgccctgtccggactggaccaggaagcgggagcgactgagaagatcgttgtacatgacggcgcgagcggacatggctgcggtcacaatatgctgggcacggcgtctctctcagcagcgatcgggatcaagaagtacctggaggagagcaagaagccgggtacggtcatttattttggctgtccgggcgaggaaggcggttcaggtaaggcatttatggcgaagggcggtgtgttcgcaaatctggatgcggcgatcacatggcacccgggcgatattacgatcgcggatacgggaagttctctggcgaattatcaggttgcgtacaagttctatggaaagagtgctcatgccggcggagctccgcatcttggaagaagtgcgctggatgcgctggaactcatgaatatgggtgtgcagtttttgcgtgagcatgtgatcccggaggcaagaattcattatgcgatcacaaacaccggcggatattctccgaacgtggtacagccgtatgcggaggtcctttatctgatccgtgctccgaagaacagtcaggtcgaggagatctacagacgtgtcaataagatcgcagagggcgctgcccacatgacggagacacgcgtggagatcgattttgtaaagggctgctccaacctgatgagcaacaaggtgatcgcgaaggagctctgggacaatcttgtggagctcggtgcaccggagtatacggaggatgagctgaagtttgcgaaggcgatcagtgaaggtgttggcgacagccggttcgagtctctggagaaggtcgcaaagaactgcaaggacaagaaggtcaaagcggaggtcctttcccacaagggcgaggatatctatcgttttgtcgctccgttcaacccggacgggatcatgtcctttggatccacggatgtcggcgatgtgagctggaactgcccgacggcacaggcgtatgtgacgacctgggcagcaggtacaccgggccattcctggcaggttgtttcccagggcaagagcggacttgcgcataaaggtctgatctatgcggcgaaagcgatggcgggagctgctgttgatatgtacgaggatccggagatcatcgcgaaggcgaaggccgagatggaggaagatctggacggtgagacttaccactgcccgatcccggatggctgcaaaccgagagcactcggaatgaagatgtaagaaaaacggaacataggatcacggatgatccggtaaaaaaagaaggaaaagtttcccggtgctgccaggaagacttttccttctttttatatgttcatagaaaatcccaaatccagtgatcagatccgttttaattcatactgtcttgttccgagaccgatcttttctgcctgctccagagttgctttccactcgatgtttggattggagtccttgaagtggtcgtggtggcagtgccattccggatctgcgaggtgctcaccgagctggctgttggcgatcggagccgcattcagacaggcatccgcgcaggcctggtcaagagcgaccggatcgaagcttgcgaacattccgatatccggaaggatcggagcgtcattttctccatggcagtcgcagttcgggctgatgtcctgaacaagagcgatatggaagcacggacggtcatagcagacggcctgtgcatattcggccattttccggtccagaagttcatttgcattgtagttcggattgtagatggcgtcaaagctgcaggcaccgatgcagcggccgcagcctttacacttgtcataatcgatgacagctttcctgtttacatatgtgatcgcatcgcttccgcattcttttgcacagcgctggcagccgcgacagactttttcacggactgcaggttttccgctggcatgctgctgcatcttgcctgcacggcttccgcagcccataccgatatttttgatggcgccgccgaaaccggtggactcatggcctttaaaatgtgtcaggctgataaatacatcagcgtccatgatcgcatgtccgatgagagctgttttgcagtattctccgtttacgaccggaacttcgacttcatcggttccgcggagaccgtcaccgatgatgatctggcatccggtggagatcgggttgaaaccgttcaggtttgcacagtcgaggtgatccagggcattttttctgcttcccggatataaggtgttgcagtcggtcagaaacggcatgccgccctgttccttacagagatcggcgactgcctttgcatagttcggacgaagaaaggcgaggttgccgagttctccgaaatgcattttgatcgcaacgaattttccgtccatgtcgatgtttttgatcccggcagcgacacagagctttttcagcttgtcgagctggcttgttccgacatgacagcggaaatcagtaaagtataccgttgatttttccatattttgatcctccattgtagattcataaatagtctgcctgtaaaagccgggcggacttccgtagaagagtatcacgttaatttttacggataggaattttctgaacggaaaattccgtatgataccgtcatgaacagtatcacatgaaacagtttcttacgtcaagtgtttttggaggacaaatttttgtttttgtggtatagtggttatcgtgttactgttcacgggtaggaattttctgaacggaaaattccgtatgataccgttatcgtacgcggacattcatgcctgcacacagtaaaaaatatacagctgtcagaccgggaaagccggaaaaacggctgaaaaggtggataagatgaacataagaaaatttgtgaaaccggcagcgatcctggctgcttccgcatgcctgatggcgggaacacctgcgatgcggatggaagcgcaggcagcatttccggaatatctgaaatccgtgacatatttcggagacgcatggccgatcaacttctggggaacggaagatgacaacatggaagtgaactttaccaggatcaaggcggacggcttcaacagcatcatcctggttgtcccgtggcgcgagttccagccgggagacatggggaacatgtacaatgaggcggcattctccaaactcgacaagatcatgaagtgtgcggatgatcacggactcatggtaactttgaggattggatactgctgggattatgcgggagatgcatctcttccggaccgctattccgggatcgtacaggacgggagcaatgaccggaagatgtggcttgattactgcaagacgatctacagtcgtgtatcggattacggaaatttccagggcggctttatcacatgggaggatttctgggattacaccaccaatatggaccgcgagctgacaagatcgctcagcctccgcatggcatcccggagcggctaccaggattatctgaaggcgcattattctcttgaggagatcagcgctctttacggaaagacgttcagcgattactccgagatctggatcccggagagaaaacgcccggaggcaaagctgttctttgaattttatgacagcttccttacgaagctcctctcggagagccaggaggtattcccgggactttccatggaagtgcgctctgacggagatccgatctatcaggcagacggaagctacacctactattcccactacgcgacgtatccgtgtgcggatgcagagtattcttccctgatgtacagtgtctcactcggacagcagaacgtgagtgaccatatctccgcggagacagcgctcgctgcgatgcagaagaatatgaataatcttatcgggaagagcggaaagaaatatttcatggaacagctcctctacatggattccacggaggcattttcctacaacacacagatcgaggaggctcaggtgggagatttcgtgaagaacctcgcgccgatcttaaaggatacaacctgcggttacggtttatgggtttaccggaactatgtaaatgactgtgtatacaatggtcagtttgcgctcggaacgaccggttgggagacgaccggaactgtccagaatacggaacatgacggctcaaaggcgatctcactggaaaagggcagtgtgatcacgcagaaggtccagggacgtctggcaaagcgggatcagatccatgtaaaattctgggctgcgccgaaaaatggaacagcgaaagtcaccttccagatcggggaccagaaaaagactgttcaggtgcgagaggcgggaaattatgagttctcgatcccgtggcaggtaaactatgatctttccatcacgacagaccgcggggtaactctggacaatatcaaaatgtacacgcacgagcagtacggaaggatctacgacacagatggaaatgagcaggatcttgccgtatcgtttcgtgaactcaacaaggctctcgactaatataaaagctttgttaaaaaacgtaaagatttttgtgatttctacttgcggaattcatcagactacgatataatctccgggatagtctgacagggatcgacagattcctgccaccgtcccgggattttcgtttaacaggataaggttgggggagccgccccgcagctgatggttccgggcgtttaacgcggcaaataaaaggaggatcacatggagaaaaagaaaagttcactcgctgtcagaatgagtatttcccttgtctgcggtcttgtagcaggtcttctgttaatgatgttaagagaaaacctcaacagcacaggcaaagaagctgtctgggcaacgatcaacagcatcctgttccaggatatcacagcagcaggtgctgaaaaggcacttggtattttttacattgtcggacagttatttattcgttctttacagctcgtcatcgtgccgatggtattcacatccattacacttgcgatcggacagatttccgatacaagaactctcggcagaatttccgtaaaaacaattgcaggtttcctgatctgttctttcttcgcattacttatggcatgcgtagtcggaatcatggtctacaatgccggtgttttcaatatccaggtagaaggtcttgaaggttccgccggatccactggttccaacccgttaaacgtgatcctcaatattgttccgtccaacatcacagcggtattcagcacgaatacttccgttcttgcgatcgtattcctggctgtttctctcggcctctgcatgaaggcagtcggcgatgagaagagcgcagcattaaagaagctcatcacggaagtaaatgatatcgttgttgtattcttaaactatgtagtaacaaaatttggcccgatcgcgatcttcgttcttctggcaagaacattcgcgacatacgggatcaaccacttaaaaccggcgcttgcctatgttgttgtaaccgttatcctgcttctcgtattcctgtttatcggatacccgatcttcgtagcagttacaacaaagcagaatccggtaaaattcgcgaagaagatcttccgcgttgctgtattcggattctccacttcctccagtgctgctgcacttccgcttaacgtgaagacaacaacagaggagctcggtgttgacgagaagattgcttccttcgttcttccgctcggtatgacgatcaacatgaacggtactgcgatcatgcaggttgttgcaaccttattcatcgcaggctgcgcaggttatgatgtgactctgtcccagatcatcgttgttgcgctcttagccctgatcgcatccgccggtacaccggctgctccgggtgcaggcgcgatcatcctgttcacgatcctttccggtctcggctacgtcaacgacggtgcacttctcgcatacagcctgatccttgcgatcaaccgcccgatcgagatgctcgtaacagcgctgaatgttgtcggtgactccgcaacagcgatctacgttgcaaagtccgagggaatgttgaacgaggacatctacaactcataataagacataaaaagtccgcatgaaaagcggacagagataagaccggaagccgggggagagattccttggtttccggtctttttacgatcaaagcgcggagaatattcttttccgtgcgtactgcaaaaaacagggttttatggtaagatatgaacaggatcttaacagatggtttccggcagaaacagatgagaaaggccggacggggggagaaaaggatcatgacctggaccatgtatttcaacatgcttttaaatatcggacttctggtgcttcttgcgacacttctcacaaatatgccggcggtccggaagctgttccgcggagaaaataatacgaccatccagaagatggcacttgccgttatcttcggagcgatcagcatcgtatcgacttataccgggaccaggaccggcggggcgatcgtcaatacgagagtcatcggcgtcctgactgcggggatcatgggcggtccgtttgtcgggatgatgacggcagtcattgccggagcacatcggttcctgtttgatatcggcggttttacggcggtctcctgcgcagtttccacgttggtggaaggagtcctcgggagtctggcttataaaagatacaaggcaggagaaatggacagtgtggatcttctttttctgacggcggaggcggaaatccttcagatggtgatcattctcctgatatcgagaccattctctgctgctatgcagctggtaagccagatcgcggtgccgatgatcgtcatgaattctatcggaatggtgatcttttttaaaacatttgatatggtctttatgcgtgaggacagtctgtttgcagagcgaatgcggctttcgatggggatcgcggacaaaagccttgtatatctcagaaaaggccttggaaagcgtgaaaatatggaggcggtagcggatattattttcggggagatcccgtgtcaggcagtgatcgtcacggatgagaaagaggtcctggcggtgagctccatcatcgatgcggcgcgtttccggcaggaaaagtttctggaacttctgacaagaccgtcaaagtccatccgggcagagtgtatccgggaggaagatcttgacgaggagatccgcccgttatttcacgcgctcgtgacggtgacggtcccggtcatgtccggggaggagaagatcggaagtctctcgatcgtcgtgaagaaacggcgccatgtggagaaagatatcagcgattttctggaagaacttgtaaagcttttttccacacagctggaagtctccaatgtggaatatcagaagaagctcaggaaaaaggcggagtttaaggcattacagtcccaggtgaatccgcatttcctttacaatgcgttaaatacgatcgcctgtatctgtgatgaagattctgcaaaagcgagtgatctgatcctgacgctggcgtcgtactaccgccagacactggaaaatgatcagtacatgctggatcttgatacggagatcagccatatccggacgtatctgcagatcgagcaggcaaggtttgaggaaaaactccgggtaaacattcaggtggagccgggacttgcctgtcaggtcccttcgttcattcttcagccgatcgtggaaaatgcggtccgctacggaaatggagcggatggagtcagaaatgtggagatcatcgccgggcgtgtgaaggatgagcggggagaggaacaggttcggatcgaagtccgtgaccacggaaagggatttgcaccgggacaggcagaggcgatcctttccggaaaggcgtccggcagcgtcggattgaaaaatgtgcatgagagacttcggagcacctatgggaaacgatacggtctggtgatccgaaatctggaagaaggagcggaagtatcatttgtcgtgccatatcaggcggagacagcgtaatgcagggggaaaagactgtgaaaattgcagtgatcgatgatgaaagaccggcaagaaagatgttgatccggaggataaaagaagtgctcccggactgcgagatcgtggaggcagagaatggagccggcgcactcgccatgttcaatgagatggaaaaactggatcttatttttgtggatatggatctgggagatatggaggggatcacgctggccggaacggcaaaacgcctgttccagacagcaaagatcatttttgcgacagcatattcccagtatgccgcaaaggcgtatgagatggagatcgatgattatatcttaaagccgtttgatccggcgcgcatccgccatgtcctggagaagtgtactgggatgagagcggggacgggtttaaaagaaaacaccggaaacaggctgaacgaagagtcagagctgagtaccgtgaaaacggagaaacaggaagaacgcaaaagcgtcggaatggcagaaaacgcagaaaatccctctgttttcggaaaaattccggtcacggcaagtcgcgggatcctgttcctcgatattgaacagatcgtgtatgcagagacggatggacatggctgcctggtccatacgacagccagatcctgtgagatcaaccagttattgggagaacttgagaagaaactggtcccgtatggatttttccggatccataaaagctatctggtcaatcctgcctttatcacggagctctccgccggaacgggaaatggcctctctgtgcggatgaaaggctttgaagacaaggaacttccggttggaagagaaaagatgaaaaccctgaaacagatgttaaagatcggctgatccgaaactccgtttccgtttattgcgcaaatcgtgtcgtttgtgcagataagcgtgctgttcgtgcagaccccatttaaaaattgtgcaaaatatactataatacagatgcttgaagagataaaactaagcacaatgcatggaacatcccgaacgagaatgactcgttataggaaaaatgaaatatctttcacaggagcctgtgacgggctcacagagagatcgcttccatgtcaaaagttaaggaggggtttgtatgattagttttctcgtctgtctggcattattgatcggaggatactttgtttacggcaacatcgtaaacaacatcttcagtccggatgacagagaaacaccggcagtccggatcaacgatggcgttgattatgtggtcatgccgcagtggaaactgttcctgatccagctgcttaatatcgctggtctcggaccgattttcggagcaatgcagggcgcgttatggggcccgatcgtattcctctggatcacctttggtacgatctttgcaggcggtgtccatgacttcttctccggcatgatgtccgagagaaatgacggcgcttcgatctccgaggtttgcggaatctatcttggcggtctcatgcagaatgtcatgcgtgtattcagcgttgtccttcttatcatggtcggcacggtattcgcagtcggcccggcaggtctgattgtcactctgttcagcaacagcggtgctcagggcatggtcacaaacaaagaaatgtggctgtggatcattcttgcttactattttattgcaacctttatttctatcgataagatcatcggtaaggtatatccgatattcggtatctgcctgatcatcatggcactcggtgttgcgttcggtatcttcacaaaaccggaatacgtgataccggagatctggagcaacttcagaaatatgcatccgagcggaaccccggtatggagcttcatgttcattaccgttgcctgcggcgcgatctccggtttccatgcaacccagtcacctcttatggcacgttgcatgaagtccgagaaacagggacatttcgtattctacggagcaatggtatgtgaaggcattatcgccctgatctgggcggcagcaggatgttctctctatgaggtaaccggcggtctcaacacaggtcttgcagagatcatgaagaatggtcagtctgcagcgatctacgatgtctgccagaagaccatgggcggtgttggtattgcacttgcaatgttaggcgttatcgcatgcccgatcacttccggagataccgcattcagaagtgcccgtctgacactggctgactggttcaaggttgaccagaagaactggaagaaccgtctgatcctctgcgtaccgttactcggaatcggcgcgatcgtcggacatatggattacagcatcgtatggagatacttcagctggacgaaccagacactggcaatgatcgttctctggactgcaagcatgtacctctataaggcaaagaagaactactggatcacagcagttccggcaacctttatgagtgccgtgtccatgacatatttcttctgcgcgaaggagtgcttaaaccttggaaccgcagttgcatacccggtaggtattgtacttgcagttgtattccttggaatctttatccatgcaacgaagaaacagacggcataaattgagctattaaaaaggcacataaaacagcaggaagctctgcagtcgatgcagaaagtatgagctgccccggcgcttttgaaagagctgcgggcagcttttatagatggaaagatttgggaggcggaaattatgttcttaaaaccggcaaaacttggagaaaaagagatcccggagaagatcctttcagaagacaggaaacactgtaagaagatcggaccgtgcgggatcggaaaagaggcgctctatctcaacagcttttatctggagcggcggtattatgttccggtatcttccgtctcccgtgtctttaaacgcgtggccatgagcaaaggcggattcaccggaaaaggcctgtttgcgacgatgccgtatctggtcgtcgtccttgatgacggcagtgagaaacagtgcaattttaaatatgaggatcaggtggatgcttttgtgtcggctgtgaaggagagatttccgcaggtgaagaccgtgagcgaggcggctgaaaaacggcttgccgaggcggagaagaaagaggcccaaaagcggctcattcccctttcggaacaggcaaaagagagtgttggcattctggagcaggcaaaagaaaagctctcgaagcggatgtccctgtttacggaactcacaaatgcggcaaagaaaaagagaacctatgagaagacaaagccgttttataagtggcttgccctgttcatggtgatcatgggagcagccgctcttggatatggagtctattccttcatgaaccatgatacatttgcggtatattttgtcctgttcggcatggcagccatcttcctgttctcaggagcgaatgtgatgccgacaagcacaaataaccggaaagccatcgaaaaacggcttgcatcagccgagacggcggtcgagtcctatgtggacagtctccatctgggacttccggtcccgtcctgctatcttcatcccgtgaccgtagaacggatggaacgtgtgatccgggaaggacgcgcggagtctgtggaggatgcatttgcagctgtgaaagacgatctcagaaagaccaacgcggatgtctccgtcactcaggaagagttcgacgagatcatggcgatcaagccggtattcctggtgagagattacgcgtaggaatccaggaaagagctttccagttcacgcgaaatgagattacacaccgggtttcacgcccgtacgatcgaatttatggaatacataaaaagggaagtcagccgttcgtcgctgccttccctttttatacattgatagatccggatcagtggaaacgtggatttatttccctgccgccatctgatagatctttaacatatcctcagcttccagcttctttgcagagcccttcgggccgccggctgcttttcttgcatttttcgccattgtttcaagctgctcttcggtcggatcgatgccgagttcttttaagtttgtcggcatcttgatcgcgcggtagaaatcttccatcgcctcgatgcctttcagacctgtctccatatcgttgtttcccggtgccacgcccatgacatttaccgcaaattttgcgaaacgcggagtgcaggagtcgatcacatatctcgcccagcttccccagatcgctgcgagtcctgctccgtgtgcaacgtcgaacatgccgccgatctcatgttccaggagatgggaggcgaagtcaccgccgtcgtttccgcagccggtgagaccgttgtgggagagacttccggaccacatgatctctgcgcgggcatcatagttgttcggatcatccacgaggatcttcgcatttttgatcacggtgcgcatgagtccttccgcgatcgcgtccgtgatctccatgttgccgccgtttgtgaaatagcgctccatggtgtgcatcaggatatcggtgcagccgcaggcagtctggtacggcggaagtgtcattgtgacctccgggttcatgactgcgaataccgggcgggagatatcattgttgtagccgcgtttttccagcgtctcgtcatttgtgatgacggagctgttgctcatctcactgccggatgcggcgatcgtcaggacaacaccgaccgggaggcaggcggtcgcctggcgggtatgctcatagaaatcccagacatccccatcgtttgcgagaccgtaaccgatcgccttcgcggagtcgatcacactgccgccgccgacagccagaagaaaatcaacgccttcttttttgcagagttcgatcccctcacggacaagagagaggcgcggattcggaacaacaccgccgagctccacataggagatcccggacgcatccagggattctttgatccgtccgagaagaccggagcggatcacacttccgcttccgtagtggagcaggacctttttacagtttacgttctttacgagagttccgatctgtgcttcggtattttttccgaaaacgacacgggtcggggtatagaaattaaagttgaacatcatacatcctcctgaattgatatgaatattttttaagaaaaataccgtttgttacagcatatgggaactctgcgaccataacggtatcatacggaattttcagctcagaaaatccctgcagtggaaacagcaatgctcaatatgtcaagtatactaggaaatcacttctttggcaagaaagattccggatattttcagctttttgcaggcgggttttatctggatcagattcctgtgtgcgtatagattttacataatttttagataaagccggttctggattttacagagcaaaattacgataaagacaaagtgaaagatgagtgcgtaaatggatagagcggtatcgcggaggaaaaatatatgggtgcagaagatcggaaagttatattgaaaatagaaaatatatcaaagaaatttggaagaagaacaatcttaaacggaatcagcatggaagccggacagggcgagatcataggaatcctgggggcatccggatgcggaaagtccacgctgctcggtgtgatcgcgggagagctggtaccggatggcggaaagatcatgatgaatgaaaaggtgatctctgaggagtgtaatgtgctgtctccggaaaaacggggcatgaagtttgtatctcaggattttgaactttgttcccacaaaacagtatatgagaatatcaccagtggtttcaggaaacattggtttcggaaggaagaggacggagagctggtaaaagaagtgataaagatcttgcatctggaaggtctcgaaaaccgctatccggaggaactttctgtcgggcagcgtcaacggaccgcggtggccggagcattggtcgtgagaccggagatcctcttactggatgagccgctctgcagtctggatatcggtctgaggataaaaatgagaacagagatggcaatgctgttccgcagacttggaatcacggtattttatgtaacacaggatccagcggaagctttttctatggcggatcggatcgtgatcatgaacagaggtcagatcgaacagttcgatccgccgcaggagtgctatcgaaacccgaaaacagagactgtggctgccatcttagggattggaaaccgcgttcacgggtatgcgagagaggacggcggtacacagatcgatcttggaggcggcgtctgcgatacacttggaagaagcgggatccataaggatgacatggtaacggtgcgcttccgcgccgagaacgcagtgtggagcggagacaaacgtctgaaaaacagctttccggtagcagtagaagatgcgttttttgagggtgattactaccgcgtgactgcgaaaatgggaatgggagagccactctgtttcttgagtcgcagctatctggaaaaaggtacggaaggttatgtgaatgtggagggcgaccacatctatgtgtacagtaacggaaatgaaaaaaatttctgacaaaaatgctttacaaatcataaaatgaggagtatattataggcaatcgcagataaaaaatcagaattgtctgtgagaaaagaaaataaatgtcttcagggcagggtgaaaatccctaccggcggtaaagcccgcgagccgaaaggcatgatccggtgagattccggggccgacagtatagtctggatgaaagaagatttaaggttttatctgtgtgataccaatagctgttccataaaaatgtggagcagatcgattggattaccggcatatggatcacgggtgaatggctctgaaatgggaaactgtttcggagcttttttgtgtaattaggaatttcccattgcacaaaaaatcacgatacgtccacgatgcgcactcgcgtgcggatgaagattgccgcggaaaactccatcggaatacatggataaaacgcatatgaaaaccctgtaggcacccgacttacagggttttttagtggtgggaaatcccgctggaacaggaaaagacacaggcaggccggggttgcggaaaggagagatgagatgacagagcgggattacatgttacgggcgatcgaacttgcaaaaaaaggacgcggttttacaaacccgaatccgatggtgggagcagtgattgtaaaggatggccggatcatcggggaaggttaccatgaacggtgcggcgagcttcatgcggagcggaacgcgatcgcgtcgcttacggaatctgcggagggcgcgacactctatgtaacactggagccatgctgtcactacggaaagacgccgccctgtacggaggcgatccttgatcagaagatcgccagagtggtgatcggctccagggacccgaatccgcttgtcgccggaaaaggtgcagagatcctcagaaacgcgggagtccgggtggaagaagattttatgcgcggggagtgcgatgcgctgaaccccgtgttctttcactttatcacgaaaaaagtgccgtatgtggtcatgaaatacgcgatgacggcggacggaaagatcgcagcgcggaccggagactcgaaatggatcacgggggaaaaagcgagagaaaaagtacaggaaatgcgccatgcttacatggggatcatggtagggatcggcacggtcctggcggatgatccgatgttaaatgtgcggatcccgggaaagaaaagcccggtgcggatcatctgtgacagcagtctgcggatcccgatggattccggaatcgtgaaatcggcaaaaaaataccggactatcgtggcatacgccggggagaacgcagaaaaactggaacagctccggaatgctggcgtggagacgatatctgttccggacgtgcatggtcaggttgatctgaaaaaactgatggagtatctgggagaacaggggatcgacagcattcttctggaaggcggcggcacgttaaatgagtcggcacttgcggcaggaatcgtgaatgaggtgtgcgcgtttattgcaccgaagatctttggaggcaccgatgcgaaaactccggttgcgggaacgggggtggctcatccatcggaggctgtgatgctgacgctgaaagatacggagaagatcggggatgatctgatgctgcgatatcaggtgaagatgtcagatctccactcatagaacatttggacagaggatggaaacagaacgatcagagcggtatctgtgaggagaggttctgaaaacgggagaggaagtgaaaaaatgtttacgggaatcgtggaagaactcggtcaggtaaaggcactttccctgcgtgggagatcgggaacgctgacagtcagggcgaaaaaagtcctggaaggaacgaagatcggggacagcattgcagtaaacggcgtctgcctgacggtcacagatctgaaagacggcggattttccgcggatgtgatggcggagaccgtgaggcggagcagccttggatccctgcagaatggaagttatgtaaacctggagcgggcgatggcagcggacggaagattcggcggccatctcgtgtccggacacatcgatggaaccgggaagatcgagtccatgagacgcgaagaaaacgcagtctgggttacgatcgcatgtgcagaaaagatcctggatctgatcgtggaaaaaggttccatctgcatcgatgggatcagtctcactgtggcagcggttacggaccgggatttctcggtgtcggtcattccccatacgggagaggagacgacgctcttaaagaaaaaagcgggagatccggtcaatctggaaaatgacattgtggggaaatatatccggaaatttgtggatatcggaagaaaatctgccggggaacgggaaaaaacacctgacggtggagatctgacaggaagtgagaaagaaaacacaggactcagcatggaatttcttcagaaatacggattctgacaagagcagacaagtggtgaaagcggatcgcgaacaggctttgaccatggatcataaggtgcgattgcacgaagcagagaaatcggaggatttcagaaaggcgggaaatatgaacgaacagtacaatacgatcgaggaagcgcttgaagatctgcgggcgggaaagatcattcttgtcacggatgatccggaccgggaaaacgaaggggacatgatttgcgcggcagagtttgcgacgcaggaaaatatcaattttatggcgtgccatgcgaaagggctgatctgtacgccgatgagcgcagcagtggcggagcggctgggactcccgcagatggtatcggagaacacggacaaccacagtaccgcatttacggtctccatcgaccatgcggacacaacgacagggatctccgcggcagagcgttcctatacgatgatgaagtgcgtggatccggcgacgaaaccgcaggatctcagaagaccgggccatgtgtttccgttggttgcaaggcgcggcggcgtccttgtgagaaacgggcacacggaggcgacggtggatctcatgcgtctggcgggactgtccgaatgcggcgtgtgctgtgagatcatggaagaggacggaaccatgatgcggaccacaaacctgtggaagctggcgaaggagtacggactgaaattcatcacgatcaaggagctgcaggattactgccgtgtccatgaaaaacatgtggtgcaggaggcctgcgcggacatgccgacccagtacggacactttaagatctacggctatgtgaacgatattaccggcgagcaccatgttgctcttgtaaaaggtgatatcggggacggcgaggatgtgctctgccgcgtgcattccgagtgcctgaccggagatgtgttcggttccatgcgctgtgactgcggaaaacagctccagaccgcgatgcgtcaggtggaggcggaaggccgcggcgtcatcctctacatgcgtcaggaaggccgcggcatcggtctgatcaacaaactgaagacgtatgtgcttcaggagcagggctttgacacggtggaggccaatatcaagctcggttttgctccggatctcagggaatactggatcggggcacagatcttaagggatctcggcgtgaagtccttaagacttctcacgaacaatccggagaagatctacggactttccggcttcggacttgagatccatgagcgcgtgccgatcgagatcgatccgcagcagtacgacagcttctacctgaagacgaagcaggacaagatgggacatatctttacaaaaatcaaagtgtgatagaatagaaagttcatcgcagaaaacataagaaagaaaaggagaatcatcatgaaagaaattaaggtattagaaggaaaagtcgtagcaccggaaggcatgaaagtggggatcgtagcttcccgttttaacgagatcatcgtaaataagctcttaggcggagcggttgacggacttgtccgccacggtgtagaggaagaaaatatcacggcggcctgggttccgggggcgttcgagatcccggttgcggcatctgccatggcaaagtccggcaagtacgatgcgatcatctgcgtcggcgctgtgatccgcggtgataccacacactacgattatgtgtgcagtgaggtctccaagggaatcgctcaggtgggactggcagagaagatgccggtactcttcggtgtcctgacaacagagaacatcgagcaggccatcgcccgtgccggaagcaaaggcggaaataaaggatatgactgtgcactttccgcaatcgagatggtaaatcttatgagacagttctaaattcagatgatatagacataaaagatcagcgctcctgagaatttttttcagaggcgctgatttttgcgtaatagggattcctcggaagctcctattacacaaaagatacattctgttttataagagtctatatggttttcgtttcctccgtgaatttgaccgcgaaatcccggttcagttttatgaagatctgctgctcctcggcagaccagctctcgaaaatcgcattttcaatggcgatcaggcgatgggcggtgtttttcatgagttcctctcctttttccgtgagaaaaacgcaggtgttccgccctgttccgggtttcaggtacagataaccggcctgttccatcttgcgtaccgcggagttgatcgtggattttgtggtgccggtctctttgtaaaagatactctggttgcagccggaaccgtgttcattgagggagtagagaatatcaagctcgctgtccgtgagaccgagctttaatgcagcgtcatggtaggcattgttgagctggctgagcaggttgtaaaattctttaaatgcagagtacatggcagatctcctgaaaatataagtgtatgggggcagtgcaggtctttgcatccgcctgcccggactgtcagtttacgcgtatccgtacttcttcgccttccggatcaggaagaagagtgacaggcataccgccataaattccgccgcgatgatggaataccagattccggaaacaccgaggaaaaacggcaggatgatgacagcccccgtttcaaagatcatggtacggcagaaggagatcgcagcggagacgcccccgtcgttgagtgccgtaaagaaggacgatgcgtagatgctgaagcccatgaacaggaaagagatcgagtatgagcggaatgcatggaccgtcatgtctaagaggtgcgtgttatagcggacgaaaattcccgcaagaaagggggcacctgcttctgccgcgatcgtcaggatgatctggaaggtcaggatcagccggaagctttttccgagcagattctttaactcactcttatttcccgcaccgcagtgatagcccacgatcggggcacttcccatagagtagccgataaagagtgccgcgaagataaagctcacatacatgatgacgccatatacggcaacaccgtcggaaccggaaaggcgcatgagctgccagttgtaaagcatgtttacgatggacatggagatgttcgtcataaactcggaagcgccgtttgtacaggccttcaacagggcattaaggtccatatgggtctttccgagacgaagccggctcttgttcggaaagataaagtagagcagagggatcagtccgccgatggactggctgagcgccgttgcggcggcagcgcccacgacgccgagacgcagaacggcgataaaataagcatcgaggatcatatttgtgagtcctgacgcgatggtgatcaagagtccgagctgcgggcgttccgctacaacgagaaagctctggaatacattctgcagcatgaagggaatcagagccagcaggatgatccggccgtaacggacgcagtaggggagaagaatctcatcagcgcctaagagtcttgccatcggggctaaaaggatctcgccgcctaccgtaaagagaaagcccaccgcgatcagaacgtagacgaggagagaaaagatctcctttgcctttttttcattcccgatcccgaaggtcagagccaccagggcactgccgccgctgccggtcataaagccgatagcaccgaggatcgtcagaaacggcataatgatattgatggaggcgaaggcctcggaacccacaaagttcgagacgaaaacaccgtccacaactccgtagatggaggttaagatcatcatgatgacagacggaaatgtgaatcgcaggagttttttgtaggtaaagtggtcggaaagcgaaatattcatcgtgtgccctttcagtttttttgattgtgtctgcccgcggggaaaattcgtgtctttcccatctgacagttttacagctgttgatgtacgaaatcgtacgtagaatcatagtacgatttcgtacatatgtcaagaagaactttacagttattgttcgcgccttgcgcaaacagtaactgattttgccgatgcttcgcattccaaatcggcaaaatccactaccaccactgtattgtacggaattttcagttcagaaaattcctacccgtgtgcagtgacattttacacagattttacattcttttaccgaagtgcgattgttcctttcttttttctgctatatgatatagaagtgaaaatgagagaaaaaagaaagagcagtcacgagctgggtcgactgcggcagaggaaaaagaatatgacatataaggaaatcaagaaaaacgaggaagttttagcttacctgaaaaaaggaaacgacaatctggggactatgggatttacggatcattcggatgcacactgtgcgatggttgcggagcgggcagcaatgatcttaaagaaattcggttactcagatcacgatatcgagctggtgaagatcgccggtttcatgcatgatatgggaaatgcgatcaaccgccatgcccatgcggagtatggtgcccttttggcatcccagatcctggaaaaaacggatcttccgatcacagaccgcgcgatcatcgtctcagcgatcggaaaccatgacgagtcaacgggcggagccgtagatccgatctccgcggcgctcatcatcgccgacaagacggatgtacgcagaaaccgcgtccgccagaaggagatggcatcctttgatatccatgaccgcgtaaactatgcggttacagaggcaaaattaaaggtaaacgaggaaaagaaagtgatcaccctgaacctgaagatcgacgaaaacatctgctccatgctggagtacttcgagatcttcttacagaggatgctcatgtgccgccgcgcgtgtgaaatgctcggagcgaaattcaagatgacagcgaacggaagcaagatcgtgtaacaaaaagaaatccggaatactccctttatgatatcccctgaaacagattttatggatctgttccgggggattgtttttgatgtcataggattaaaaaaacaacaaatatattagttgcaagcaaaacggaaaataattcaggatgaaacagggaaaaaagcaaaatatatttatgcacatcgtataaaaacatagaaatatatcagcaaaaatgcaagaatatgcttaatatgagcgcgtatcggttgacacatattagaaaatatcgtatagtaaatatattagtagaacaatgtgaggaaagggcagaaccctaaggaggaaaaacgatgaaaatgacattccgctggtacggcgaagacagtgatccgatcaaattaaaacagatccgtcagatcccgggtatgaccggattgatgggcttacttgattataaggcagcaggagaggtatggacagaagaagagatcaaagcatatatggagcatgttcatgcatccggtcttgagtgcgaagtcatcgagagtgtaaacgttcacgaggatatcaagatgggacttccgacaagagataaatatatcgagaattatatcaccacgatccgtaacctcgcaaaatacggcgtaaaggtaatcgtttacaacttcatgccggtatttgactggttaagaacagaccttgcaagagagatcccggaggatggctccaacagcctgtactttgacgaaaaggatcttggagagatgactccgcttgacatcgtaaagaaaacagcagaagacagcaatggcttctctcttccgggctgggagccggagcgtctcgcagagcttgaaaagacattaaaacagtatgagaatatcacagcagatgatcttcgcagaaactataagtatttccttgatgcgatcattccggtatgtgaagaggttggtgtcaagatggcatgccatccggacgatccggcttggccgatcttcggtcttccgagaatcgctcacagccaggaggatttcgataagatctgcgctctgcatgattcaccggcaaacggactttgcctttgcacaggttctctcggatccaatccggacaacaatatcccggagatcatccgtcactttggtgagatgaacagaatcaatgccatgcatgtccgcaacgtaaaattcctcggataccacaaattccgtgaggcatcccacctttcctccgacggatccctggatctttatgagatcatgaaggcgatctacgatacatgcccggatacatatatccgtccggatcacggcagaatgatctgggatgagatcggcagaccgggatatggtttatatgaccgcgcacttggtgcaacttatctgaacggactctgggaagcgatcgacaaaaatgccaaagcttctgagaaataatctgtaaccataaactgttatacgaaaaagaaagcgtggcaaatatgaaattgacattaaatggaatcaaagagacggctgcctgggaagcagcaggaatcaagcttccgtcctattcgatcgaacaggtggcagaggaaacaaaaaaagcaccggtatgggttcatttcggtgcaggaaatatttttcgtatctttattggcggacttgctgaccgcctgatcacacagggagaaatgaaaaaaggaatcacctgtgtggagacctttgattttgacgtagtggataagatctacaagccatatgacaatctggttctggctgtcactttaaaggcagacggttctacagataagcaggtgatcggttcccttacggaagcgatcaaggcacagtcaaatgttccggaggagtggaaccgcctgaaagagatcttcgcggatccgggtctccagatgatctccttcacgatcacagaaaaaggttacgctttgaaaaatgctgagggaaattatttcccgtttgttcaggcagatatcgacaatggtccggaaaagccgggcgctgcaatggcagttgtatgtgcactgctgtttgagcgtttcaaggcaggaaagcatccgttagcagtcgtatccatggataactgttcccataatggagaaaaactccagaattccatcctcacaatggcgaaggaatgggaaaagaagggctttgtagacgcagactttgttgcatacctttctgatgaaaagcagatctccttcccgtggagcatgatcgataagatcactccgcgtccggcagattctgtatgcaaggagctggagaatgccggtgttgaagatatcgctccggtcatcacatccaagaaaacctatatcgctccgtttgttaacgccgagggaccgcagtaccttgttattgaggataaattcccgaacggacgcccggcactggaaaaggtcggtgtctatatgacagaccgcgatacagtaaataaggtagagcgcatgaaggttacaacctgcctgaatccgttacatacggcacttgctgtttacggctgcgttcttggatatacattgatcgcagatgagatgaaggatcaggaattaaacaagctggttcatgagatcggtccggtagaaggaatgccggtcgttaccgacccgggaatcctgtctccgaagaacttcgttgatgaggtgatcaatgtccggatcccgaatccgttcatgccggataccccgcagcgtatcgcaaccgatacatcccagaaggtcggaatccgttatggagagacgatcaagtcttatgttgcaaaatacggagatgcaaagaagctgacagcaattccgcttgcgattgcaggctggtgccgttatcttctcggtgtacaggatgacggggaagctttcgaacgttcctccgatccgatgcttgcagagcttacagaggtaatgaagggaatcgagcttggaaagccggaaacctaccatggacagttaaagagcattctttccaatgagaatattttcggaatcgatctttacaaggccggaatcggtgagaagatcgaggagatgttcttagaagagattgcaggacctggagcagtaagagcagtcttaaagaaatatatggcttaaacagagaacagaaaaggtatccgccgcagggtggatacctttttgcattaggaaattcgtacgaagacatcgattgtcgtgagcggtcgcacgaggcgcgagaatgtgccaaggcgcattccttatacaaaaatacctttgacagccgggaactgatgtgacagacacaacagctcttaaactgccaaaggtatttttatttacggctcgttaacctgaacaacg

SEQ ID NO: 2000 - DNA, 45355 bp, Unknown
  gut microbiota DNA sequence
atgatggttgccggcgcttcatcaatggagatgacctttgtcaggatcttcttgatatcaactcttccactgtggatgagttcgatcgcttcctcaaactcaccggcacttgtacgtgcaccgcggatatccacttcctttttcgtgatcagatcggttgggagcggagtttctgttttcggccatccggtcagggtgatccttccggcattacttacaagatcaagggtggagcggatcgctgcgtttgcgccgctgcattccataacctgctgtgccataacaccgtttgtgatctcactgattcgttttaccgtgtcttccgttttggaattgatcacatattcgatgccaagttcctttgcaaactgcagacgttcgtcgacaagatcgagtaagatcgcgtgagcgccgtatgcctgtgcgatcattccggcaagaagaccgatcggaccggcaccgatgatcgcgcagtactcgcctgcctttaaaccgccgcggtgaatgccgtgaagtgagattgtaagcggctctgccattgcagcctcttcccagctcatatcatccggcatttttacgagcatgtctgccgggtgacagaagtattctgccatgccgccgtcaacatggacaccgagtacatgaagatcggtacagcagtttgtacgtccgatgctgcatggatagcagtggccacagtacaaatacggatctgcgatgactttgtcgccgatcttcagtccttttggattgtcctccggaatggattcgatgattccggctaactcatgtccaataatcctcggataggaaacgaggttgttagttccgcggaatgcaccgatatcggatccgcagattccggctgtgatgatcctgatcaaagcctcaccggcctttggcgttggtttttcaatgtctgcgagcacaacattttttggctcgttgattcttactgctttcatagtgaacctcccagataatatgctttgagagagaaacaagggcggatgtgactgaaaaatctcagggggatacatccgccttctgttatcggcaatgttatgaaaaagaatgattaaaggttatcaaaggtaaatacgatcttccggatggatggatcgcgggaatcaacaaaatcgaatgcttcctgtgcttttgtaagcgggaaggtgtgggaaatagagtttgacaggtcgagagttccggcattgatcatctcgatcgcttttccgaacatcttattctgaagtctggaaccgcgaacatccagctcctttgatgtaatcgcgaactggttgacctctgttggtgcagtggagaagcccatggtcatgactcttccggcattgccggttgcctgaagaagattgatcagggaatcctttgtgcatgcagagtcgatggaaacagttgcaccatgaccaaaggtgtattcctttaccttctcaacaagatcttcttttaatacgttgatcgtatattttgctccgtttttctttgcagcctcaagcttctcatccatgatatcagccacgatgatgtggtcgcagagctgacgggctacctttaaaatcgtgcttccgagagcgccggcgccgaagatcagaagcatatcgtccttttcgagctgtgctcttgtacaggactggatcgcgatcgttgtcggctcgatcataacagcatcctgatcggaaagagaatccggaagaaggtagcagtcagattccggaacagcaatatattcacgatatccgccgtcgatatgaacaccgcggaccttcagattgtcgcagacatttccgcggccaatcttgcacggatagcagtgaccgcagcttgttacctgattgacgatcacgcggtcgccgacctttaaattctttacgttacttccaacctcgtcaacacgtccgaccatttcgtggccgatgatgcgtgggtaggttgcggcagcatttgttccatgatagattccgacatcagatccgcagataccggctgcggtcattttgatcataacattgtttttttcatcgatcgacggcttttctacgtcgatgacctgaaggttgttaggacttacgatttgtactgctttcatatcttgttcctccatgtttttatgatgatattttagtgtcctttttttgattccggagagcttcgcaagaaaatggtttgacacatttgattatgaacacataatatattagttatacagggattattatactatacaaacaggataatatcaatatatttgggtaaaaatgacgaatgaagagctggaaagtgaagaaaagccaatagaacagacgaaatgacgatggaataaacatattagattggaaaaataggaaaagaaaccaagataaataagcgataaaacgtgtgattatagtaaaaaacatagtatattagttgcaataagaaaacaaaaagctatattggcaaaatgacggttttctgttataaataaaagcagggaaaggaaatggaggtatttatatgccatttgaaatattcagtgaacggaaaaacggagagacaaacagtaaatatgcataccgtcttctgagggaaagcattatgagctttaagcttcttccgggagaggctctggatgagacggtgattagtgaacagttcggaacaagcagaactccggttcgtgaggctttgatcctgttaaaaaatgaaaagcttgtggacattcttccacaaaaaggaagcaaggtcagctttatcgatctgaatttagtcagacagggatattttacgagacgtgtgatcgaaacagcgatctttaaggaaaccgccggaacactttcgccagagcagctaagaaacatgaagaccaatctgcagcttcaggagcaggagatcaaccgtgagacgaccatgagcgattatttctttgatctggacaatgagatgcactgtatgttgtatgagttcagccataaaatggatgtatggtactgtgtccataatatcgggtcgcattatgaccgtgttcgatatctggatacaagggagaatgatatcaaccgggagcagatcttagaggagcataaccggatgtattattacatgatgatggggatcccaaatgatgtcaatgtagaagactttatgaccggacatctgggacgattccggagagatctccagaaaaagatcgaactgtatccggaatattttacggagtaggagatcgcagacagatcatatgaatcactaagcctggtatacggcagtaatgctgttatatcaggcttttttgagtgaatcttgcgaattttgcacaataaatatattagagaccttgataaaaggaaaaatattgtgttttattgaggtgtataagctgttggaccgcttgaatgagcaacggaatgagaaaatggacggaaaacaaaacaaattatattgtgcaaaacagacaaaaaacggattcgaaatcatctgcaatagaaaaattaatgtgcaacatatacaagtcagaagatgaaatggaaaatatgcacaaaaaacagaaaaaaattatggggaaattgtgaatagatattattgggatgatatggcaatatattagtatattaaccgggagacataagtaaccagatcagccgtgttcagaacatgggtgatcgctaccggaaacgatatcgcggtgtagctgtttgatttggtctttataaatatattagatttaggggaaaataacaaataaatcgatacaaatggacaaaaaatatattcaattcatacaaagcaaaccaagcactctgtataaaatgcacaaaaaaatccaatattttacgataaatcattgacatttgatacattaccaagtataatctgttgtatacaaagaagtatacaagaaagtatacaagacgagaaaacagttatgtacaaatggggatttggacgtaatgtgcagggaaaaaagttttccatgaggaaaacaacaataaatttttaaatggaggaaaaattatgaaactgaaaaaagtagtagcactcgtagcggtcggcgctgtagcaacaaatctcgttgcatgcagcagttcttccggtggatccgcaaccaccgcagcagcagagacaaccgcagccgcagcagaaacaaaggcggcagaaacaaccgcagctgcagcaaaagacggagaagcaaaaggaatcaaggttggctttacaaacagctacaacggaaacagttaccgtcagacagaagaaaaacagatgcagatcgttgcggataagctgaaggcagatggatatatcagtgagtatacagttgctgaggcaaatcaggatacagcgacccagatcgcccagatcgaggattttatcactcagggatatgacattatcattgttgatccggcttccacaagctctttaaacaatgcgatcatggaagcgtgtgatgccggcattccggttatcactgtcaatgatggtccggttgattgtgaagctgatctgttataccagatgtactttgagaatgaagagatgacaaaggctcttaccgagtatgtatgtgagcagatgggtggctccggcaacctgatcgagcttcgtggtacagcaggtacaacgacagatgatcagttccatcagggtgttttagcagctcttgaaaaatatccggatgtaaagatcgtttccgagatctatacagactggacagcatcgaaagcacagacagagttaaacagtgttcttccgacactctctgatgtgaaaggtcttgtaacacagggcggagatgcttacgctgcagtacaggcatttctttccgctggatattccgcagatactcttccggttatcgcaggtgataacagaggaagcttccttaactggtgggcaaatgaagctccggaaggttacaagacattatctgcagcaagcaacccgtggatcggtgcaatgtctctttacgtagcagttgatatctgcaatggtgagaaagttgttaacaatatgagtgttccgtttggtatggttgatgcagatacactttctcagtatacaggtttaggcgatgatgatgttgcctttacagaaatgtcatgggacgatatcagaactcagatcgagactcagtagtgattggctaaaaagctttacgaatgagaatatcagatcgaacatgatgcaggagggggatacagcaagtttctgctgtttccccctttttctatcaggattcttttgtggaaatgaggaagaaatatgaagacacttgaaaaattgctggatttagttggtacttgtgaagtgatcgatatgacacacccgttggaagaagagattccacattggccaacacaaccgggagtaaaatttcacaccggtatgaattatgttgaagatggttcttattggagaggcgttacgctttgtgagcattccggtacacatattgatgcgctttctcatttctttaaggattcggaaaatgtggacgaaatcccgctgaaacgcctgatcggaagaggcgtgaatatcgatgtgactcatacacctgcaagaggtgtaacgacggtagaagatgtaaaaaggttcgagaacgaacacggagagcttaaagaaggagatatcgtatgtttccgctttggatgggacaaaaagtggaaagccggggaagagggaaaagcatttatggaggactggcccggaatttcaaaggagacagcggaatatctgctttcgaaaaaagtaagtgcagcagcaacagatgcatccgcactggatgcgatcggaactacaaatccggcgcataaggttcttctgggaaacgggatttatattattgaaaatgtggacaagctcgacatacttccgcccttttttggcgtgattggtcttccgtgtcggcttaaaaagggatcaggttcgactttgcgtttgatcgcattgatcgacaagtaaagatatagaaaggaagtgattcgcttgaagcataaagagggacaaaagccatacttaagcttgaaaggcattgaccgtttttttggaatcaccaaggcacttcagaaggttgatctggatatctatgaaggcgaggttattggacttgtaggacctaacggagccggaaaatccacaatgatgaaaattctgacaggcgtgcttccaaaaacagcaggtcaaattatttataatggagttccggaagaaaactacaatgcaaaaattgcaaaacagattggtgttagctgtgcataccaggatctgtcactttgtaccaaccttagtattttcgaaaattttgcgatgctgaatgtcagccacagtattgcaccaagcaaaaactggagaaataagacaaagacagaggtggaaaagctccttgaaaaatattttccgggaagcaatattgatgttacaaaaccgatcgagacattgagccttacggatcgtcaggtcgttgagatttgcaaaaccctgatggcagatcacttaaagattctgattctggatgaaccgacaagtgcattatcttccgataaagcggaacagctgcataagatcgtggcagaactcagtgaaaaaggcgttgcagtgatctatatttcccataagctggatgagatccgtaaagtatcggaccgtatcgtgatgctcacaaatggtcagaatcgcggagaattctattcggatgaaatcacgcaggaagaattgatcatgcacatgggcggagcatcagagaagaaggaacgggtggctcgtgatttctctgaaaacgaggacatgttaacgatcacggatctgaaggcgaagggcttgaacggtgtcagccttaatttgaaacgtggagagatcattggcatttccggtcttgccggttccgggcaacaggaacttttacagcagatctacggagcgagaaagaaacagaaagagggaattgaattaaacggttcgattgcctatgtttccggagatcgtgcgacagaaggagtatttcagttctggaatattaagaataacattctggtggccaaccttgaccgtgtgaaaggaaaactgctgatcgattcaggaaaagcaaacgcttcggctcaggagtggtatgacaaattgaagttccgtgcggaaggaatcgagagcaacatcatgtcactttccggcggcaatcagcagaaggctttgatcgcgcgtggtattgcatctgaggcagacatcattatcttaaacgatccgacggcaggtgttgatataggaacgaagcaggatatttataaattgctggatgatacaagagaaatgggaaaatccatcatcctgtattcgacggaagatctggagatggagatctgtgaccgtgtatatgtaatgcgtgacggatatgttacaaaagaattgatcggtgatgagatcgatgtgccgaatatcgtaaaggcagcttttattgagacagaaaagaaagaggtaaaggaaaaaaagaaaagtgcgtttgcacagtatttgtctgcaccgtggatgcttccacttatcacattgattcttatttttgcggcgaatgtctgcatcaatccgaaattaatgacctatgccggtatgagaatgaagatcagttctgcattgccgctgatctttgcagctcttggtcagatgttcattgtcatgtgcggtgatgtagatatgggaaatggatattcgatcggacttgtaaatgtgatcgttggtatctggctgaccggaaaccctctggttggattccttgggcttgtaatatttgtaggactttacatggctcttgcagctttgatcaagatccgtcagatccctgcaatcgttgttacgatgggagcacagtttgtatggtatggactcgcccttatcatctgcccgacacccggaggaaaatgtccgcaatggctttctgattttctcagaattaagacaccggtcattccgcttccaattatcattgccgtggtcaccggattggcatgctggtatcttctttaccgatgcagatatggtattgttcttaggggcgcaggaaacaatgtccaggcattggaacgttccggatggagctaccttcttgcaaaagtggttgcgtatggaattgcaggtttctttgtagttcttgccggtatggcatatacaaatacatgtaacggtgcggatgcaaacagctctgtaaactataacatgatgtcgatcgcaacagttattcttggcggctgcgatatggccggaggacttccggttccggtgggagtcgttatggcagcgatcgttatgaatctgatcaattcgcttttaactgccatgaagatgaattcgaattatcagactgctatcatcggacttatcctgataggagttcttgccttaaagttcctgattcatagaggggagcgtgatcatcgtgaataataagatgaaaaaagcattagaaagtccggtgatctggccggttgccggttgtattatcctgtatatcctaatctgcatcgtatccggcagcgtgaatgcccgtgttattacttctggtttaaaattgtgtgtatttgccatgcttctcggtgttgcgcagatgatcgttgtaacgagtggaaaaggtgcgatcgatatttcccagaaatatattttgacattggcagcgtatgtttcctgtgaactgatgcagcacaatattcttcttggactggcggcagcaattgtggtcggcatgatctgcggcttgatcaacgcaagcgtcaatgtttatttgaatattcacgcaatgattacgacgatggctacaggatatctgtattatacggtgatcctgcttgtatccaacaagtttgcaaattctccgaacagtacgtttgtgaagtttacgaatgcaaacatctgtgggatcaataccatgacggctatagcgatcctgattgcggtcattcttttctttgtactgtacaggacaaaatatggtatgaaccttcatgcagttggtcagaaacgtgaggcagcaagacttgcaggaatcaatgtgaataagacggtaattattgcctttgtgatcaatggtgctctctgcggacttgcaggtgcgttgaatgctgcatattgcggaggtgcaaatcaggatcttggtactacatattttctgccttcgatcgcagcctgctttgtgggaggtacaaatgcagcaggtggtaaatccaatattattgccgtatgcattggtgcgtttatgatgacattgatgtctaccttcctgaatgccgcaagcatcagcgtcggcggacagagattgattcagggtattttcattgtattgctgctggttgcggcgacgaaaaaaactgcaaaataagataatgaaggatctgcagctggataaaatctgtctgcggatccttttttatctcagtctagaagactcccgcttcttttaggtggtgagcaataggaaatcccgaaaaattccctgtaaagaaaaataaatgcttctgttcattgccttattgcggtggatatgttatcgtagatgcagaaattaagattcatattttgcaaatatgaatgcactgaatagttgccatatttttaagtagagaccggatatcattgtgaaagaacgtgtatgtgcggctgcatgaatgtaagatcatgatatccgtaagaaggagtcaggaccatgatatttactccggttgatctggatagctgggagagaaaatcccattacgagtattatacaaaactgttaaaatgcgggtacagtgtgacggtgtctcttgatatcaccaagctgcaccgtcaggtaaaggaaaaaggattgagattttatccggtgtttgtgtactgcgtgtcgaggcagatcgcggcaacgaaggaatttcgaatgggacgggacaaagacgggaatccgggatattatgatgtccttcatccgaactatacgatctttcatgaggatgaccacaccttttccgatgtgtggaccgcctatacggaagatttttcggcgttttataaaaatatgtgcagtgacatggagacataccggcatgtaaaggcggtaaaagcaaagcccggacagccgcagaacttttactgtatttccatggtgccgtggcttgattttaccggatattctgcgtatacggagagcggaacaccgatgctgttcccgattattacctgcggaaaatttacggagcgggatggacggctgacgatgccgttctgtgtgaatatagctcatgcagcggcagacggatatcatacatccatgtttattaacgaattacagaaacagcttgatacgatcacactgaaagagctgtgatcagatcattgtccggatatgccagggaagaaacaggaggcgggaattgatggggacacagacgaaaacacttgcggagcaggttgcggacggaatcatgaatctgatccaggagacaccatacaaagcaggagacaagcttccgacggaaaaggaactctgtgagagtacgggagcaggaagaaatacggtccgtgaggccttaaagatccttgcatccagaaatgtcctagagatccgtcagggagcaggaacctttgtgtctgaaaaacaggggatcccggatgatcctcttggattttcaatggttaatgaccacgtaaagcttacaaaggatctgcttcaggtgaggatcatgctggagccgcagatagcggcacttgcggcccagtgtgcgaaggagcatgagatcagagagctggaagagatcctggaagagatggaagcggcaatgaaaaagagggaggattattcggagttggatacgaaattccacacgaagattgcccagtgtacgcataatatcgtgatggaaaatcttcttccggtgatcggaaaaggtgtggctgtttttgcaaaggaggttgcacagacagaatatgaccggacatggatctcgcaccgaaagatcttttgctatatccgtgatcacaagccctttgaggcagagatggagatgcagtatcatctcctgtataacacgagccggtatgaggaagagcagagcagactataagcgatgacagttctgcgtctgcccggctgattggagcatgaaaagtcttcgagaatttgtaggacaaattttcggagactttttttataaaaggaaagagggatcaaaaattcctgcgtgccgatcccctttgggatactgtgaaaaagcaatgaaaaaatatcagggagatcaagaaaagtccttgtaaaacgctgggatctgtggtaagattcaaatataaaataggtaggatgaattttggcctgaccattataaaaaataatagcaacgagataaaatatccaaaaaggagaaaagttatgggacgatttgatgtgcttatcattggcggcggtgttgtcggcagtgcaatcgcaagagagcttacaagatatcagctccggatcggtgtgctggaaaagaatctggatgtctgttatgagacgagcggacgaaattccggagtgatccatggtggcttcgcatatgatgtaggaacactgaaagcaaagctttgtgtggaaggcaatcaggggatggatgaactgtccaaggagctcggctttgtattcaaacgctgcggaaaggttcttgtaggaaaaacaccggaggacctggagacattaaaacggacgatcgctcagggcgaaaagaacggagcaacaaagcttcgtctgctgaataaagaagagcttcatgaattggttccgacagcagttggagagtttgccatgttctcggaaaattccggaatcgtagatccctttaactatacgatcgcactggcggagaatgcagctcagaacggagcagaatatttcttcgatcatgaagtgacaggaatcagccgtggaacaagcgagacaggagaagatctttacacggtaacgacaacgcacggaacctttgagtcccgttgggtgatcaacagtgccggacttggctgcggaaagatttccgatatgcttggtatcaaaggatatcgcgtgatcggctccaagggagattacatcattctggatcgcaggaccggagagcttcttccgatgccgatctatccggttccgagtaatacatatatgggaatccatgttaccaatacgacggatggaaatgtaattatcggaccgaatgcagagatgacagagaatttcacgtactatggagtgccgcaggagaacatggattaccttgcaaagagtgcatctgagatctggccgtatattaaaaagtcggattatatccgcaactactccggaatcctgccgaagtgggtggatgagaacggaacgatccaggatttcaagatcgagattcgtccggagcttgcgccgtatgcggtgaaccttgtaggaatcgagtctccgggacttacggcggcagttccaatcggacgtatggtggcacggatgatgcaggaatacgaagcatttaaggaaaatccggaatttaacccgaaacgcgaggggattatccggtttgatgagcaggatgacgagacaaaagcaaagctgatcgcagaagatccggattacggtgaggtgatctgccgctgtgagaaggtaacaaaggcggagatcctcaaggcgatccacaatccgctcggagttcatacgatgacaggaatcaagtaccgtacaagatccatgatgggtcgttgccagggcggttactgccagatgagaattgaaaaaatgatcgaggaagagctcggtgtgaaggatacggatatccggtatgcaagacagaattcctggatgtttactggagaagtgagaaaggaggagcagtaggatggaaacacgtgatgtggtaattgtcggcggaggtccggccggacttgcggcagccgtagagctttataaaaaagggatcaggaatgttctgatcgtagaacgtgaaaagaccatgggcggtattttacgtcagtgtattcatgacggtttcggtctgacgagatttggagagaccttgagcggaccggaatatgcacagaaatttattgacgaggtcacggaattaaagatcccgtatgtgaccgatacgactgttctttctgtatctccggataaggttgtaaccctcgcttcttcgaatggtttaaagaagattcaggcaaaagctgtgatcctcaccatgggctgcagagagaggacaagaggtgctctgggaatcccgggcgaacgtccgacgggagtattcacagcaggtgttgcacaggcttacatcaatctttataaccgcatggtcggaaaagaggtcgtgatccttggttccggagatatcggaatgatcatggcgagacgtttaaccttagagggcgctcatgtacaggctgtgtttgagatccagccgatcccgagcggacttccgagaaacatcgaacagtgcctgaatgattacggaatcccgctgtatctgagccacacgatcacagacatccacggaaatgagcgtgtgacaggcgttaccgttgcacaggtggatgagcacatgaagccgattccgggaacggagaaggaatacaactgtgatacggtgatcctctcagtcggtctgatcccggaaaacgagctttccatcgatgccggtgttacgcttgatgcaagaacaaagggtgcggtggtcgatgaatatttccagacagaaaaatccggcttctttgcagcaggcaatgtcctccatgttcatgatctggtagactttgtgtccatggaagctgaaaagctggcagacggtgttgcggaatatgtggaaaacggcagcctgccggagtgcatgatcccggtgaaagcagcttccggcatcaatcatacggtgccgatgaaggtcagcggaaagaaagatgtgacgatctccatgcgtgtcggacggaagtttgaaaattgcacgatcgaggtcagacagggagaaaaggttcttgcgaaaaagcatttaaagaaggcgtttccggcagagatgatccagatcccggttaagaaagaggcgtttgaaggagagcaggaagtggaggtgtgcatcttatgattagaaaaatgacatgtatcgtatgtccgaatggctgtgagcttgaggcggagatcgtggatggaaaatgcatctccgtgagtggaaatttatgcccgaagggagctcagtatgcggcgcaggaggtcgaggcaccgaagcgtacgatcgcaagctccgtggctgtgaaaaatggagttcttccacttgtcagcgtgcggttaaaccgtgcggtgccgaaggagaagctgtttgaggtgatggcggagatccgcaagctgtccttaaatgcaccggttcataccggtgatctgatcgtagaaaatattttaggtcttggaagcgatctgatcgcgacgaaaaatgtagagaaacagtagcatagaagatcagttggaagagtccggtggttctctctggagatgcgaaggaagtgactgctttttggcagaaattcctacgaatttcttaaaagagtgcaaccggactctttgtctgattgaaaagaatttgaatctgtgctatgatacctccatatgagtatgaaagaatcagcagaaaaaaggaggactgttacatgaaaaagacatctcttgtcatcatggcagcaggaattggaagccgttttggcggcggaatcaagcagcttgccccggttggtccgagcggtgagatcattatggactattcgatccatgacgctctggaagcgggttttgataaaattatttttatcatcagaaaagatctggagaaagattttaaggagatcatcggaaacaggatcgagaagatcgctccggtcgagtatgcgtaccaggagatggatgatctcccggaaggtttttctgttccggaaggaagaaaaaaaccgtggggaaccggtcaggcgatccttgcggcgagagacctgatcaaggaaccgttccttgtcatcaatgccgatgactactacggaaaagaaggctttaagatcgtccatgactatatggtaaatgagatggatgatacgaaggacacattcgatatgtgtatggctggttttatcctctccaacacgttaagcgaaaatggtccggtgacccgcggtgtgtgcacggtggatgccaatggatatctctccaaggtcacagagacatacgacgtctacaaagcggaagacggcatgcatgcggctgaccacgatggcaacccggttatcgtaaaagaagaccagcacgtttccatgaatatgttcggactgccggcatctttcgtaaaagaactggaaaaaggattcccggaattcctctccggcgtgaaagagggggatctgaaagcggaataccttctcccagcggtgatcgacagctgtattcataacggaaaaggtacagtccgcgtccttgagacaaaggataaatggtttggtgtgacctacaaagaggacaaaccggcagttgttgcgtcgatccagaagctggtcgatgcgggtgtttatccgaaaaaactgttttagccggtccggcgccgacatgtcagacttcatgaaatttccggctgtggatcgaaattatcataaaatgagatggtagctttcccgctcctttttgcatatgataatcctgtatagggatcagcaaaggagcgggaacgtttttatggagaagagataccggggataccccccggaagtgaaaaaagtgccctggatgctttatcggagagaggaacagagcgcaggaccggtcctgaccggaaatgagctccggtcggagatggactatctgagaggaatctatccttcagcagcgaagagaaaacaggttttggcagaggaggcgtgtgaccttttggaataccccgggagtccgatgtatgacgaatatccggaccgggaattcttataccgggaactgttaaaagtcagagaacgccacccggaggagactatgggcggaacagaagaacaggatcttctgcaggtcctgtttgtgaatgagatttaccggagaagaattttaaacagagttgaaaattgataactgttcagcaggtctgcacacttgctgcgttgactgtaataaaacacgggtttgaaggtactgaacagttacggaaattgaaaaattctgccgacaggcagtgacagatagacagagtgaggaaacagtgagatgaagaccggaaagaaagtcatgatcctgctgcttgtttttgcagcggcggcaatggtttattttgtacacccagtagggaagaaagaagagcacggagtcacggagtacacggcgatggaaaaagcaaaattcccggtgctctatgcgacgatgggagaacgggagatggcacccgtgttcggacagacggatgagcgcggcgtgaccgcagggcgtgacagcctgatcctgcttccggaggaccggaaactaaagatccggtttgcagggactacgaagatccagggagtgcgttatgaaatccgcagtctcgatacggaggatctgatcgagagaacgagaattggatcgtttgaaacgtcattaaacggggacagtgagaacgccttgagtacagagcttccgatccagaaccttctggatgcaggaaaggaatatctgctcggggtatgtgcagaactttctgatggatccgaggcctggtactatatgcggatcacggaacaggaccagggacatgcgaatgagatgctgtcgctggcggaggacttttcttcaaaaacttataagtatagtgatgcccagagtctgaccatgtatatggagacatccccgaccgcagacagcacatccctggggacggtgacactgaaagacacatttacccagctcacctggggatcgctcggtgtggagcggtccggagaggcatacacgaagctgaaggaactttccggcaatctcgcgaatgtggagatcacgtcgagagtgacggcgaaaaatggtgaaaagacagaaaactatgaagtgacagaaaacttcacgatgaaatggtcatcccagaggatctacatgatggattacgagcgcacgatgacggaacttttcaccggagacacggaactgttctccggaaagaggatccttctggggatcggaaacggtgacggagttcacgccgtaaagagcacaggtggccagtatacggcatttgtgacagaccgggaactgtgggtttacgacagcggtgagaacgtgggggcgcgggtgttcgcgttcggcggagcagcgtccgatgatatcagggacaatgtgccggagcatggcgtcgagatcctcgctgtcgatgaggacggcgggatcgattttatcgtttacgggagaatgaaccgcggaacacatgaaggaagcacggggatcgcgtactatcattatgatatgggacagaatgcgctggaagaaaaattctttattccatcgtcagaaccttatgaggagttaaaagatgatctctcggtacttgcccatcgcggaacgaatggaatcttctacttctatatggatcacgggatctatgggatcgacttaaagagtctggagtatgtggcacttgcctccggacttacaaaagagcagttcgcggtcagcgcggaccattcccgggcggcatggcaggagaataccgggatctgggattcccagacgatccagatcatggacctcgacaccggggacaagactcaggtgggcggacagagtggttctgtaacgaggatccttggttttgtcggaaacgactgcatttatggaaccggggacagcggagactatctgatgtccaacggccgtgtgatggggacttatctgaacagcatcgatatcgttgaccgggagatgaagtcggtcatgcattatgagaagccgggttcctggatccgtgaggtgtttgtggatgacagcaggatccatatgaagactgtgaacagccgggacggatttttcggagcatattctgaggacacgcttgtctgcaatgcggagatcctttcgggaaagacggatgatatcggctggtatgcatcagaccagaaagggcagatcatgtttgtacagcttgaccgtgatgtcgatgcgtcaaagaaaaagatccgccagacatctccgaagcttgcggagagcagttcgacagtcaaaccgatcgcagcggcagcgtgtaagactacggagttttatgcgtatggacgaggacgattcctcggacgttttgtggactttgccgatgcggcgcaggcagcatacgatcatatgggattcgtgaccgcgggacgtgaccggaccatatgggtccgcggaaaccgtgcgagcgccttctatatcagggatctcaccgcgggttccgctctgctggagcgctatcgggattcctttgagaagaaccagacaatggaagacggaactttccttctggatgcgtcgggcagcagtatcgttcaggtcctgtactttgtgggacagaatatcccggtactggcgtataccggagagggagcctgcatgtacctgaccggctatgaccagacgcatgtccgcgtgtaccatccggaaagcgggacaacggaagtcctgtccatggagacggcgaaccagatgttcggcgcagcggggtatgattttatctgctgtgtaccggtatagggggagtatcttaagaaaaactttacatttttcccagatatgttataatcataacgaaaacgagctgggacggatgcaggatagctatgtccttttttagatatatagatagaggtgcgtaatggaacagtacattatgaagggcggaaacccgcttgtaggtgaagtgactataagcggcgcgaagaatgcggctctgggaatcttagcggcggcgatcatgacggatgacgatgttgtgatcgataatctcccggatgtcagcgatatcaatgctctcctggatgcgatcagtcatcttggagcgaaagttgaccggatcgaccgccataccgtaaggatcaatgccgcaaatatccacgccgtgaccgtggaagatgagcatatgagaaagatccgcgcgtcatattattttatcggcgcgcttctcggaaaatataagagtgcagaagttccgcttccgggcggatgtacgatcggaagccgtccgatcgaccagcatttaaagggtttccgtgccctgggatccgatgtgaagatcgtccgcggagcagttgtagcccacgcgatcgatcttgtcgcaagccatatctaccttgatgtggtttctgtcggagcaaccatcaatatcatgatggcggcaacgatggccgagggcgagacgatccttgagaacgttgcaaaagagccgcatgtcgttgatgttgcgaacttcttaaacagcatgggcgcgaatatcaaaggcgcaggtacggatgtgatcaggatcaaaggcgtgagacgtcttcacggaacaaattattcgatcatcccggatcagattgaggccggaaccttcatgtgtgcggcggcgattacccgcggtgatatcaccgtaaagaatgtgatcccgaaacatctggaagcgatctccgcgaaacttacggagatgggatgtgaagtagtagagtttgatgaggagatccgtgtggtcggaaaaccgaaacagcgccacatgaactttaagactctgccgtacccgggattcccgaccgatatgcagccgcagatgacggtggcacttgctctggcagatggaacgagtgttgtgacggagagtatctttgagaatcgctttaaatatgtggatgagctttcccgcatgggtgcgaatatcaaggtggaaggcagtgtcgcaatcgttgacggtgtcggaagcttcacaggagctcaggttgttgcgccggatcttcgtgcaggcgcggctcttgtgcttgcaggccttgccgcagatggatacacgactgtggatgagatcggctatgttgagcgcggctatgagaattttgaagagaagctccgctctctcggtgctgtgatcgagcgcgtggattccgagaaggaagcgcagaaattcagactgagagttggctgatgagaattttaaaagcccgaaggttctgatataccgggaaattttcccgatttctcaggattttcgggctttttttgcgattgccgcttgacattcccggatgaatcgtataagatacagtccgtgggtcatttttcgggtggttcacagtacaataaacttaaaaaagttcgcaatatcccttattcagagtgatggaggtacataggaccggtgaagtcacggcaacccctgttaatcgcagacgcgagagggcaggaaggtgccaacctgagcgagtaaatcgagcaataagaggatttgaccacgtaaaccagtcaagtccgcttagcatgagcggacttttgttttgccgtaactgcggggagcaggtgcggccttcctacaacttgaaaggagctacaatggaaaagagattatttacttccgagtccgtaacagaaggacatccggacaaaatgtgcgacgcgatctccgatgcgatcctcgacgctttaatggagcaggatccgatgagccgtgttgcgtgtgagacatgcacaacaacaggtcttgtcatggtaatgggtgagatcacaacaaaggcatacgtggatatccagaagatcgtccgtgagacagtccgcgagatcggctatgaccgtgcaaaatatggttttgactgcgatacctgcggtgttctcactgcgatcgatgagcagtctaccgatatcgcgatgggagttgacaaggcactcgaggccaaagaaaacaacatgaccgatgacgagttagacgcgatcggcgctggtgaccagggtatgatgttcggcttcgctacaaacgagacaccggagtacatgccgtacccgatcgctcttgcacataagcttgcaagacgtctcacagaggtaagaaagaacggaactcttccgtacttaagaccggatggaaagacccaggttactgttgagtacgatgagaacggaaagccgttccgcctcgatgcagtcgttctctccacacagcatgatgagaatgtgactcaggagcagatccatgaggatatcaaaaaatatgtattcgatgagatccttccgcaggagatggtagatgcagataccaaattcttcatcaacccgaccggacgtttcgtgatcggcggaccgcacggagacagtggactgactggaagaaagatcatcgttgacacctacggcggatatgcacgtcacggcggcggagctttctccggaaaggactgcacaaaggtagaccgttccgcagcatacgcagcccgttatgttgcaaagaacattgtagcagcaggacttgcagatcagtgtgagatccagctttcctatgcgatcggtgttgctcatccgacttccatcatggtcgagacagagggaaccggaaaggtatccgacgagaagttagttgagatcatccgtgacaactttgaccttcgcccggcaggaatcatcaagatgcttgatctccgccgtccgatctacaagcagaccgcagcatacggtcacttcggaagaaccgatgtagaccttccgtgggagaaactcgacaaggttgaggatttaaagaaatatctgtaggataaaagaacagaaagatcatggacatatatcatgaaaatgatcggaagcagcggcacagtccccggggtgatcgggaaactgtgccgttgtttctatttacgcgaacaatgagccaaagtccgcgcttgcgtaagactctggcgactgtggcgataacaacgtgaagattccacattttagaatacttttataaacaccacccctgagttgtgctatacttatcatatgtcggttttctgtatacagacaggagtcctgacaacggataaatgaccggaagaccggatgaaaaataagaagggagcgcgcggacgctcatgaaaatacgaacaaaattactggtaaccttttgtacgatcacggtggtgccgatcatcctgatctatatcgcgatcatgggactcagcacatatcagaaccgggtattcagcgagacatatggagtcggccaggtggatctctcggcaggcgcgtcgatccgcgtgttcagccatctgacagagagtatccagaaagagatcgaggaggagatcaaaaatgatccgtctgacttcgaggacctgacttatctggcaacgctgaatgaccagatgaaattaaagcattcctttttgatggtgacaaagaatggaaaactcttctattcgggaaatgaggaagcggcatcggcgctcgagagccagatctcggattatgcggagatcaatgatgtggattcgtggggaaattatctggataagaatacggaacacctgatcaaacagcgtgaatttgaactttcggatggatgccggatcgggatctacctcgtgacaaacgtggtagatgtgatcccggaggtgaaatccctgatcacggagatgttcctcagcagtgcgatgatcctttttatcaccggaggtatgctgacggcgtgggtataccggtcgatcttatggccgatcggaaagctccaggaggcgacaaaacagatccgtgacggcaatctggactttactcttgacgttgaggatgatgatgagatcgggcagctctgccagaactttgaggagatgaggatccggctgaaggaatccacggaggagaagatccagtacgacaaagagagcaaggaactgatcagcaacatctcccacgacttaaagaccccgatcacagcgatcaagggatacgcggaaggactgatggaaggtgtcgcgtcctcgccggagaaacgggacaaatatatccggacgatctacaataaggcgaatgatatggaccgtctgatcaatgagctgacattctactcaaagatcgacacaaataagatcccgtacacattttcaaagatcaatgtggcaaactatttccgtgactgtgtggaggaagtcggcctggagcttgaagcgagaggaatcgagctcggctactttaactttgtggatgaggacgtgatggtgatcgccgacgcggagcagatgaagcgcgtgatcaacaacatcatcggaaattcattgaaatatatggacaaaaagcatgggatcatcaatatcaggatccttgatgtcggtgattttgtccagatcgagatcgaggataatggaaaggggatcggccagaaggagcttccgtacatctttgacaggttctaccggactgattcttcgagaaattccagcaagggcggaagcggcatcggactttccatcgtaaagaagatcatcgaggatcacggcggaaagatctgggcgacgagcaaggaagggatcggaacagagatccattttgtgctgagaaagacgacagcagattaataggaggaaacaacaatatgagcaaaattctgatcgtggaagatgaggaaagtattgcagagctcgagaaagactatctggaattatcgggctttgaagttgaaatagaaaatgatggggaagcaggcttaaagagagccatgtcggaagaatttgatctttttatcctggatctgatgcttccgggcgttgatggatttgaaatctgcaaaaagatcagggagacaaaaaacaccccgatcatcatgatctccgcgaaaaaagacgatatcgacaagatccgcggtctcggcctcggcgcggatgattatatcaccaagccgttcagcccgagtgagatggtagcgagagttaaagcccatctttcccgttacgagagactgatcggaagcggaaccccggcaaacgacattatcgagattcgtggcttaaagatcgataagaccgcccgccgcgtctatgtaaacggcgaggagaagaactttacgacaaaggaattcgaccttctggcgttcctcgcccagaacccgaaccatgtatttacaaaggaagagctcttctcaaagatctgggatatggaatccatcggcgatattgcgaccgtcacagtccacattaagaagatccgtgaaaagatcgagatgaatacggcaaaaccgcagtatatcgagacgatctggggagtcggctaccggtttaaagtctgatttgcaggagacgaagatgggcagaagaaaacttttagaaaagatgccgtgaaatcccgctcagacgcatgggaaacatgatatgtgagaagatacctctgaagcagactggttgaaaaaacagatctgcttcagaggtattttttatttaacagcagtggtcaccgcgatgttttgcgcttgacatttcgaatgtatccgcttaaacttgaattatgcgaattttctgtaaaaagcgaagtaaatacagaaaagatagaacagttcttgatggataagcgcatccggatcgcaatatggctctgtgtgccatgatgcaggcaatgttgccgactggaaatgcctgcccggcagaaactgaataaagacaaaggaagacaccgcctatgaagtacaaaatgagatttttcgcctttttcgccgccatggtcgtattcaacctggcagcgaactttgcccatccggtaacgccgacggtgatccaggaactccacctccacgactatatgtttggcgtggcgctggcagtcatgctgatcacgaacttcctgctgtcgccgttctggggaaagatcaataactatatttcctcgagactttccttattgatctgctgtcttggatacggcgtggcacagatctggttcgcctacgcgactacggaactcatgatcatcctcgcgagaatgttcgcgggactctttaccggcgggatctttgtaagcttcctgacttacatcgtaaacaagtcaaacccggaagaccagggaaaatatctgacttacagcgcgacgatcaagagtgtggccagtgcgttcggctatatgatcggcggcttcttaggcgagttttccgttcggctggcattcctggtgcaggcgggaaccctgatcgcggtcgcagttgcgttctttatgatctgcgagccggacagtaccgcaaatttaaaggatattccggcaaaacagctcatgaaagaggcaaatccgttccaggcgttcatcgacagcaaaaactttatgtgcatggcgtttgtgttcctgttcgcgatcaatatctttatcaacttcggaaataccggttttgaccaggctttcaactattacttaaaggcacagcttggtctgacttcctcctacaacggaattatcaaggcaggcgttggtttcgtatcctttatcgcaaatatgagtctctgcatctggatcatcaagaagacgaatgtcaaaaagtccatggtcgtcctcaccgccttctgtgcactggcggcgatcggaacgttgatctccgtgaatatcggaattttcatcttcttcagtattctcgtttatgcgggctattccgtcagcgtcccggtcctccagaatatggtggcaaatcaggcggatccgaaacagaaaaaccttgtcatgggattcttcaacgcgacccagtccctgggaagtatcgcgggttccctgacagccggatttatctattctgtaaatgcaaagcttccgtttgcatgcaccttcgtgatctactcggttggcgttgcggcggcgttcggatatctgcgctaccataaaaaagaggtgtagaggatgttcatttaccgtgtatagcggaaagaatcatacacggttataaaaagaatcattttatgacatgatacaggcagttgttcagattatttcacgtatgaccgaaacactgcaaatcaggcagtttccccggaaaacatggcgtcaaaaacatgttttccgggcttttctgtttccttgcaggcttttgcttgacttttttcttcctatgttataagatattttacatttgcaccccgcacggctggaaatcaaaaggcagccgtcagcattgtatatagaattctgtgaccggtatgaaaatccgggaatccggatgaatcgttatagaaaagtaaggaagaaatatcgtgacttttcacgggcaggaattttctgaacggaaaattccatatgatataggaatatatccgaggcatggaatcgttatgcagacaaaacagaaaggatattgaatggaaacaatcagatttgatgaacttaatttagacccgcggatcctccgcgcagttaccgatatgggatttgaggcagcgtccccgatccaggcccaggcgatcccggttgagatggaaggccacgatatgatcggtcaggcccagacaggaaccggtaagacagcagcgttcggaatcccgcttcttatgaagatggatccggaaaacagaaagacacaggcaatgatcctctgcccgacaagagaacttgcgatccaggtggcggaagaacttcgccgtcttgcgaaatatatgtccgggatcaagatccttccggtatacggcggacaggaaatcgtaaagcagatccgttccttaaagggcggagtccagatcatcgtcggaaccccgggacgtgtgatggaccacatgagaagaaagacgatccgcaccgatgcgatccacacggtcgttctcgatgaggcggatgagatgttaaacatgggattccttgaggacatggagacgatcctcggtgaacttccggaggagcgccagaccgtgatgttctccgcgacgatgccgcacgcgatcgcccagattgcccagaagttccagaaagacccgaagatggtccaggtcgtaaagaaggaactgacggttccgaaggtaacccagtattattatgaagtaaaaccgagaaacaaagtggaagtaatgtgccgtctgttagacctctattccccgaagctctctgttgcattctgcaacacgaaaaagcaggtagatgagctggtacaggcgcttcagggacgcggatatttcgcggaaggtcttcacggagacttaaagcaggagcagcgtgaccgcgttatgagcagcttccggaacggagcgaccgagatccttgttgcaacggatgtcgctgcacgaggaatcgatgtggacgacgtggaagcggtatttaactacgatattccgcaggacgacgagtattatgtacacaggatcggacgtaccggacgtgccggaagagagggacgcgcattcagccttgcagtcggaagcgaagtctacaaactccgtgacattcagagattctgtaagacaaagatcgttccgcagccgatcccgtccttagacgacgtcacagcgatcaaggcggagaaaatcttagacgatgtgcagcagcatatcggtgaggacagcgacctcgagcgcatgacagatattatcgaaaagcgcctgctcgcggaggattatacttccttagagctcgcagcagcgttcttaaagatggcgatgggagatgactacgaggatatcgtggatgagggaagaccgctccgcgaccttgatgatctcgaccgccgcggcggcagaaatgaccgcggaagaaacggacgcagacgcggcagaggcgatgacgaggaatatgtggacagaaagaatgccagaggcggcatgacgagactgttcatcaacctcggaaagaatcagaatgtgaagccaggagacattttaggcgcgatcgccggagaatccggaatcccgggccgtctcgtcggcagcatcgatatgtacgacaaatacaccttcgtcgaagtaccgaaggaccaggccgatatcgtcatggatgcgatgaaccatgtgaagatcaaaggtaagagcgttcatgtggagaaggcgaacagaagataaaacaaaacccccgaagtctggtacacttcgggggtttttatcgtcaattacttattctcaatatccatgatcatatccacacgtctctggtggcggccgccctcaaagcttgcgttcagccactcgtcaacgatcatctttgcgagctcacttccgacaacgcgtgcaccaaacgcgagaatgttggagttgttatgcattctggaaagttttgcggtgtacggctcgctgcagacacatgcgcggatgccttttaccttgttggcagctaaagagatgccgacgccggttccgcagatggcaattccgagatctgcttcgccgtcagcgactgcgcggccaaccttctcaccgtataccgggtaatcacagctctctgtggagtctgttccgaggtttaatacttcgtagcctttgctctcgaggtgttccttgatgatgtttttcagctctacagctgagtggtcgttagcgattgcgattttcatttcatttttctcctgttattttttattattcgcggctgttccgtattttgcagccgctgttattccatgaacagagggccagactctctgtcatgtgggaatctgatacaatgttaatccgcattctccacctggaagaacatctggatcaggtcaagtctggaagtcatggacattaagagcatgtccatcgcggtgatcgcagccatagattcgactacaacaacagctctcggaacaaccaccggatcgtgacggccgtggatcacgagatcgatattctcgccgtcctttgtcactgtctcctgggattttgcgatcgatggagtcggcttgaatgcggcgcggaagatcacatcacttccgtcgctgatgccgccgagaacgccgccggcatggttcgtctccttcaggatcttatctccatccatacggaattcatcgttattttccgatccgcacgctttcgtcgctgcaaatccgtctccgatctcaaaacctttgacagcaccgatcgagaggatcgcttttgcgaggttggcatccagtttttcgaataccggctcaccgagaccgaccggaagaccggagatcacacactcgacaactccgccgaccgagtcgcattctgcgattttctgatccaggtagctttcggcttcttttgcagcttcagcgtccgggaaacagaaccgattgttctggatttccgaaagatccatgcgctccggggatacctctaccggtccgatcgatttcgcataggcagtcacagagatatttaactgttttaaaaacttctcagcgatcgcacccgccgcaacacggccgatcgtctcacgggcggaggaacgtccgccgccgcggtaatcgcggaatccgtatttttcctcaaatgtgtagtcggcatgtcccgggcggaaacaggaagcgatattggagtagtctttggaacgctgatctgtgttccgcacgatcatggagatcggggttccggttgtctttccctcgaaaacgccggagaggatctcgacctcatcgccctcttttcgctgggtcgtaaagcggctctgtcccggttttctgcggtctaaaagtttctggatatcggattcccctaaaggaagtcccgccggacagccgtcaacgacaacgccgatggcctttccgtgggattctccccaggttgttactttaaatattgtgccgatggtagaacctgctgccatgttattttaatctccaatctttacaatttcacagcagttcggctcattgaccttgatgctgcggtcgctcatgacgagaagacctttgtcatagtcgattttaaagaaggaaatacttccctcgtggttgatagaagcgagatgttctccgtccgggaagatcgcgatatccttcggataatccccgctgatcggaagacagaagcgcagggtcagcattccggtctcatcatcgcggtcgtacatggacaccgtattgtcgccggcattgctgcagaatacatgtttttcatctggggagaaatgcatcgcacaggcagcggtcagctggttcggtttgcttcctgtggatgagatcgtctggatcttctcgacgatcgggacacgttcgccttctttataggaataaacctcgatcacatttttcatctcatacaggacatagaagaagcggccgtcggagctgaacatgaagtatttcggggcggattcgagctcacagcggatcgtgtccacgagagtgatctttccgtctttatggtcaaaacggtaaactttgatctggtcgatcccgaggtctgcgaccattaagaagcgctcgtccggagtcaggcggctgcagctcacatgcggacggaagcttcgctcagcgacggagccaagtcccttgtggaagacaccgtcggcgatatctccgaccgatccgtcctcgttcagatgaaggaccgtgatctttccatcgtggaaaccggagataaagatatagtcatctgctttgctcgtggaaaggtggcatccgcgcatgcccttgatcttcgcactgtttaaacgtgcgagacttccatttggaagaacgcggaatgcgacaacgccctcatcggcgatagagtacagaatctttccgttctgggatgatttcagataggaagagttgtccacttccacttcgcagcggtagatgaattttcctgcctccacatccacatcatatacggtgatcccttttgcctttcccgtataggaataagagccaacataggccatgtattttccagtcataggtaaattcccctttgctttcgatgtccggagacgcaaaaactgccgattttgccaacctcctccggagattcatagatgtactcattttatcataatctgaccggtttgttaactgaaatctgaaaattgtatggatgcgatcgtgtacaaaaaacaggaaaaagaaacaagagaaatctattgacagaacgggaaaaccatgcgtaaatatactatgataggcattttgccgcttttcgtatatctgaagaaaaccatgtataaaaatacattcaagccgaacacaaaaacagcggaatctatcgtataaaatctgtttacatcaggaggaaaaaggaatggagcatccgctcattgatttgtcccacatttttaagagttatgacggggatctgatcctcgacgatctgagcctttccgtaaaggaaaactccttcgtgacgctgctcggtccgagcggctgcggaaagacaacgaccttaagaatcatcggtgggtttgagaaaccggataaaggtcaggtgatctttgacggggaagacatcacaaatatgccgccgaacaaacgccagttaaatacagtgtttcagaagtacgccctgttcatgcacatgagtattgcggagaatatcgcgttcggtctgaagatcaaaggcaaatcgaagagctatattgatgataagatcaaatatgcattgaaacttgtaaaccttgacggatttgagaaccggagcgtggattctttaagcggcggccagcagcagcggattgccatcgctcgcgcgatcgtaaacgagccgaaacttctgcttctcgacgagccgctcggcgctctcgacctgaagctccgccaggacatgcaatatgagctgatccgcctgaaaaatgagctgggaatcacctttatctatgtcacccacgaccaggaagaggcgctcacgatgtccgacacgatcgttgtcatgaaccagggctatatccagcagatgggaacgccggagcagatctacaatgagccggaaaatgcctttgttgcggactttatcggcgagagcaatatcgtgggtggaacgatgatccacgacgagcttgtggagatcttcggcgcgaaattcgcctgtgtggataaaggattcggaaacaacaagccggtcgacgtggtgatccggccggaggatatcgatcttgtgaagccggagaacggcactctccagggcgttgttacacacctgatctttaaaggcgtacactacgagatggaagttacgaccccggacggctacgagtggctggtccacagcacggacatgttcccggtcggacagaaagtcggcattcatgtggatccgttcgatatccagatcatgaacaagccggagtccgaggacgaggaggccgttggagtcaatgaatagaaaagcatccagatttctggcttatccttatatcatatggatggcgggatttaccgtgatcccgctgctcatggtattttactacggtctgacggaccgcagcggcgcgtttacgctggcaaatatcctggcgatcggctcctccgagcacttaaaggcgctgtggctttccctgcttctcgcgggtgtcagcactgtgatctgtctggtcctcgcatatccgctggcgctgatcttacgaaagcgccatatcggaaaaggaagctttgtggtgtttatctttatccttccgatgtggatgaacttccttttaagaaccatggcgtggcagactttgcttgagaagaacggtgtgatcaataccttcctcacgctgctgcatctgccgaatgttgcgatcatcaatactccggcggcgatcattctcggcatggtctacaacttcctgccgttcatggtcctgccgatctacaacacactcgtgaagatcgatgacaacgtgatcaatgctgcgcgggatctcggagcggataattaccagacactcacaaagatcctgatcccgttgagcgttccgggcattgtcagcgggctcacgatggtgtttgtcccggcgctcacgacgttcgttatttcaaacctcctgggcggcagcaagatcctgctcatcggaaacgtcatcgagcaggaatttacaaagggaagcaactggaacctcggtgccggactttccatggtgctcatgatcttcatccttctcagcatgaccatgatcgcaaagtacgataagaatggggagggcactgcattctgatgaaaaccgtaagagaaagactgaagaaattttttgaggatttttatctggtgctggtactgatcttcttatatgcaccgatcctcgtcatgatggtcctgtccttcaacagctcgaaatcgagatcccagtggggcgggttcacgttacaatggtataaacagatgtttgagagcgcgtcgatcatggacgccctctataatacgctgctgatcgccttcctgtcggcgctgatcgcgacgatcctcggaacggccgcggcgatcgggatctcctcgatgaagaagctcccgagaacgatctgcatgggactcaacaacatcccgatgttaaactccgatatcgtgaccggtatctccctgatgctgatgttcatcgcgttcggtatctccctgggattcaagacgatcctttttgcgcacatcacgttcaatgtgccgtatgtgatgctgagcgttatgccgaaattaaaacagacgagccggaacacctacgaggcggccatggacctcggagcaggccctgtaaaggcatttttcaaggttgtcttcccggatatccttccgggcgtgttatcgggcttcttgatggcgtttacgatgtctctggatgattttatcatcacccacttcacaaaaggcgccgggatcaatactctgtccacgctgatctacagtgaggtgcgccgcggcatcaagccgtccatgtacgcgctttccacagtgatctttgtgactgtgctcgcgctgctgctcattacaaactttgctccggcaaaaccgcaggcgaaggcgggagcgggcagcttcggaccgaacgcagcaccggaccgcggaaagaaaccggcatggaccggaaaggcagcgatcgtgcttgcctccttcctgatcgtcggaagcgtggcatataccagctacctgcacttttcttcctcccactcggatgagctctatgtatacaactggggcgaatacatcgatgagagcgtgatagacgaatttgaggcggagaccgggatccatgtgacctatgaccttttcgagacgaacgaggagatgtacccggtcatcgaggccggcggcgtgaattacgatgtcgtatgtccatccgactatatgatccagaagatggcggagaacggacttcttgcggagatcaattttgacaatgttccgaacatcaaaaacatcgaccaggtttaccttgaaaagtcgaaggcatttgatccggataaccgctattctgttccgtatacatggggaaccgtcgggatcatctacaatgtccagaaactggaagaactcggagttccggcaccgacgaaatggtcggatctctgggatgagcgcttaaagggcgagatcctgatgcaggacagcgtccgcgacgcctttatggtggcgctcaaggaactcggctattcgatgaatacgaccgatgagacggagctccaggaggcgaagaaactgcttctcgcacagaaaccgctcgtacaggcctatgtcgtggatcaggtccgcgacaagatgttgaacggtgaggcggcggtcggagtcatctattccggtgagctgctctatctgcaggaggaggcggagacgctgaatcttgattatgatctggagtatgtacttccgaaagagggaacaaacatttggatcgattcctgggtgatcccgtacaatgcaaagaacaaagagaatgcggagaagtggatcaacttcctctgccgtccggatatcgcggtgaagaacttcgagtacatcacctacgcgacgccgaacaaggccgcgttcgaccttctggatccggaatatcaggagaacaaagctgtattcccggataccgataagctggaaaactctgaggtatacagttatctcggaactgaggcggatgacctctacagtgcactgtggaaggaagtcaagtcggaataaagaattgaaaataatatgaaaaagctccctgtactggtggatatgaacggtacggggagtttttttcagaaactttctattaaataaaaagtgattgcgcgtcaaagatgcgcactcgtgcgaagatgattcattaaaaaaatccccacacaccgctatgaaacattcaccggtgcatggggatttttaagaatttatggaattgcgatcccttataactctgtctttacaaaaatatcatagatcgcgcggatcgccggctcgaaatcgtcatctgtgacaccgatgatgatgtttagttcactggatccctggtcgatcatcttaacgttgatctttgcgtgtgcgagtgctgcgaagatccttgcggcagtcccgcgcattgctttcatgccgcgtcctacgactgcgatcactgcgagatcggactcgagagtcacgatatccgggtgaactgcacgctggattcctgcaagaacggactgctctttctcctggaactcatcctgatggacgagaacggacatcgtatcgatcccggacggcatatgttcgaaggagatgccgttcttctcaaagacctcaaggacttttcttccaaaaccgacttcggagttcatcatcgccttgtcgatgttcattgcgcagaagcctttctttcctgcaacgcctgtgatcgtgtagcgcgggcgtttgctggtgttctcaacgatcatggtacccggatcttccggacggtttgtgttgcggatgttgatcgggattccctcttttcttaccgggaagatcgcatcctcgtggagaacgcttgcgcccatgtaggagagctcacggagctctgtgtaagtgatcgtttcgatcggagccggattgtcgacgatcctcgggtcagcgacaaggaaaccggagacatcggtccagttctcatagagatcagcctggatcgcacgggcaacgatggaacctgtgacatcggagccgccgcgggagaaggtgtggattgttccatccggcttagcaccgtagaatcccgggatgacagcctgctttaaggaagcgaggtgttctctcatctcctcgtttgtctcctcggagaggaagtttccgtctgcatcgaaacagatcacgtcagccgcgtccacgaaggtgaatccgaggtagtttgccatgatgagaccgtttaaatattctcctctggaagccgcatagtcacgtccgactttatttaagaaattttcttcgatctttgaaaattcaaagtcaaggtttaagttgagctcaagaccgtcgatgatgtctgtgtagcgctttttgatctggtcgagaatgcgcttgtagctctgtcctgtgctggctgcatcgtagcactggtataacatgtcagttacttttgtgtccttgctgtctctctttcccggagcggacggaacgacatagcagcgtgtcttatcggcgtcgatgatcgcctttacttttttaaactgacgggcactcgcgagagagctgccgccgaactttacaacctttttcataatttgtctcctgtgtaagtgaaatatttgttacttttcaagggtaggaattttctgaactgaaaaatccgtatgataccgttgtggtcgcggattttgccgatttattagtggattaccttcggtgtcgggaagtattcgaagaatacctttgcaaccatcttgtctctggaaatgtagtgattctgccagtagcgggcatccagagaataatttcggttgtcgcccatcataaagtagcagttttccggaacttcaaaatggtaagtttcatgctggttcatcggttctgccagatacggctcgtcgagcggagtgtcggaaccgttcagatagaccttatcgtcgatgatatcgatgacatcacccggcataccgatcacacgctttacatagtagatcgtatgaccatgttttccgacttcggaaccgcaggccgggcaggtatcctgcttgtcgccttcgatgatggcgttgcattccgggcattgccagccaaagacgaagatcgcgacatctccgcgttccggatctgcgaatttgtagtgcagcctggagccgatgacgcggcttcctgccatgatggtgttttccatggaaccggtcgggatctcactgtttgcgatgacaaaagtcgtgagaacgaaggcaatgacggcggcggatacaagaacctggacccagctgatcagctccgctacccagcctgttttttctttcttttcttttccgttattttccatataaagatgataacctcgtttgactaatatactcaaaaacattcctgtttttggcagatcccagattcaaaaatcttcctgcaggcaagccggcatcggatttccggacttttgaccctggcatcacaacatacaataaagagtttatgataaattgtcaagtttcgcaagagaatttcgaaaaaggtaaggaattttttaatgggaaaatatgcgggagcgccatgcggatggaaaaacggatatttgccgatactgccacttgtatcagagagatgatgatgttaaaatattgttaagaaaaaatggcttcggacatcaggaaacagatatccgcagccgcagaaaattccagaaatggacaggtctttgtggaccatgccggaaaacggcattggaacacgacagggagagtgcttatggaaaaaatcttatatgatctgatggactgggccgggatcgaggaactcgtatattctgaggcgagcgatccgggacggcttttaggggaacatgtaataaaggaaggacttctgatccaggcgttccttccgaatgcggcgaaagtctccgtaaagatcggggaagaaagctttccgatggagatggcggatgagaacggattcttcgcagtccttcttgaggaccgtctggagttagtgccgtaccattttctcgtgacttacgaggacggggacagtgaggagatcgtggatccctacagttaccagttctacaccgcgtttaccgaggaggaagtaaagaaattcggcgccgggatctactatgattcctatcaaaagtttggcgcgcacccgaccgtggaagccgggatctccggagtgcactttgcagtctgggcgccggatgcgatgcgtgtcagtgttgtgggtgacttcaacttctgggacggaagacgccaccagatgaaaaaacgcggaccgtctgggatctatgagatctttattccgggactgaagccgggtacgatctataaatatgagatcaagacaaaagcgggagatccgatgttaaaggcggatccgtatgcgaatttctcagagctccgaccgaatacggcgtccgtgatctgggatatgactgattatcagtggaacgatggcgagtggatcgaaaagagaaaagcggcaaaagaccggctgaaggactcgccgatgtcgatctatgaggtccatctcggctcctggatgcagaaaccggtagctcaggatgaaaatggggatgacatcaacggcagccagttttataattacagggagatcgcggaaaaacttgctgcttacgtcaaggagatgggctacacccatgtggagcttctcccggtgatggagcacccgctcgatgagtcctggggttaccaggtgaccggttactatgcgccgacgagtcgtttcgggactccggacgattttaaggcgtttatggactatatgcacaaagaggggatcggcgtcatcctcgactgggttccggcccatttcccgcgtgatgcgcatggtctcgcggcctttgacgggacctgtctctacgagcacaaggacccgcgccagggatcacatccgcactggggaacgctgatctacaattacggccgtccgcaggtatcgaacttcctgatctccaacgctttatactgggcgaaggagtttcacgccgacgggatccggatggacgctgtggcatccatgctgtatcttgattatggaaagaacgcgggcgagtggatcgcgaacatgtacggcggaaatgagaacctggaggcggtggaattcctgaaacacctgaattccatctttgcacgggacacagagggcgcagtcctgatcgcggaggaatccacggcatggccgaaggtttccggcgatgagaatgacggaggactcggctttgacttcaagtggaatatgggctggatgaatgatttcctcgattacatgcagtgcgacccgtatttccgccatgaccattatggagagctgactttcagcatgctgtacgcatacagtgagaagtttgttctcgtattctcacacgatgaggtggtccacggaaaaggttccatggccggaaaaatgccgggggacacccaggagaaaaagttcgcaaacctccgtaccgcctatgggttcatgatggggcatcctggtaagaaactgctctttatgggccaggatttcggtcagatggacgagtggaacgagaaggagagtctggaatggggactcttgaagtacgatgtccacagccagatgaaggattatgtgaaggcgttaaaccacctgtaccgcacacagccggctctctataaaatggactatgagccggaaggtttcgagtggatcaactgcacttacaatgatgagaatatcgtgatcttcgagagaaagacggacaaatcggaggagacactgctctttgtctgtaactttgtcccggtggagcatgagaaattccgcctcggagttccgtttgccggaaagtacaaggagatcctgaacagcgacgcgaagcagttcggcggcagtggcatggtaaatccgagagtcaagatgtcgaagaaagaggagtgggacgcgagagaaaactcgatcgtgatcaacctggctccgatgtccgtggcggtattctcctgtaccccgtatgaggaagaacctgtgacgggaaagaagaaaccggcggaaaagaaaaaacgtccggcgaagcagccgtccgtaaagataccggcgagtccgttggatgtgatctctgagaaagtcgggcagatcataaagacggcgcgggagagccagacgggaaaaagaaacaaaggatagacagaaaaatacaggacatgaaaatgtccgaaaaacagcagggaaaaagacatgaaagaatacacactggattttcttactacgacggccatcaaatacgggaccaggatcttctggaccgcggtgatcgtatttgtcggtctccgcgtgattcggatggtccggaccgcagcagggcagatcatggaccgcgccggcgtggagatcacgttaaagaagtttctggatatgctgctgcacgccgtccttttcggagtcatggtgttcatggcagcggaccagctggggatcaagacaacgtccttcgttgcggttatcggtaccgtaacgctggcattcagccttgcgatgcagaatacactctcaaatttcgcaggcggaacgctgatcctgctcttaaaaccgtttaaggtcggggattatatcagcacatcggcaggtgagggaacggtcgagacgatcggtcttgtatacacgacacttttgacgatcgacaaccgcgtgatcacgatcccgaacagttcggtatcgagcgcaccgctcacaaacctcacgaaaatgggaaaacgccgcctgatcattaacgtcgggatcggatattcctcggatctcttaaaagcgaaaaacgttctgaaacagatctttgaggagaatccatatatcatgaaagaccaggatatccaggtgatcgtggacagtctcggagacagcagcgtgaacttgagcgcgagaggctgggtgctctgtgaggactattggaaaacaaaatgggcgatcacggaggagatcaaactcacatttgaccgggaagggatcgagatcccgtatcagtatatgaacgtgacactgacgaaggagtcacagtagagaagatacccatcagtatgatgtgggaataatgttactggctcgtgtacagaccgtataaaaaagttctgtcagctgaatacaaggctgatggaacttttttgtttagcaggaaattccatgatacaaaagaggttccacaatatgaaatatagaaaaacaaatcgcatactgtgatacagtacctgatcaccacggtatttttcgcgaaacaagccaaaaaatgcttgcattttcccgggaatctgatagaatcaatgttaaattgtttctgcgttgcggacaaatgtttgcggaaaagagacgtgtttttgtctgaacggacatggtacaggtacatgatttcagcaaaagtgaaacatgcagaggcgaaaaagggtagttgttgaatttcgatgcggctgccgaaaaagaaaaggagggattgaatatgaaagagcatatggctgactggcgtatccatgcgcttgctttcgtactcaccgtaatcgccgaatttatcggcaccaaaaaattcagtttcgggcctttgtcgttctcactgtttccgatgctgtacgttctgatcctcggagcgatccttggaatcgtaaaaatgatcccgcagaagatgatggcggaggcgtctccgtatatcgggatcagtgttatgatgctgactgcgaagattgcgtcaacaatcggaccgaacctcggggcggttgtcaaagccggaccggcgctgatccttcaggaattcggaaatctggggaccgcggttttagcgcttccgatcgctgtatttgtattccatatgggacgcgcggcaatcggaacgtccttctctatttcaagagagagctcccttgcggtcgttgctgataaatatggtcttgattcggatgagggaatcggtgttatgggcggatatatcacaggcactgtattcggaaccatgttcaatggtatcttcgtctccctgctctgttccttaaatatcttccacccgtatgcgctcggaatggcgtgcggaacaggttccgcatccatgctttctgccagccttgcggcagtcgttgaggcatatccggatatggaagcggagatcaccgcttatgcggcaacttctaatatgctgagcagcgtggacggtctttacatgagccttttcatcgcacttccgatgtgtgaatttatgtataaactgttcacaaagaataataagcattataaagacggacttccgatcggtaaaaaggtgaaagtcaaagccgccggggaagaataggagggatccatatggacgcagcagtatggtttaaacgaattaagtgtcttgtccttgtatgcatctttgcatccatcggcaactttatcagtacatcgaaggcaggaaatccggtaactccgatcgaggcgatcccgggtctggtacttcttcttgcatgtaccctgatcggatgcctgatctatgagcttgtcggaaaggtttcctcgaaaaatcttccggcgatcgcatacatctcgtttatcgcgatcttcatgacgatcccgggtatcagcccgatcgccgagtacgcgatcgagcaggtcggaaagatcggacttcttccgttatgtaccccgatccttgcgtatgcgggaatttccatcggcaaggatatggataccttcaaggaacagggacttgcgatcgtgatcgtagcgatctttactttcgcaggaacattcctgggctccacgatcatcgcacagatcattctgaagatgactggtgtgatctaagcaacataaaaatagcagaaggcagaatcgagctggtgtggattctgccttctttttgtttacgcgaacaacgagccaaagtctgagcctgcgtaaagggcggtgctgataaggtacatggctgtgagtgaccggtctatatgaaaacgcggcggaagctgacaggactttgaccgtggggatcaccttgtaaaagaataggaatcatgctatgatggaagaactgtgcggtgcagtgaaatatctgtgcagtacgtttataaatctgtgataacggagtgagtttccatgtaccatgatcttacaaaggggagcatctcacgctcccttcttttatttgccctgcccatgatggcgggaaatcttttgcagcagttttacaatattgcggataccttgatcgttggccgtgtccttggaaaaaatgctctggcggcggtgggatcctcctacacgctgatgacattcctgacctcgatctttctgggactcagcatgggctccggcgcactgttttccatttacaggggaaaaggagatgagagagcactgaagtcctccatcgcccacgcctgcggcctgatcctcgctgtaacgcttgttttgaacgcagttgtctatattttcattgatccgatcttaagcttcttacgggttcctgaggaggtctggggcggtatgagagagtatctgctgatcattttcgcgggtctgctcgccacgtccctctataatttcttctcctgcctgttaagagcactgggaaactctacggttccgctggtgtttcttgcggtatccgcgatcttaaacatcgcgtgggatcttttatttgtggcggtctttcattgggggatcgccggtgcggcctatgcgacgatctttgcccagtatgtatccgggatcggtattttgctctacgttcttttccgatgcagaagcctttttccggagagaaaggatctttgctttgacggcggaattttaaaggagatcgcaggcctttcctccctgacctgcctgcagcagtcggttatgaacttcggaatcctcatggtgcagggacttgtaaacagctttggcgccaccaccatggcggctttcgcgacggcagtaaagatcgacaccttcgcatatcttccggttcaggactttggaaacgcctattcgaccttcatcgcccagaactacggtgcgggaaataaagaacggatccgccgcggcacaaaggaatcctttgccatcagcacagcattcagccttgtgatctcagcgctggtctttgccttcgcggcaccgctcatgcagatcttcgtgagctccgcagagacggcggtcatcgcctccggcgtccgttatctcaggatcgagggtgcgttctattttggaatcggctgcctgttcctgctttacggatattacagggcgatcaagagggcggagatgtctgtggtgcttacagtgatctccctcggaatccgtgtgctgcttgcctacgtgctctctgccacattcctcggcgagacaggaatctggatggcgatcccaatcggctggatcctggcagatctcactggacttttatacatgaggaagacctggtaaaaagaaaaggtaactattcagtaccttcatagttacgtgcaaaaatccattccagatcagcttcgctgatggaatttttgccttccagcctatgttttcttacggtcagcgcagcaagtgcgcagacctactgaacagttacaagaaaagttacaaagaaagaacttttgcaaaataagaataaaaaaatgttgaatctaaaaaatacgctgtacaggagaatgaaccccatgtacagcgtattttgttgccgcgtgcccagatctggcgtttgatctgcgctatcctgcggtcagcgcagcagacatatttaaactaacttactcaacaacttctctttcctatcgatcatctcgtcgatcctctcgatataggaagctacatcctttacattctccgcgcgttccagacggttttccgccggaaacgtgactttcgtggtggttccggcaccgcaggccacgatggtctgcttttcctccataatgaggatattatagatacatgcttttccgggtgccgcatagccgacattctcgaaatttccggccatatttttctgacggtacaggtaatacggctcaagacccatctcgcgggcgtacttcgcggtgagatcgatcatctcctgagtgttctggatctttaagttcgcgtagcgctccttgaagatattgagtctcgccgcacgcttgatggcgagagagtggaccgtcacgctgtccggggcaagctctctgacctgctccatggtgctgcggacgtcatcgatatcttcctccggaagtccgatgatgaggtccatattgatattgtcaaagccaagatctcttgccatgtggaatttttccttcaccatatccacggtgtgatggcgtccgatcagatccagagttgcctgcttcatcgtctgcggattgatggagatcctggagatattgtgggcacggagaaccttgaatttgtcctcggtgatgctgtccgggcgtccggcttccacagtgaattcctgcacctttgagaggtcaaaggtattctcgatctttgtgagcagagcgtccagctcctctgcctttaaggacgtcggagttccgccgccaaagtagatcgtatccagtgtgcggcctttcatcttctccgccacata

SEQ ID NO: 2001 - DNA, 613 bp, Unknown
  gut microbiota DNA sequence
cctatgagaagacaggatccccggtttccctggaatgtgtcttcgacaatctggatctttatgcgccgaacggaacggattatctgtacacggtgacagagctcaaggacggattcctggaaggttttgacacctgggcagtaaagggggattatacttcctttgaccaggatgcgactgcctcgaatgcagggaccaaggtggagcatgtaacagcgaccgcctccaatgcgtcaggaggagatgggatgaccacagagtctctggcggcaaaagtcggacaggtgatctcaggacttttcggacgcagcagttcaggaaatacagaaattccggcagcaacaacgtttgcaaaccggaaatggaacacgcctcaggaggatggaaaggacaaggtacagcttgtcttaacaaaaaactgggctgacttcaacaatcaatttgggacaagaccggatacgctggatcttacactggagcgaagagcggatgcacagccggacagtcgaatgagatcgactggacaacggtgacggacagtacgccgacggaagataagtctgtgatcaactagtggaagtacacctggagcggactcgacctttattccata

SEQ ID NO: 2002 - DNA, 104413 bp, Unknown
  gut microbiota DNA sequence
cgtaaatacaaatccccctctaacttctgcagtgtgcccggaaatccgggtgtgcgggcaggagtgggagggggattttttataccgtctgttctttttctgtcagaaatgatacaaatcggaaatgacggtcgaggacgtttccaatcagaccgatcacttttcccatggtaaaggcggcaaggatcgttccgatcccgaggcctttgatgtggccgaggaagaggaaggtcagtccggcagtcacggcgaggcaggtcacgtcaaaggtgatcttgactctggagtagggcactttgagaatctcagctgtttcacgcggaaacaggtcggtcgggatgatcgggagtccgcagcggttggagagtgcaattccgatgcagaggacgacatagctcacgataaagtaacagatctgatatccgagtcccattggaagaccggcaagggcagttttgtagacatccagcatcttgctgaaggcaaagccgaccacgaagctgaagaggtaggtcggaacgaatttttttcgaaggatcatcaggacagccacaagtgtgccctggaagatgtaggtccaggtgccgagtgtcattcgtgggaatgattcagagaaagcgtatggtacgctggagattgccgagattccggcgccggagtcgagcatcaggactacgccgaagctgttgatgaggacaacgatcaagagggcaagttcacctcgccagatcgggcgggtgtcattttggttttttgtgttcatttgtgtatgtctcctgctagtcgatgtttctgtgaagtgcagaacggttattattgtagcgcgggggtggggaatgtgcaagagggagttttttgctgtcctttgcccgaaaaaagttgctggagacaggctaacatccgaaaaaatgtaggaaagagtgagctaacgtccgaaaaaatgtggtacagcacgactttaacgtccgtaaaaatgtagaatagaacgaatttacgtccgaaaaaatgtaatataacgcatatttacatccgtaaaagtgttgatctctatggattctttttagtccatgtaggtgtacggctttaccggcggctggtctttcttatgttcgccgataattttttccatccagatcatgtcgtaccagcggttgaatttgtagccgcagttttcgaaggttccgcagaggtggaagccgaggtgttcgtggaactgggcgctgtttttgttgagatattcgtcctctactttggggtagccgatgcaggcataaagattcagaatacccatggttttcaggcggtcggcgagggcttcgtagagttttcggccgagaccacattttttggcgttatggtccaggtagatcgtgagttcgcaggcccagtcgtaggcggctcggccaacgaagggacctgcataggagtagccttcgatttttccgtttcgctcgatcacgagatatggatattttttcatggtgttgcgcatccggttttcgaattcttcgagagaggggacttcgtattcgaatgtgatcacggtgttttctacataataggtatagatttccaggatgcgcggtgcatcttcaagttttgcatttcggatattgatggaatccatgggggacctccttttggtgtaagattaattttgaggatctgtaacaggaattcccagcatagaagattaagaggaatgaaattggtgttctttggggaactccgtcaatgtcagaattcgtgaaaaatgctttgacaggagttattatagcactgcagaacagagaagaaaacaggtgttttgtcgcggaacgatatcctgcaatcatcgtcggaaaacgtttttaccccgtaagtcttgtaaatgaccaattgcggcgtctggatgatccgcctgccaaatagaaagaatttcaagcatattttgcaactgcgccggacatgccaattgacaactcccaaatgccagagttacaataactgtaatgcataaaacggcggttatccataacatataggacagccgcaggtaaggggaacaaaatggattttacaagtttatttaatatgcagggcatgatgttctgcgttctggcgctcggatggtatctgaggaaaaaagggatgatcgataagagtggaaaggcgcttttgagcaatcttgtcatgaacgtgacacttcctgcgagtatcatcaaatcgttccagatggaattcagcatggacattttaaaactgaccctggaagtgatcgtgatctcatttctgatccagatcatctcgaacgggctcagccgcgtcctctatccgggatggaatgaagagagccggaaggttcttcagtacgcgacgatcgtctcgaatgccgggatcctcggaaatgcgattgcggaaggaatcttcggagaccttgggatcatgtacgccgcagtctatacgatcccgacgaggatcttcatgtggtcggtaggactcacttactttacggaggcgccgacgaaaaaagaacttgtgaaaaaggtgctgacccatccgtgcatcatcgcgatctttaccggaatggtgcttctcatctcgcagtttcagcttccgggatttgtaaaccagacagtccggacgatcgccggagctaatacgttctgcgcgatgctgctcatcggatgcacactggcggaggtgccgtttaaagaggtgttctcaaaagaagtttactattatacattcattcgcctgttcctgatcccggtcatcgtccttgcaggatgccggttgttccggatcgactcgctgatcacagcggtctgcgtgatcctctccgcgatgccggcggcgagcacgagtgtagtccttgcggtcaaatatggaaaagacgaccgcttggcaacgaagatcgttgtcttttccacggtcgtctcattgatcacacttccgatctggtgttatttcctgcagtaggagatcctgtgggattttcaaggtaataccagaggttcattcggataaattcgtacatactgagccggaaatcccgttctttatgcgggattccggctatttttaatgcttccttcatgaccggattcgagtgagtgctcccacagagaccggacgcatggtacaggacggcgagaaaaatttcgctggcgtcatggtcagagagactgaagtggtctgccataagtttgacgaaagcatctttgccggtaaaataactttttttaaagcaggcaagccggcaggcagagacatggacctcgatgattgtgcagaggatatcgctgtagcggaaatagtcgcggtggtcgtttaagacatcggcccagcggccagcccactcgtccggagtccatgttttcccttccgggaaagcggcgaaaagatcatcaaaataggagtgcatcttatcggaacagatttccagatagatctcttcctttgtcgtcacatatttgtagaggttggcgcgtgtccatgacagctttcctgcgatcgtggacagggtgatctcctggtaggggacggaattaaaaagagagtcggcagcagccttgatctccgccatccgggcctgtttctgttcttcacttcttgcgcgcacaaagtctgtcatggggttcacctcctgtcaattccaggctttattcaataaatacaccatcattataattgatttccaggcacttgacaaggcatgtggggtatgctaacatcaaaattagttacaatatgtcacttacgaaacaggtgaaaaccgtgagactgggacgcaaaatcctgttacagtgcgcgggcatggagtgcccgtgtactgtaacggaagatgctttcagatcccggccggtgaatcgcgtgggaaaaggagaagcggatggataagatcaagaaaaattttggatttggctgtatgcgtttcccgatgatcggggaagaggtggacgagaaacaggtctgtcagatggttgattatttcctggaacagggatttaattattttgatacagcacacggttatatcagcggaaaaagtgagcttgcgatcaaaaactgcctgacaagccgccatccgagagagagctatatcctcacggataagctgacgggaaatttcttcgaaaaagaagaggatatccgcccgctttttgagtcccagctggaacgctgtggagtggagtattttgacttttacctgatgcatgcccagaatgttgaaaagttcgaaaagttcaagaaatgtcatgcgtatgagacggcactgaaattcaaggaagaaggaaagatccgccattttggaatctcgttccatgaccgtgcggaggtccttgaccagatcctcaccgagtatccgcaggtcgaggtggtacagctccagttcaactatatcgactatgatgacccggcggttcagtccggaaaatgctatgaagtctgcagaaagcacggaaaaccggtgatcgtcatggaaccggtccgcggcggcagtctcgcaaatctttcggacgatgcaaaagcagtgtttgacgagctccatggcggaagtccggcgacatatgcgatccgctatgcggcgggattcccggggatcatgatggttctctccggaatgagcacgatcgaccagatgaaggaaaatctggactttatgaaagacttcaggccgcttgacgagaaagaggcacaggcggtagagaaggtatgtgagatcatccagggcaaaaagctgatttcgtgtacaggatgccgctactgtgtggacggctgtccgaaaaagatcttgattccggatcttttcgcctgcatgaatgcgaagaagatgtataagaactggaattctgactattattatgaaatccacacaaaggaacatggaaaggcatccgactgcatcaaatgcggaaaatgtgagcagatttgtccgcagcagctgaagatccgcgatctgctgtgtgatgttgcggcggaatttgagaagaaagaggcgtaagtgagaatttttgtgcattgccaggtgaaatgatctgtagtaaggtaatacagagatagacaaaagccgagaatatcagcccagtattgcgatagggccggatgatggatgcaatgtctgttgtccggccttttacgatgaagtatgaggagaataggataatatgggatttcatgagctggaagaaaatctgatcgatatggtgaaggagcagcaggcgaagctcgggtttcgcccggaggtgatccggctgtactatccggtctcgacgctgaatcactttttcgggacagatgataccccggaacggatggaagagcggcttcaggagcttggagtccacacgaaggatacgcttggagctgttcaggtgaccgcaaaaggggaccggttctgtattaagatcccggaagagggtagtgtgttcgtccatgaacagatgaaaggacgggagtttatccaggaccttgtagaacttgtcgggagacatggatgcagccttgatgagatccgggagcttttcctcaaatggtcggaacatgccgtgtttgaagaaattgaggacggcgatttcgactgggcgttccactttgcggatggcatcccggatcggtattattactgttttaaggatgagggatgccatctgatctaccaccggttcctgccggaggattatgaggagctgctgtaaatagaaaaccggtaatttcattgccgatggagtttacaattccagcgtcgctgcgatttttttcaatgtctctgcagacgcccggagcttttcggcttcctccgcatttaacgcgattggaacatgcgtctcgatgccggttaatcccacgatggccggcatgctgagggagatgccgtcgatcccgtactccccgtgcatcatggaggaaaccgggagaatggaccgctcgttgcggatgatgcattcgcagatccgtttgacgctcatggcgatcccgtaataggttgcctgttttttggagatgatgtcataagcgctgttttttacgtcctctgcgatccggtccatagcgtggtcatggtcgaaatggccgcgcatctcgcagaaggtgtttaacgggatcccggagacgttggtgctgctccatgcggcgatctcgctgtctccgtgctctccgatgatgaaggaatggacgctgcggctgtcgacaccgagatgttccccgagcgcatattttaaccgcgccgtgtcgagcacggttccggaaccaatgacgcggttttccgggaagccggagagctttaacgccgcgtaggtcaggatgtcgaccggattggacacgatgaggaggattccctcaaagccgcgctttgcgatctcggggatgatcgttttgtagattgcgacatttttgtggaccaggtccaggcgcgtctcattcggtttctggttcgctccggcggtgacgatgatgatcgcggaatcggcgatgtcatcgtaagttccggcatagatcttcatctgaccggcaaacgggattccgtgggcgatgtccttcgcctccccatcggctttgtcgtggttgacgtccaaaaggacgagttcggaaaagagtcggctctgcatcagggtgaatgcggtggcagatccgacgaagccgcatccgatgacggctgcttttcttgggttgatggtctgtttcataaaggatccctcctgttagctcagaatcgtgcggagatgttccgcgtggaagatggtttcagtttttccttcctgcatgttcagtatagtataaccggaaataaaaaaccgttgtatttacaacgaaaaaaccagaaaattccagaaagaccggaactctctatgttggagaatgctacattagaagataagtggtaaatgttcagtaggtctgtgcatttactgcgctgaccgtaagaaaacataggcgggtaggcaaaaatcccattgccgcaggcaatttttcatggatttttgctcgtgactgtgaaggtactgaacagttaccagaataataaagaagacggctcgatgcatagggatatgcggagccgtcttcttgtgtaacaggaaattacggggaattccctgttatacaaaaggtactgacatgccaatgatgcgtacttgcgcgaagacggatgtaaactatagatttttcctgaaaaattcttctgcgttccggaacatgattccctctgccagatcctttgacattcccttttccaggaaatattcgtagagatcagcagcctttgccggagtgttcaggtatgtaggaagtgtcgtaccgtcaaagtcagagccgagagcgatgttttcataggcaccgaggctgaaaaagtgctcgatgtggcggtagaggtcgtcgggagaatcgccgatgcctccgtcggtaatgaaactcttacagtagttgaggccaatgaggcagttccggcggaccatctcgcggatcatgtcatccgtcaggttccgcttgtgggaacagatggagcgtgcgttggagtgggtcgcaacgaacgggcggcgggcggtctcaaagaggtcggcgtagccggtgtcgtttaaatgggagacatcaacgaggatcccgcggtcttccatttcacggactgcctgccgtccgaagcctgtcattccgtgagtggtggtgtggccggaaccgagctcattttcgccgttccaggtgagcgtcatgcagcggactccgtcatctgccagcttttttacgcgggtgatatcaccggcgagagcggctccgccctcgatggtcagaaaagcagccgtctttcctgcatcccatgcagcttgcatatcggaagcggagcggcagggggagatgcggtcatgaaatttttccatctggcggttaaaattgtcacggtttgtttcgtagtaatcgatggcagcctgcccgcggtactgatccgggatgaagatggcataaaactgtgcccagtgaacgtcagacgggatcgcgttcagggagagcacacggtccggatcatcaagcgtgtccggggtcagccccttatgggtacagtctgtgagtgtgtcacagtgcagatcgatcaaagcatagggattcatgggaaattcctcctaaaaatatattttgaatttattgtaacggaactgttcagacgtttccgtcaattctgtctccggatctcgccttttaagatcatcgggtagcggatcagggaatcggaatcaagcgcctcttttttcatatccaccgccgtgatctgatgattttcataagttgtatagtaataagttccggtctccgcgctgcagcaggaggtgtagatcgtgatctcatactttccttccgcaacctcacagcatccgcgctgctggtccacagagcctaagatatggaagaactggctgacgctttcttcttcgctgtcaccggagacagagtgtgcacgggtaaacgccacacgcgcaaagcgggactgggaggagagatcccccgggagtccgagggcacccatgccgcggctgtaggtggaaagcggtgcatccggcgcgaagtggttctccggctggcgcggggagagactgaggtaattatttaaatggaacatctgcatatcaaacggcggattgtttgtcagaactccgactggatcgtcatgaacatggagtccgtctttcatggactcgacaacgatcgcctcgtctttgtctgcgatgatccagtgaaggctggccgccggcagctggggattaaacggggtcccgacaaggttcataacggcgagtttttctttcgcctcgctgacggtcgcgcactggcttaagatccacggaataaattcgaactgggcgacattttcaaccccgtctttcatatccgcatatgccgcattgccgacaaagttgagtccggccatgccgagccctttttcgttcatggcatcgtaatataacggataatccccggcgacatgtgccatgccgatgatcgcatagtgggagtcgtgcgtgcccatatggcggaacgggatcgggtaattgcgcggggtgatcgtgatctcttctccataggaaaattcatagtctaaggttcgtccgaagtaaaatccttttgttttgtaagttgctgctgtacacataagagaaaacctccattcctgttgtgaacaaagaactgtcgtaactgtgagggtactgagcagttacgaactgccaatagaagactacgcagatgcccggacagataccgaactgcctgccaaaggtgcagaatggactgcatgtcttctgaaatgagtttcgaatcagtaagaaatcgtctgcagctgctgatccgcctggactcgaacgcgaaatgacggcaaaagcggctgcacgtgtggacaaagaatgcccgtactgtaatagtatacagcattccctgaaaaaattcattaaaaagatctttacaaaaacactttagtatggtaacatgataacacgatgaaaatagagaaacaaaatcgaatacaaaaacgcgacattcagttttaggataggaaaaaagtcaacggaaaccgcctgatcaagggcgggcagatatgaggaggacaattattatgaagaaaagattattaagcgcagttatggcatccgcaatggtactttctctcgcagcatgcggaggagcaaagacagagacaaccgcagcagagacatctgctgagtccaaagaggagacaaccgcagctgatacatccgcagcagaggagacaaagccagcaggcggcacactgatcgttggttttgaccaggatttcccgccaatgggattcgttggtgatgatggagagtacacaggattcgaccttgaccttgcaaaggaagttgcaaaacgtcttgacttagagtacaaggcacagccgatcgcctgggactccaaggatatggagcttgagtccggaaatatcgactgcatctggaacggatttacgattacaggccgtgaggatgattacacatggactgagccgtatatggcaaacaagcaggtattcattgtagcaaacgattctgatatcaagagccaggctgatctcgccggaaagaatgtggaggtacaggcagattcttccgctgaggcagcattaaaggaaaatccggacctcacaaacaccttcggacagcttttaacaacggctgattacaacacagcgttcatggatctggaacagggcgctgttgatgccgtagcgatggacgttatcgttgcaggatatcagatcaaacagagaaacgcagatttcaagatccttgacgattccctttccgaggaagagtacggtgttggcttcaagaaaggcaacacagagttaagagacaaggttcaggcaactttagaggagatggcagcagacggaacacttgcaaagatctctgatgagtggttcggtgaggacgttacaacgatcggaaacaggtaaaaacatgctttgcgagtttccccttgttatcgcgacagtcgccaaggtcccgcgtaagcgcggactttggctcgttgttcgcataaataaatgatatttgacacatatgtcaatatcatataaaatgaatgcaggattcagattacgggaaccggttgacagttcccgtaatttgtcttgttaaaaaagaaactttacaaaagcacggtcagatgatatggaccgtgaaaccatgaaggaaagcaggtaagatcgtatgggtaaaatgacaatcgggcagatgatcgctcagctcggaagcggtatgctgatcagtacgcagatctttgtgatcacgctgctgttctccctgccgctcgggcttgttgtagcgttcgggcgcatgtcgaaaaaccgcgtgatcagcatgatcgtaaaattttatatctcgatcatgcgtggaactccgttaatgctgcagctgatggtcgtttatttcggaccatactatctgttccatatcaaagtcgggagcagttatcgtctgacagcgacattcatcggctttgtgatcaactacgccgcgtattttgcggaaatctaccgcagcggcatccagtccatgccggtgggacagtatgaggcagcacagatcctgggctacaataaagcacagacatttttcaagatcattctgccgcaggtcatcaagcggatcctgccgtcgatcacgaatgaggttatcacacttgtgaaggatacttctctggcgttcacgctgagcgttgccgagatgttctcgatcgcgaaggcgctggcggcttcccagacaaacatgatcccgtttgtggcagccggaatcttctattatgtgttcaacctgatcgtggcggtcgttatggagtggatcgagaagaaactggattattaccggtaggatggaggtgttcggatcatgaatctgttagaattaaatcatgtggaaaaatcatttgaaaatttatccgtgctgaaagatatctccatcagcatcggtgagggcgagatcgtatccatcatcggaccatccggatccggaaaatcaacgctgcttcgctgtgcgacgatgttagaaaaaatggatggcggcgagatcgtctatcttgggaaaaaggctgcatggacagacaaggacggacgtgtcgtttatgcggacaaaaaggaaatgaaggagatccggagccagtatggcctcgtattccagaactttaacctgttcccgcattattcggtcttaaagaacatcacggacgcaccgatccatgttcagaagcgcgataaggagactgtatataaggaagcgagagagcttttaaagaagatgggactgtcggataaagaagattattatccgtgccagctgtccggcggacagtgccagcgtgtggcgatcgcaagagccctggcgctgaacccgaagatcctgttcttcgatgagccgacctctgcgctcgatccggagctgacggcggaggtgctgaaggtgatccgttccctggcagatttaaatatcgccatggtgatcgtcacccacgagatggcgtttgcgagagatatctcccaccgcgtgatcttcatggaaggcggcgtgatcgtggaggaaggaacgccggagaaggtattctcctctgacaatgagagaatgaagagtttcctcggaagatatggggagatcctgtaggatcttgcgatcgggaatgtgaaacactgaaaaatatgatttacaaccggagataggtattgtataatcttcgacgggaatgaagttctcccatgggaaaccagaaccgcttatgatgagctgatgacttctgtgatgatgggctgtccgggacggcgctttttagcgtgtgctgcggggcttaagtcacaggagagtcagctctttttttgtgcagcaggaaattccgatggaacttcctgccgcgcaaaaaggcacattttttcgggaaaatattttctcgttaataaaattgggagcaatcgtttcgtatgggataggaactttaaaagtggaattttgagcatggaacagttccctaaataaaggcagaatcgtggaaggcacgtttttgcagaaaaaaggagaaaaattatgttgacatcacttgcactgatctttctgatgggactttccgcggcggcgatctgcggatatcttcacctgccgcgtattatcggaatgctgtttaccggcatcatcctgggaccgcatgtcctgggacttctcgatgataagatcttatcgatctcctcggaacttcgccagatcgcgctgatcatcatcctgttaaaggcaggactttccctgaaccttgcggatctgaagaaagtcgggcgtccggccgtcatgatggcttttgtaccggcgagttttgaaatctgtggatatcttctctgcgctccgatgatcctggggataacgagaattgagtctgctgtcatgggtgcggtcctcgcggctgtttccccggcggtcgttgtgccgcggatggtacagctgatggaaaatggatatggaacggaaaagagtatcccgcagatgatcctggccggggcatcgtgcgacgatatcttcgtgatcgtcctgttttccacatttgctggaatagcacagggaggaacggcagattttacgcagtttttgaatattccggtgtccattgtgctcggaatcctgctgggcgctgctgtcgggtatcttctcagccttttctttgagaccgcttatgcgaaggaacattatgtgagaaacagcatgaaagtcattgtggtcctcgggctttcgtttctcctgatggcggtggaaacatgggcaaaaccgtatgtctccgtctccggacttcttgcggttgtcagcatggcatgcgtcctcaaaatgaaatgtccgaaatcagtttccggaagactctcagagaagtttggaaaactttggatcgcagcggaggtagtcctgtttgtgatggtcggcgctgcagtggatatccggtatacggcgactgcgggaggcgcggctgtggtgatgatcctgcttgcacttattttccgggcagccggagtctgcgtgtgcatggcgggaaccgcgctgaacaagaaagagcgcctgtttaccgtgatcgcgtatctgccgaaggcaacagtccaggcggcgatcggttctgttccgatggcgatggggctttcctgcggacagatcgttctctcagtggcggttctcgcgatcctgatcacggcgccgctcggggcgatcgggatggatatgacgtatcggagactgttaaaaagacaggaatagtaaaaacatccagagaacatttcagggttcacaaaacgggaatgatgagatataatgaatggcacaaagatagtaggaaaatagatgttcagaaactgacaggaggagaacaatggatttcgaaaaattatgtgcagagagatattcgcttagaaagttcagcgaccgtccggtagaagcagaaaaactggagaaggttctggaggcaggccacaatgcaccgacggctcataaccttcagccgcagcgaattctcgtgatgcagagcaaagaggcactggaaaaagcggaagagtgcaccgcgtgcaagttccacccgccggtgatcctggttgtcgcttatgatccggcgaaggcatggaaccgtgaaggcgatatgaagaatcatggcgagatcgacgcaacgatcgcagcgacccagatgatgctgcaggctgcggatctcggtcttggaacctgctatgtcggcatgttcagccaggaaaagcttcatgagacattcccggagatgaagggactcgttgcgacagcgatgctcccgctcggttatccggcggagacggcacatccgtcaagacttcacacagatagaatgccgatcgatgagatggtggttcgcctgtagttctgatgtccgggattcgcagaattgcagaacggtattagaataagaatacgaaggaaaacaggtctgcagggtgaaaagtgacagacctgccttttcacctgcgtgtgcgcgtgaagaaaacttttatacgtataaaaaatacgcaggaggagctttttgtggtacactggcagacagcatagaacgactgcccgtgtgtgcacacggcaggacattcaaaaaatggaggaacacagatatggaatacaaagttttcgaaaaggttcagaagaaatttgacaccctgacaaaggatgcaaagatccagaaagcgttacagttcatggaagaggaccaggataccgtaatcgacaaacagatcgagctgacattgatcccggctccgacgaaccatgagcagaagaaagctgcgagacttcttgagatgtttaaggaagaaggactcaccgactgccatatcgacgagtacggcaactgcgttggtatccggaaaggtaccggcggcggaaagacagtccttgtggaaggtcacatggatacggtattcccgcttgacacgaagcttgagatcgtccgtgaagacggttttatcaagtgcccgggcatcgtggatgacacaagaggatgtgcgacggtcctctcaacaatccgtgcgctgaacgcagccggaatccagacaaagggagatatccagttcgtcggaacggtccaggaggaaggaaccggcgctttaaagggaatgcagtattatgtaaaccatcatccggagctggatgccagcatctccgttgacggaccgggatttgaggagatcacctacgaggcaaccggaatccagacatatgagatcaatttccatggcgtcggcggacatgcatgcggagcttttgcaaaggttgcgaacccgatccatgcggcaggacgcgcgatcgcaaagatcgctgagatccaggttccgaaggagccgatgaccacgtttgcggtcacaacgatgcaggcaggcagctttgaggctgtccatgcgatcgttccggtcgcacagatccgcttcaacttccgctccaactcccaggaagaactcgagaaactccgcaagaagatctttgatgcaatcgatgaggcatgcaaagaggagaccgagcgctggggtatggacaccatcacatatgacgtaaaacatatctgtgatgtcaatgccggtcaccaggatccgcatgcaccgatcgtagagggcgcgatggcggcagcagagtaccttggatgtgcggagccgaagctcggaaacggcggttccacaaactgcaaccgcgcactggaagcgggacttccggccgtctgcctcggaatgggcgcagattacgatatccatgcgcatatgctgtctgagcagtttaaagtcgagggagcttataagggttgccagcagacactgctcctggcacttctctgcgcaggaacggatgtagtggaaagtatcatcgagaaataagatcgtaactgttcagtactctcgcagttacataagaatgtcagaaaaaggtacggaattgttatattttgatcgaaacagcgcaggtttgtcctatgtggacggacctgcgtttcgtttttacggaacaggaaatccagggatttgttctgcaatacggaatgaactttagagccgcacttttgccgtagaaaagcaaggaaaaagcaagaaataatcaccttgacaccatgtatagggttggataaaatagatggtaacagttgggattgcgcagatttttacccggaattgtgttgcaagcttgcttgcataagcaattctgggtgaaaagctgcataagcccaattgtaaaaataataaaggcaggacagaaacatgaaaaaattaagaatgctttttccgaccggcgctgtgatcggtatgctggcggtgggaacagcgtttcctgcaatggcggctgttgttgatatggacacggccaagtttgtgcgcggcacaacgatcaatgcggtagatgtgtcaaagcagacagcgacacaggcgaaaggctatcttgaaggctacttcaacgagcattacgagattaaaatacaggacgcggacggaaatctggagaccttaaagggaacagatgttggatatcatctggatgtcaccggcagcgttgatgatattttaaaggagcagaatgacgcaggaagaaagacagggccgggctctgaccagagttataccgtgactgtgaaggcgacggtcgacgatgagaagcttgccacagcgcttgcaaatctgcactgtgtaacggcggcaacaccgacctcgaatgcgtatatctctgcttatgaggaaggaaaaccgtttacgatcgttcaggaagttcagggaaatgagcttgatatggacaagttgaaagcagctgtcaaggatgcgcttttaaaccagaaaaagcagatcaaactgacagatcatgactgctacaaaaaagtcacggtgaagtcagatgacgcagccctggtacagctctgtgcgaccttaaatgcgtataaggacatcaagatcacttatgatttcggttcaaagaaagagactctggatggtatggagctggcaaaatgggtgaccgggacaaatggaaatgagattcaggtggaccgtgaaaaagccgctgcatatgtgaaatctttagcggataagtatgacacttacggaaaccacaaatataagacgacatccggccgcgatgttgtcgtatatggaaaatacggctggaaggtcaatcaggctgcagagacggatgcgctggtagcggctgtgaaagcatgccagatgaccgagcgggaaccgatctacgagagccgcggtgcgacccacgacggatatgacttcggacagacctatatcgaggtggatcttgcgacccagcatctctatttctataaggacggaaaagtgatcatcgacagcccgttcgtatcaggaaacgtgtcaaagaattatacgacgcctccgggactgtttgagctgtattataagcagacagaccgcgtattaaagggagaagattacgcgactcctgtaaaatactggatgccgttcaacggcgggatcggacttcatgatgcgaactggagaagcaagttcggcggtacgatctaccagacaaatggttctcatggctgcatcaatctgccgccgaaagtagcagcgcaggtctatgagaatgcgtataagggaattccgatcatctgctgtaactagggaaatttgcagagtatgagagagtgagtggggtttgaactgagaaagcggatcctgcgcatctggaattcgaaaaaataatagaaaactgttgggataaacagcaggaatgaaaacaccggaagggaaaacaaaaatggataaacagcaggttttaaatcagttaagaaacgcgaaggagatctatgtgatcatgtctctgtgcacaagaatgccgtatgtggtatgcgacaaggagacatttgatgatgaagtcctgatctacttcatggaggaagatgttaagcgcgaaggtaagcgcctggttgaagaaaagatcccggtacagatcgcaaaagtggatgcgaaccagatgctccacttctacggaaacctttacacgatgggcgtgaactgcctgatggtggaccagtacatggatagcgaatgccggatccagcttccggaactcgtaagccgtcctggccagaataagccggatgctccggaagacgagaagaagacatggatcgagaatccgagccttcatttgacagccctgtacttcatgcaggagctccgcagacagaaatttgagacgatgccggaagaattaaaggaaatgcaggaggagatccttgcggacttcaccaagggaacctatattaccgcattccaggaaggcagcggcgttccgttattaaaacagaaaaacggcgatgcgtaccagccgatctttacagatatcatcgagttcggcaaattcaatgcgaaaaaccagtttaaggcgatcgcggttacagcgaacaagatcccgagcatcctcgtaaaagaggcaaagggcgttgttgtaaacccgttcggcgtaaaccttcagatgccgatcacaaagcgtaccgtgccgaatccggaagcggctgcacaggcaggcacaccggaagaggtccaggcaactcaggtggaagtgaaggcggacagcgagagagccggagcacaggaagaagccgaagctgagaacaagactgaaaactaaataaaagtaacggttctgttacgggatcagactccggcgtgttcgcgtcactgggaatagtgcgcaggatgcggcggagtttgtgattgcgcgggatgaggaggatgacagctgtggagagcgacagaaggaagatcgaagaagcatatttaaaagcggtggatatcggttattcctaccatctggcgaaaaagatggaggagtttaagagcaatccggtctttggttaccgtacagcgggatcgaaagcggaatttgataccggggaatttctgaaagaggaaatggagcggatcgggctttcagatatccataaagatgaactctgcctggattcctgggagttcgagaaggcagtcctgcgttttgcggaccgggatggaaaggaacatgaattccagctcggtgcctatcagacggagtttgtgacggatggatggaaggaatatccactggtctacgcaggccgcggaaaggaagcggactacgacggcgtggatgtgacgggatgtcttgtgatggtggacatcaaccagagagatgagtggtggatcaactatccggtctatcaggctcatttaaagggtgcagcggcggtgatcgcagttcaggataacggttatgcggagatcgacagcgaggcgctcaatgcccaggatatcgcgggcccaaaggatgccccggcattttccatgtcaaagaaagatgcggagatcctgaggactgcgttaaaagagacttcgcggattacagtgcagtttgatgcaaagtctgtcgtgaaggaagatatgcctgcctacaatgtatggggaacgatcccgggaaagtcggacgatatgatcctgctcagcggtcactatgattcctattttgacggattccaggatgacaactgtgcgatcgcgctgatgttcgggatcgcaaggacgttgttggagatcggttatcagccggaaaagaccattgtattctgctgtatggcggcggaagagtggggaattgaaaactccaagtacgactggtcgacgggggcatggcagcaggtctttaagatccggccggaatggcagggaaaggtgatcgcggacctgaattttgagcttccggcctatgcgcataatccgtgggatgcgatccggtctacctatgaatatgaggattttctgaaggaatttgtaaaagagtttccggtggacgcaaaaaaggtctacccggaaggtctcggcgtccagtgcccgatcgagacctggtcggatgatttttccgtcgcgatctccggaattccgtcgatggtgaatgaattcagcagcgcagagttcatggagacacattaccactcccagtttgataatgacgagtattataacgcggatgtatttcagtttcatcatgaactctacggacttctcgtcatggcgtttgaccgggtaaaagtagctccggtgaatgtcggacggacacttcaggcgctccaggagagcgtcagaccggttactggccgggaagatgaaaagggcatcaggatcctgctggagcggacggcagaggcgaagaagatcgcggatgcggtatataaaagagtgaaagagattaatgagatctcccgggacgatgaatgcaatttgcggaacaaatatgctgcgcttcagaggcagctcctgtatttgttccgcaaatgtcaggactattttgtccgtctcaactggcacgatgaggtcctgttcccccacgaggccgcccagagcaatctgcgccatatcggcgatgcagtgcgcagtctggaaaataaggacgtcagaggggctcttgacgccttgtacctggtggacaacaatcagtatgcgttccagtttgacgatgaagtatatcactattttacggaatatgtcctgaaccaggaaaaagaccggctgcagtggggagccggacggatcgtccatcatgtggatctctcgaaagaggtcaagagtctcaaaaagaagatcgccgagggcggacatgacgtgacggaagagctttgtgcactgaaaaaaatggaggaagagcagcttgcctgctttgacgatgacataagatatatgacccaggccgtggataccctgacggatgggttaaaaaaagcgaaagaggtgttggatttttagttatggacagccagatattgtaccgggtacagagagaagatctgccccggctccagaaaatgctggtagaatgttttgccagagacccgctttatgagactctgatcccggatgccgagacgagaaagcggctgatgccggaactttttgagtgtgatctgaacgagttttatgagacatgtgaaatttttgcggatagcccggagttaaacggactcctggttgtctccgatgaggcggaggaatatgatccggtccgcttttaccttacagaagcgtgggcgtccttaaagacagatgagtatctgatcaaggaggacaagagcttaaagacgctctggaactttatcaagggccgcgactacttaaactcccattggacggcccagcttcaccaggaaaaccgcttacatatcatctaccttgcggtgagtccgagtgtacagcatcacggggttgcggaaaaactgatggatgatgcgatccggtatgccggagaacaccggatgatgatctcgttggagacgcacaatgagaagaatgtggcgttttacgcgcatttcggatttaaggtgttcgggatcgtggagaaaggcatgggactgaagcagtattgcctggtgagagaaattcagtaacctgaagaggacttatccggccatggcggctctgcggtgcaccggaaacggtcaggaaatttcataacagataaaaaacaaggacctcagcgattggcagccgctgaggtccttgtttttatggtatatattgaggaataaacttgcccttattggcaaattgggcaactatttcatgatcgcatcacccgatatacaggtgatgcaggattaaagattttgattatctctgtacacgtccggatccgtcgccgccagctaatttcttaacttcgtctacggaaaccatgttcatgtcgccttcgatggagtgctttaagcaggatgcagctactgcgaactcgatgatgctctgagcatccatgtcgcttaagcaagcgtagatcagtccgccgccgaagctgtcgccgccgcctacacggtcaacgatgtgcatagcgtatttcttgctgaagtagtagtccttgccatcgtataacatagcggaccagttgttgtcgttagcggagatggactcacgaagcgtaatagcaaccttctggaaaccgaaacggtcagcaagctgttttgcaacgtccttgtagccctcgtggtttacagcgccctttgtaacgtctgtgttggaagctttgataccgaatacatcggaagcatcctcttcgtttgcgatgcagacatcaacatatttgcagagctcgcccataacttcgcctgcttttgcctttgtccagagtttgtttctgtagtttaagtcgcaggaaacagtgatgccgagttcttttgctttcttacatgcttcaaggcagatagcagcaacagtgtcgtttaatgccggtgtgatacctgtgaaatggaaccagtcagcgccctcgaagatcttagcccagtcgaaatcttccggagttgcctcggagattgcggaatgtgcacggtcgtagataaccttggacggtctctgggaagcacctttctcaaggaagtagatacctacacggtcgccgccgcgggtgatagtggaagtatcaacgccgtatcttcttaactcgtttacagctgcctggccgatctcgtgcttcggaagctttgtaacgaatgctgcgtcaaaaccgtagtttgcaagggaaacagctacgttagcctcgccgccgccgtatgttgcgccgaagttgttagcctgaacgaaacgatagtatccctccggagcgagacggagcatgatttcaccaaatgtaataactctcttggacatgaggattctccttaaaattaatatgatttatagtcatggaccgcgcggagcagggaaagcggttagcagagtccctggttacgcggtataaattacgatttttataacggaagatgaagcttatttctgtaccagatgtactgcgaagccgccgatctcgtctgcgagatagattgctgtcatcttgtcgcctttgaacttagcggactcttcgttgaacttgtagcccatcatctcaaggtagttctttgctcttactacagagtttgtagcaacagcgatgtgaccctttgcgccaagtcctttggacttcatagcctcaacagcttttcctgcgaatacagagctgttgccaactttctttgtgaatccgaacagaccgtcaaatgcatcagcagtcttttcagcttcagcttcgctgtcgcagttgattccgatgtgagcaagctcaaagccgagcattgtctgaacagcttcctttgtaagatcgcggatcttatcgaactcaccggcagctacgaggtctttcttaaccatccagcttccgccgcatgcaaggatcttgtcgaatgcaaggtaggagttgatgttcttagcgttgattccgcctgtcggcatgaatttcatctgtgtgtacggagcagccatagctttgatcatgttgattccgccagcagcctcagccgggaagaatttaacaacatcaagaccaagggagatagccatctcaacgtcgctcgggttggaagtacccggagttaccggaattcctttatttacacagtatttaacaacttccggatttaagcccgggcttacgatgaattttgcgccggcgtttactgcacggtcaacctgctctgttgtaagaacagtaccagctccgactaacatctccgggaactcttttgccataatacggatggactcttcagcagctgctgtacggaatgtaacctcagcgcacggaagaccgccctcgcaaagtgcctttgcaagcggtgctgcgtcctttgcatcgtccagaactacaaccggaacgataccaattttctggatcttctctaaaacttcgttcatgattcctgtctccttttgtttttataaatttaggaaatttagttttagtcaataattaagtcatattgagttttaataccgagtttcataatgcggaaccatgtttcgcattgcggtatcatctaaattagattatactcacgcgattcaaattgtcaatagcgaaaaagcctaattttactggattttctgagtaaaactgccgaaaaacaaatcgcttcattttataatggaagtgtggtaaactataaaaagtaaaaaaggcagctgcctgatgggtttgtgtatttaacacgccggccaaaacagctgcgagagatgatgagcaggttagaaaggaaaaaataataatatatggatatacagtttcataagctgagcgctgagaattttgagaagctcagcaagtattacggaagacgccacgacaatacatgcgacagcgtgatgctcgacaacttcctctgggcggactattatcatgtccacttctgcgagagagacgacagagcagttctctggacgatgaagatcatgggcaagatgtatgcgtctcttccggtatgcgcgatcgaggatatgccccactatttcaatgagatcgaacggtatttcaatgaaaatcttcatttgccgctggagatctatcttgcggatcaggaagctgtggactatttaaatctcccggctgagcgatattccgtgacggaactcccggacgcgaaggactatctttacagcgctgaggcgttaaagacactgtcaggaaaggcactccacaagaagaaaaataacctgaacgcctttaagaaggcatatgacggacggtatgaatacaggactctctgctgttccgacggctgtgaagtatggaaattcctggacaaatggagagaaggaaaaggacaggaagtcgagggacatctggattatgaagtggaagggatccatgagatcctgagaaactgttcgatgttatcggtccgcatgggcgggatctatgtggatgaccagttagaggcgttctcgatcggaagctataacagtaaggaaaagatggcgatcattcatattgaaaaggcaaatccggagatgcggggactttaccagatgatcaaccagcagttcctgatccatgaattcccggacgcggagatcgtaaaccgtgaggacgatatgggtcttccggggctcagacaggcaaagatgtcctatgtgccgatgggatttgcgagaaagtatcggattaagcagctcgattatcaggcaggaagcgcggagtaaactatgatacggtatttggagacagaagaaaagggaagatgtctggatctctggagagaggcattcccggaagattccacggaattttgtgattattattttaaggaaaagatgaaggacaaccgggtccttgtacgggaggaaaacggtgagatcgtgtctatgatccaccggaatccgtaccggatctatatgcggggaaatgaggcggtctgtgattacattgtcggtgtctcaacgctggtttctgagcgccacaagggatatatgagaagtctcatgctggcgatgctgcgggatatgcaggaagagcgcatgccgtttacctttctgatgcctgcaagggaatccctgtaccgcccgtatgatttccggtatatttatgatcagccgcgctgggtcctcagatataatccccatatccacaaggagccatgtgatctgaagacacttggggcagatcttgcggaatggcagacggcgtggttaaagagacaatatgaggtctttgcgatccgtgatgaggcatatttacagcggatggagaaagaacttgccagcgagaacggaacctgcacactgctctacgatgatgactggtttatcggaatgcagagcgagtggggcttaaaggagcgggagatgcgatacctctataccggagagcactaccggagtgaggcggggcggaaaccggcgatcatggcgaggatcgtctgcatgccggagtttgtgacaaatatccacctctcagaagactgccctcaggacgaggtgacagtggagatcgggatcaacgacctcttcgttcctcagaatcagggggcgtggctatggcatctgacgaagtatggttccaggatgacgcaggaatccaggtttatcgcgaaaggcaagatggaggtcctgacgatctcggaactcacggagtggttgttcggataccggatgccggctcaggtaaagaagatcccatatggggaatttatcgagccgttccatggagtgttcctggacgaagtcgtgtgataccggccggagcttttgcaaagcaggacacagccggatatgtgaaattgtgaacggttgattgagaatacttttataataggaaggagaagatctgtcatgacagagcgggaaacattaaaaaaatggctggatgaaagcagcaatattgtatttttcggtggggccggtgtgtccacggagagccatattccggatttcaggagtacagacggactgtacaaccaggaatacgattatccgccggagacgatcctcagccattccttctatatgagaaagccggaagaattttaccggttctaccggaataagatgctgttcccgaacgcggagccgaaccgggcgcacaaagcgttggcaaagctcgagaagatgggaaagctgaaggcagtcgtaacgcagaatatcgacggactccatcagaaggcgggaagcaaagaagttctggaacttcacggttctgtcctcagaaatcactgcacccgctgcggaaaattttacggtctggatgcgatcttaaattccacaggtgtgccgaaatgtacctgcggaggaacaatcaagccggatgttgtgctctatgaagagggactggattcggagacgatcgaaaagtctgtaaattatatcgcaaatgcggatgttctgattatcggaggaacttccctgactgtatatccggcggcaggactgattgattattacagaggacataagctgatcctgatcaacaagtcagtgacgccgatggacagccgcgccgaccttgtgatcagcggaccgatcggggaagtgctcggggatgcagtcggagtctgagtatggaaatcgggtatacaaaaaataaaggacctgaaaacagggactgcaggtgtttatgatggaatagaaaaagccggaaacatacataagggattcatccgatgaaaggaaaagatatggtccggcaggagacggggagaagacagaatgtatcaggcagcagaagatcgttatgatttgatggaatataagcgctgtggaagaagcgggttaaaactcccgcggatcgcgctgggactgtggcagaattttggactggagaagacgatcgcagaccaggaggagattctgtgtcatgcgtttgactgcgggatcacacactttgacctcgcgaataactatggtcatccggcaaatggacttgcggagaaaaactttggccaggcgttgaaggactgcctcggtacataccgcgatgagcttgtgatctccacaaaagccggctatgatatgtggccgggcccgtatggcaactgggggtccagaaagtatctgatggcgagtcttgaccagagcctgaaacgcatgggactcgattatgtggatattttttaccaccacagaccggatccggagacgcctcttgaggagacgatgggtgcgctcagcgatattgtccgcagcggaaaagcactttatgtcggactttccaactataaagaggaagagacgagaagagcggtaaagatcttaaaggaaaatggaaccccgtgtctgatccatcagccgcgctacaatctgctggaacgctgggtggaggacggactgctgtctgcacttgatgagaacggcgtcggctgtatctgcttttccccgctggcgcagggtgcgctgacggataaatatctgaaggggatcccggcggactcccgcgcttcgcgtgcaggaacgaccgtcgcacagagatacctttcggatgaacaattagaaaaaatcaaacaattaaatcaatttgctgcagagcgtggtcagacactggcgcagatggcgatctcatggatcttacgccgtccggaggtgacgacggtcctggtcggagcgagccgggtttcccagctggacaacagtcttgcggcgttaaaaaatacagctttctccgaggatgagctgaagaggattgacgaaattctggcataggctgctggtcgttacttttcacgagtaggaattttctgaactgaaaattccgtatgataccgttttggtcgcggattttgccgattcggaaaaaagataggagacagaatgatggtatatgaggtaggagatattgtaaaattaaagaaaccgcatccgtgcggcagtcaggagtgggagatcctgcgtgtgggcgcggacttccgcctgaaatgtatgggctgtggccacatggtgatgattacgagacgattggtggagaaaaacaccagaggactccggaaaccggacgggacggaagtgaagtaaatggagactggaagagaaacactaaaacagcaggcataccggatcataaaaaataagatcttatattgcgaatatgccccaaatgaggtcctgaatgaagaattactgcttcaggatacgggatatagccgggcgccgattcgagacgctctgggccggctggaacaggaacatcttctggtgatcatgcctaaaaagggaattcgcatctcggatgtgaatatgaatgatatcagttctgtgtttgaaatgcgatgcatggtagaaccatatgtgatccggatgtatggaaaccgtctggataaggaaaaactgagggaatataagaaaaagttcgaaactgatattacgccggagaaagttatggatgcggcgaaagaaaaacgattgatcgaaatgtttactctggatgatgaattccatcaatatattgttcggaacagtcctaatccatatatgtggatgtcgatggagctgatctataatcagaatacccgtcttcgcgttcttacaagtcttgacctgaatcgattgatgcagtcaaaaccggaacatgcggagattattgatgctcttcttgaagatcgatatgaagatgctgcagataagatgaaaaatcatttaagaaaagcaaaacaaggatctcttgacacgtttgcgtcatatggagactggctccggaagaaagagcaggatcctatcggattcagaccataagaaatattttttgagacaaatcagaaatgaaagcgactgctgatcggaatatacgatcgtggtcgctttttgcttgactgcatttgttttgtgcatatcgccaaatatgtagacgaaaaatatgtaaatatgtcaaattgacaaatacaaaatgtgagagtatgatgaaattatctgatacatgtaacagaaagacgacctgaaggagttctgacgatgagcaaaatggaagatgaaatgacagcgtttcagattgatgagcgggataatgtggcaacggctctgaaagtgctggaaccggggaccgtaagacttcttggcgacagccgggaaaaaaagctttcagtcagagaagagatccctgcgggacataaggtggcattgacagatattgtggctggagaaaatatcgtaaaatatggggttgtgatcggtcgtgcaacgaaagatatccgtcaggggacgtgggttcatctgcatgtcatgtgcagcatttatgaccagcggtccagccaccttgatgtgcatacaggagcgccgaaagatacacgctatgaataatggagaacggacatgaatcacacagaaattttctggatgggctataagagaaaagacggcagaaaagggatcagaaatcgtgtacttgtgatctatacagtaaaatgtgcagagcatgttgcaaggaaaatcgtggatgaagtccatcatccggaagtggaacttttaggatttgatggttgcacggataatcagtatgctgtaaatatgctgatcagtctgatccgtcatccaaatgtaggtgcggtgcttacggttggactcggatgcgaatatgttcagccggaatggctggaaaagatcgcacttcaggaagagaaaatttcatcctggatccggatccaggatgaaggaggaacggttccgtcgatcaaaaaaggagtcgcctgggttcgtgaggcgctgaaagagctggagcatactccgagagtgcagatgacgctgcaggatctggtaatcggagcagaatgcggcggaagtgattatacgagcggacttgccggaaatgttgtagtcggccgcctttttgatcaacttgtaaaagccggaggtaccgcgatctttgaggagatcgttgaggcagtcggccttgactggctgctgacatcccgtgcggcatctgagaccgcgaaagaggaaatccagtatacatacgacaaggcactggagtattgtaaatccgtgcgccagtattcggtgagtcccggaaactttgccggcggtctttcgacgatcgaagaaaagagtatgggagcggtgatcaaaagcggttccagtccgatcgagggagtgatcaaagtctcgtgcccgccgaaaagacatggcctttggcttttggattcgacaccggatccctattggatgcagtttgggatcacaaatccgaatgactcggaaggtctgatggatctgatcagctgcggcgctcacattgtctttttagttacaggaagaggaaatgttgttggcagcgcaataagtccatgcatcaagatcacgggaaaccgggagacattccgacgaatgaatggagatatggactttgacgccagtcctgttctgtacggagaatgtacacaggatgaacaggcggaccggctgatggattatgtggtacaggtagcaaagggaaatctatctaaaggtgaagaattgggacatcgggaatactttgtgccatataagtatcaggaaaaagaagttgcatttcgaaaatgtgaaatgacagaaatataggggatctggaggaaatcatggcagcttttacagaacagcagaaaacagaattttctatgcagaaatggtatgatctttccggaaaaacagcagttgtgacgggaggaatcaccggtctgggacttgcgatcacaagatgtctggtcagtgccggtgcgaaagtgatcgctttgagccggacagatgagaagaagggaaatgagatcctgaaggaatttggcggaaaagcagttttctaccagtttgatatcacagatacggatcatgcacaggaaatcgcagacagaattcagaaagaacagggaccggttgatattctggtgaataatgccggaaatcactgcaagaaatatatttgggatatgagcgtggaggactataaaaatgtcctggatgttcatcttgtcggtgcatttgcattgacaaaggcctttatcccgcagatgaaggaacggggctggggaagaattattttccaggccagcatgacaagctatattggacagccgcaggtatgtggctattctactgcaaaagcaggatatcttggtctgatccataccttgacagcggaggtggcggaatacgggatcacagtgaatgcgatcgcacctggctggatcgatactccgatgttccacaaagccgtggacaatgatccgccgcgtctcgcgaagatcctggggcgtattccggcaaaaagtgttggagatccgatggatgtcggtatgtgcgcagcattcctttgcagtgatgcggcgagatatatttccggtacatgtattccggttgacggcggggcactgatcggattctaagatgatttgcccctgtaacatatcaagaaaaggagaagaagagatgaaactgaagaaaatcacagcactcacaatggcaggaagtatggcagcactcagtctgaccgcatgcggcggcggaacatctacaaccgcaacaacagctgcagcggcagcagagacaaccgcagcggcagcagatgcaacaactgcagcagagacctccaattcggatgcaattgttctccaggtcgcatttgagaactctatttccgagccgatcggacagggtatcgtaaaagcacaggaacttctgaaggaaaaatccggcggaacgatggaaatccagatctatccggattcacagctgggcgataagtcttccctgatcgactccatgttgttgggtgaaaatgtttgtaccgtagcagatggtgcattctatgcagattacggggttccggatttcggtatcgtatttggaccgttcctctttgattcctgggatcagtgctggacattgatcgaatccgactggtacaaagagcagtgcgataagctggaagaaaaaggtctgaagctggttgcctccaactggatctatggagagcgtcatactctgacaactgttccggtcaataccgtcgatgatttaaagggacttaagatccgtgtaccatccaacgaaattcagtccaagggttttgatgttttaggagcaacttccacaggtatggcacttggcgatgtttatcaggctcttcagacaaagacgatcgatggtgcggagaacccgcttgcaactctgtacggaagaaaacttcacgaagttgctaagtatttaatccttgatggacatgtaaagaacttcacaacatgggttgtatctgcagattggttccatggtctgacggatgaacagcagggctgggttctcgattccttcaaggaagcaggagaatacaataatgaagttcagcaggcagcggatgcagattatctccagaagatgaaagatgagggagtaaccgttgtagacccgtccgaggacgtattaaaggcattcaaggagaaagcacagccgttctacgatttaggatctgagtttggctggagcgatggcctttacgatacagtcaagaaggctatgggcgctgaataaaaatatcgatagcaaggggaaactcgcaaagcgtgttttcacttgttctgagcggaaaaagaaggagaatccggaattaccccggatcctccttctttgtttcttattttaacaaatctcggattttttcagccgcttcgcctgccgtacccgtgtttttaatatcaaatttcgcatatttgcggtaaagatcacggcgaatgaggtacatatcctgaacttctttttttgtatgattcttaaacaacggccgctccggatgctgtgcaagattggaatagcagtcctcaaatgggcggtcaatgtagaagatcattccgtttttggcgagaatctcgccattccggtcaaaggtcagcatgccgccgccggtggagacgacggatggaccaagtgtgcatacccggcgggcgatctcgtgttcataatcgcggaaaagtgtttcgccgcctttggcaaagatttccgggatcgtcatctgataatgttcgatcagcatctggtcagtatcgtaaaatggaagtccaagacgttcggagagcagctttccgatggtggtctttccgctgcttgtaaagccgcataaaataatgggacagttttttgtcatatcgaatcctttcattatataagaacatatcacttcagcagatctcataatttccaaaccgctcatgtgaaaatgcagattgaccgtaaaatcagtaaaaacacatataaaataccataaaaacagaggaaacgcaacttatgagtcagcactgcagcagctattccgccttcagaagtggatgatgtcccagaaactgctgaagagccagattcccggacgctttcttccaggcggcgatgatctcgacgacttcctcctcgccgatcaacggaataaagacgaggttatcggcgttcgtcagtttctgagtgacgtaagccgggatgatcgagatcccctcttcggcggacaccatcatgaggatactctcgacgtcgttggaccggaaaaagatatccgggtggtagccggctcgctcgtacatctcgtaaaaacgcagatcactgacggaatcgccggtgctggatggggtcataaacaggagacgttccccgtgaagctccgtgcggcgcagagatgaccgcccggcaaacggatggctgccgtagaccgcaaccatgagcggactccgctcgatcagccggtattcgatggaatcattctttacaagctcggtactgtcccatgtaaaaataatatcgtattcatccttcaggagccctgcggcgagaagatctgtgttccgacggtagcaggagacgagaatattcggatatttattatggaagaaacgcagcgagctggaaaaattgctccgctcaaaccctttcgtgtatccgatgcggagtgtaccgaccatgccggtagaaacctcctggatcctgtttaccgcctggtcgatccggtcgaggatggatctggcatcgttcaaaaaggcgcttcctgcgggagtcagtgtgatcggacggcttgtcctgtcgaagagcgggacgccgagactgtcctccagggcatggatctgctgggtgatcgcggtctgcgtaatataaaactgatcggctgctttcgtgaagctgcggcactcggcggcagccacgaaatatcggagctggtttgtattcataacggaaacttcctctcaaaaaaatctgtatcgcctgaagaatatacataaattccacatgtttgatgaaaatgatcgatgatttctacatagcataagttttccttatgataccatacaaaaagcgcggttgcaaatccttttatcgggcagtatcataaggttactgacgtcggggctgcggattttgccgattcgggctgcgaagcatcatcggcgtcaagaacccctgacggcataaaagccgacaggagatggaaaaggggagttatatcatgaaacgagaaaattttggttcgcgcctgggatttttactggtgagcgcgggctgcgcgatcggaatcggaaacgtatggcggttcccgtatgtggcgggacagaacggcggcggagtattcgtcctgttctatctgctgtttttactctgtatgggcgttccggtccttacaatggaacttgcggttggtcgtgcgggacgaaagagtgctgtcggtgcttacaaggcacttgaaaagccgggaagccggtggcatgtacacggatggttctgtatgatcggctgttatcttctgatgatgtattacacgacggtttccggctggatgctcagctactttgtaaagtttgcgacaggaactttcaccggaatggatgcagaccaggtggcaggagtatttggggaaatgctcggcaatcccggcgagatgggtctctggatggcagtaacagtcattgccggattctttatctgcagcaggggacttcagaacggacttgaaaagatcacaaaatggatgatggcagctctgctcgtcctgatccttgtgctggccggacacagcctgatccttccgggagcgaaagagggactcagcttctaccttcttccggatattaagcgtgcggcggacgtcggactcggctccgtgatcatgggcgccatgaaccagtcattctttacattgagtcttggcatcgcggcgatggagatctttggaagttatatgtccgaggaccacacacttgcgggcgaagcggtccggatctgcggtctcgacacgctggtagcgctttccgccggactcattatcttcccggcctgcttttcattcggggtacagccggatgcaggtccgcagctgatcttcatcactctgccgaatgtgtttgccaacatggcaggcggacggatatggggaatgctgttcttcttattcatgtcggcggcgagcttttccacagtcattgctgtgtttgagaacctgatctccagctgcatggacaactttggatggagcagaaagaaagcttctatattaaattgtatttttgtattgatcgcaagcctgccttgcgtattcggatataatgtgtggagcagtctgcacattatcggtgcgagagatgtcctggactctgaggatttcctggtcagcaacctgctccttccgctgggatctctggtctatcttctgttctgcgtgagcaagtggggctggggatacgataagtatcttgcggaagcgaaccatggaacgggacttaagatgccggaagcgaagtgggtaaagatctatttccgctatattctcccggtcctgatcctggtgatcctgatccagggactggcgtaagacttaacaatttaatgtgatatacgcataaaaactttaaagtggaaaagtttttgtattgaatctgaaaaaacagtgtgttataatgagcacaaaagaaaaataagcagctgcttgacagagcttcatttttcttttgccattaacaaacaaaaagcctgtaaattcaggcagtgagtgcgtcagcacggggttatgaatttgatggcggaagcaaaaactaaaaaagaggagagtaccacaatgaaaaaaatgatcgcactgggcatggcagcagctatgatgtgcatgtccctgactgcatgcagcgtctcaacatcttccaagactgagacaaccgcagcagcagaaacaacagcagcagacacaaccgcagaggcagccggcgatctcgttgcaactgctgattatccgacaaagccgatcacaatgatcatcccttacggcgcaggcggaacaaccgatacatggggcagaaagctggcagttctgcttgagaagtatttaggacagccgatcacggttaccaaccagggcggtgcatccggatccatcggcagccagttcgtaaaagagcagccgtccgacggttacacacttcttgtttgtgcagagacaatgggaacctacagaaccatgaacatctgtgaccttggatatgatgacttcaccgttatctccccgttagtcggcgatccgaaggttctcgtagttggcaaagattccaagtacaacacactggaagagcttcttgacgatatcaaggcaaacccgggcaagatcacaatgtcccactccggtcctggaggaagcggacacaaccagggtctcgtattaaagaagctcggctatgaagtagcaatgacaagctttgattccggtaatgacgcacttctcggagttatcggcggacaggttgactttacaaacccgaacatctccacactcggcggctatatcgagagcggcgacgtaaaaccgttagcagtattctctgacaagagaatggacgcttacccggatatcccggcattcacagagacagttccggaagctgagaagtacttaaatatcccgtacacacttctttccttcgttgtaaacaacgatactccgcaggaggttgtcgatgtattaaaggcagcatcccagaaagtatttgctgatccggagtggacagagttcgtagagcagaatgcagctgatccggtatacaaagagtatacagatgacgcttccatccaggcattctacgacaactggaaatctgttatctgctggttacagtatgacaacggtgttgctgaaaagagtccggaagagttcggcatcaagagaattggagaataatcaatgaagaataaaattcattcgctgatcgtcgaaggaattgtattttgcgggagcggccttgtgctgctctcgtattctctttcatcctacgcaaagggatttaacaagagctgggtgcagtccccgtatctgtttccgctcatcgtggcgcttgccatgatcggtctatccttatggatcgtcggagagggagttacggcaatgaaaaaagaagccgcggttccgaatgacaagaaggtgtcaaaagcagaaaaaacagaaaagcggcgctgggtcgtgatcgcgctgatcctctgtgtgctctactatgcagcacttgcttttataaaagttccgtatgtgaccatcggaattttatcttttgcgtacacattttcaacatttgaagttgtgaccatcgtgttcctgatcgccatgatgaccttcatgggcgtcagaaagatcccggttcttgtatttgtaccgatcggaactacattatttttaagccttgcattccgcacattcttacatgtgcttctgccatagaaaggagaaagggaaaatgttacagatgctatccgtggtcgacccgcggtttatcctcatggttctccttggttctgtggctggtctgttcgtaggcgcgatcccgggactttccgtgtccatggcgacagcgcttcttgtatccattacttatacctgggaacattcagacgcccttgcgatgatcatgggcgtatatgtagtcggagtattctccggcgcggtatcggcgatcctgatcaacattccgggcgctccgtcctctgttgtaacaacgcttgacggatatccgatgtcgaaaaagggacagtcctacaaagcgctgtttaccgcaacgatctattccttcatcggaagcttatttggacttctggcactcggacttctcgcagagccggtctccagagttgcgatcaaatttacaaaaatggactatttcctgttagctctgttcggacttgcgacggtcggatccgtcagcacgaagaactatgcgaagggcctgatcagtgttatgatcggtctcgtgatcagcatgatcggacttgacccgttaatgggaacaaaacgtctgaccttcgggatccagaaccttaccggcggcgtcagcacggtaccggcactcgtcggcttctttggattcgcggaagttctctctgttgtatacaacatgaagcaggagcagaacgtccttgcaatggaaaagacgaaagtcagcttgaaagagatcttaaagagctggaaactttccttatatacatcgacgatcggtcttttagtcggagctcttccgggagccggcggaccggtggcatcctttatcgcctataatgaggcaaaacgcctcgtgaaagatccggaggttccgttcggagaaggcgcggtcgaaggaatcgtggcgagtgagtcctccaacaacgcctgcatcggcggtgcgctgatcccgatgctgacacttgcggttccgggcgatgcggtcacggcgatcattctttctgtattctatgttcatggtttacagccgggaccgttattcatcacacagaataaggagtcattctactcgatcgtgattgccggaattatcgcatgctttgcacttttgcttttaggacttttagtcgcaccgaaaatctgtaaggtcatcacgatcccgaagaacatcatgatcccggtggtaacgagtctctgcgtgatcggttcctttgcgtgcaacaaccgcctgtttgatgtcggactgatgttcttcttcggactcatgggatttgcaatgcgccggttcgattatccggtcgctccgctgatcctcgcgatggtgcttggaaagatgatggattcgaacttccgtcaggctgtatcgctcgcgtcctcatcggacaacccgttcatggcgatgttcggtcatccgatcacgatcgtattgtccatctgtacattattcgtactgcttggaaatattccgtggacgaagccgtatatcgataagttaaaagggatcttttccagaaagaagacggcgtagctgttacagtgtgcgggcggagtgccagtgtactgtaacaaaataataaaaagagcaggaaaacaggcaaaaagtgcttgcatttcctgctcttttttgataagattattacctgtgacatgtaaaaaatccttgctcctgatactgaaaatcgggggccggaagaccagaaggaggtttaagaaactatgaacaaatacgagttagcagttgttcttagcgcaaaacttgaggatgacgaaagagcagccgcacttgaaaaggtgaaaggctatatcacacgtttcggcggcaatgtcgttgatgtggacgaatggggcaagaagagacttgcatatgagatccagaagagcaaagagggattctactacttcatccacttcgagggcgaggcaaactgcccgaacgaggtagaggctcatatccgtattatggagccggttgtccgttatctttgcgtaagacaggacgcttaataaagaaagagtgagaatatgaacagagttatccttatgggtagattaaccagagacccggaagtacgctattcccagggcgagcgctctatggcgatcgcaagatatacacttgcagttgacagaagaggcagaagaaaccaggacggcgatcagggccagacggccgattttatcaacatcgtagcttttgaccgcgcaggtgagttcgcggagaaatatttccgccagggcatgcgtgtactggtttccggaagaatccagaccggaagctatgtaaataaggatggccagaaggtctatacaacggatatcattgtagatgaccaggaattcgctgacagtaagggtcagggcggcgacaacagcagctttggcggcggaaacagctacggcggcggtaatcgcggcggctaccagcaggcaacaagacctgctccgtccagtgcgatcggcgatggatttatgaatattccggatggagtcgaggacgaaggacttccattcaactaaatatcagtctgaggcaatacagtgcgttactcctaattcgctgtgagtagactgagtttgcacgtgaccggacaagcgttggacggttacagacaacgaaactaacaggaggtaatttaaaatggcattcaataaaggtgacaagtccgattcttccagagtaagaagaggcggcatgcatagaagaaaaaaagtttgcgtattctgcggcgataagaacggcgaaatcgattacaaggacgtaaacaagttaaagagatatgtatccgagagaggaaaaatcctcccgagaagaatcacaggcaactgcgcaaagcaccagagagctttaacagtagctatcaagagagcacgtcatatcgctcttatgccgtacacatgtgaataattccttagaataaggattttcactgataaagtaaggttttatctaattaatttgaagcatcattcgaggattccatatgagagatcatgtgggatccttttttgcgtagcagaaatttcctgttacacaaaaaggcactacatgccgatgatgtgcactcgcgcgaagatcgcgctgaacagatggagttatgacaggtattaacattaaatcgaaataagaaaagaaatttgtttttcctgaaagctggaaaaatacaagaagctgaatcaaaagggcttttaaggatatttatgtctgaaaattgacttttttgctgacaccctttatactacatagaggaaaagtcaaaaaagaaacagcaatgtggaagggcagtaaaactattcaagatgtaattcaaagatccagaacgttattctggacctttttttacaagcttctgtatcaacgttgtgaagaggcaacaagttgctgtgctgttcccacattggtttgcggttcgtgaaaaggcatcgaaaaggagaagaaagggggagccgaaaatttcaaccgcccgttttgacttgttctgaataagaaaataaagcccaccgatatcaggtggcggaatggagcatttcaaatgattcatgatggatttatctatctggccactttaatgctgttagcagcaattctggtcaatcttcctgtgtacctgcggggaaaaggcgcacagaccttttttaaatttgcaccgccgatcgttctgatctatttaggcatgatgcttttatgtaccatgaaagtatgggatctgcaggatacgtcagacatttacgtagcgatcaaaaatccgttactctacgcaatgctgtttttaatgctgctgcgttgtgatctgaaaaagatcattaaattaggaccgaaaatgctgatcggtttcttctcagcgagtatttcaatcggtgttggttttgtagtaagctatggcattttccataaattactgggcccggaaagctggaaagcacttgcagcactgtgcggaagctggttaggaggcggcagtaatatgctggcgattcaggcaattctggatgtaagtgaagaaagtctggcatattctctggtaatggattcggtttgtgcagtaatctatgttatgttccttctgtgggtgatcaacttctctaaggaattcaacgcctggacaaaggcagatgtacgtctgatcgatgaagtaggagcatctctggaaaaagaggcaagagaggacaagagacctcttacctggaaaaacatgcttcttttaatcggcgtatccttctttatatcctctctgtccaaggatgccggtgttatggttgcatccgttctgcctgtttttgataaggcaacctggacagttcttcttgtaacagctacaggtctgatcgtagcaatgactccttttggaaagattaagggaacggaagaagtttccaatatcatgctttacattgtcatcgcgatgatcgcttccagagcagatatttctgctatgggaaatgcaccggtatggctggctgccggattcctgatcctgctgatccatatagcggttatggtaatccttgcaaagctgatccgactggatatctttacctgtgcggttgcttctctggcaaatgtcggaggaactgcgacagcgccggtacttgcaggtgcatacagcagcgcgctggttccgatcggtatcctgatggctcttctcggcaatattattggaacgccgggcggcgcatttgtcggatacttaatgagcctgatcgggtagagaacaacaattgaaaaacgggtaatacaagaactccgcacgagaaactgtgcggagtttcttttaaaactccatcacaagccccgcatgcagcttgtgaacggattctcctaaggcctctttcaggagatcaaaggcatgatctccggtacagtggccggtgtagatttcagaaataccggtggagcggatcccttcggcgagggcaaggatctctgcaccggtcttattgtagagatggaagccgccgatcagggcttttacttttttatccgggaaagtcgcggtgatctcgcggataatcgtatcggcgccgccgtgggaacagctgttgaagatcacaaggccgtccggggtgtcgaagacgagactctgttcgtgggagaaggaatccggcttccagtgccgtttttccttcaggtacatgtgctcccggatcccttttttttccagtcccggagtcttatgcgggatcagataaaccccgtcccacggtgaaaagtccccggaaacgagcttgatccggtccggatacttttttaacatgccctttggaataccgatgtatttcttataattccagacacctttgcagcagttttctttggtggtttccctaaaatagaacggtgcggacgaatttaccttgaaaaattccgggattccgtctgcatggtcatagtgcgcgtgggagagaactccgaaatccacgtttttcatgttcagtccaagcacatcagcattcttcagaaaaagcccggatgccccggcatcgagaaggatatgttttccatgatattcaatgaaaacggataatccccattcacagccgagattttcggcggggatgttgtcgctgagtacggttgctttcataaatgaaaatcctttcgtaaagtattgattgatagttgccttataactttatttttttcattaaacacaaatgcgaacttcctgcaggaaagaggttttgtataacttcgcggctttacaaatttcttttgcaatctctttcttatcgatcgttttcctcattagatttttcctatcaacggtatttgggtaacaaaaacgccggacaaccaaagttatccgacgcattttttatgattgcgtgttttatgctggctgtcagcctcgatgccttgccgagtatcataaagtgctggtaattaccctccccagccggagtacagctttaatgtgtcgccacacggaaacctttctggttcatttatattatacttaaatcccgtcctcttatcaactgattttgaaaatatccaagattttaacggaaatagcatggaaaagtgttacaggaaaatcgcagaaagacctcttgaatatttaaagaagagatgttatattatagataagagaagtgccaccgatagacggcttggccctcgaaaatatggattaaaaaataaccgctagttttgcgaggactgggcggttatttttttgcgtttttttcgatgtctctgccaagtgaatatcctgccttgaagcaagttgctccgaagctcaggattgcaagtacaatacctaagatttccatatggcatcaccctcctctcactatgtatcagagggtcacgcatgccctctgcgaagagggccaaaccgcctaccgttatggtggcacctatattattctatcacaatttctttgatctataaagtctattttacgctactggtggttttagaagccgtgccactgctatacacgtcaggaatttcattggctgcagtgcaacgtccgcgcaatgtccgcgcaacgtccgcgcaatgtccgccccaagcggatcatggacaaatgcctgtatttatggtatactatccccaaagtcggttctgatacatggagaaattctgcccgaatttctccatgcataaaaaggcactaacgtgccaaatgcgcactcgcgcaagaggagtctatcgcaagcgactgcgctcggcgcgagaatgtgccaaggcacattctttttatggtcttgctatgcccatttttaaagggcggcggataggagataagaatgaaagatgataaaaaggtcagccatattctgcagctttaccttcagtggccggtatttttaacggcactggtaattcttgcgggagctgcggtcaacctgatctcacgcaaggcgggattcgtgatgcttgtatttacggtgatctacgcggcgtgtgccggaaccctgtatatgtacggaaagaagcgggcccttggcagtctggtgtcctttgcgtcggcgtacagctggagtcagaaacagcttctggcgtcactggagctgccctacgcggtcgcggatacggatggtaagatcctttggatgaaccgcgccttcgaggcggtgaccaaagaagagaagagcgcagggaaaagcctgacaatgcttttcaaggagatcacagtggaatctctcgagaagatggaaaatgcgatggaagtccatgtgatctatggggaatcgaaataccgcgtgagtatgaaacgtgtgacgatccgcccggatgagcttgcttccggaatcccggagaagcagacggagcagcagatccttgcagtatatctctatgatgagacagagctctataactacaagcaggcgatcacagaccagaagatggtcgcaggcctgatctatctggacaactatgatgaggcattggagagtgtcgaggaagtccgcagatcgctcttaacggccctgatcgaccgaaagatcaacaagtacatttcggcggtcaacggtatcgtaaagaaactggagaaggacaagtatttcttcgcgatcaagcagtgctatatgccgcgtctggaaaaagagcggtttggactgcttgaggaggtaaagaccgtcaatatcggaaacgagatggcggtgacactaagtatcggtatcggaacgaatggcgatacctacagccagaactatgagtatgcccgtacagcgatcgatatggctctcggccgtggcggtgatcaggcggtagtaaaatgcggccagaagatccagtattacggcggaaaggcccagcagttagagaagacgacccgtgtcaaggcccgcgtcaaagcccatgccctcagagagcttcttgagacaaaggactgtcttctgatcatgggacataagatcggagatatcgactgcttcggcgcggcgatcggaatgtaccggatcgcgtctgccctgaacaaaaaagcacatatcgtgatcaatgaagtgacctcctcggtgcgtccgatgatggaacgctttgagaccggcgattatccgaaggacctgttcctcacgggaagtgaggccgcagatatcgtggataacaatacggctcttgttgttgttgacgtcaaccgcccgagtatcacagaagaaccggaccttttaaaacttgtgaagacgatcgttgtcatcgatcaccaccgtcagtccagcgagatcatcacaaacgcgactctgtcctatgtagagccttatgcgtcatctgcctgtgagctggttgcggagattttacagtatgttgctgacagtatccggatcaaatccccggaggcggacgctatgtatgcgggaatcgtgatcgatacgaacaactttacaaatcaggcgggtgtccgcacctttgaggcggcggcgttccttagaagaaacggagcggacgtgacgagagtacggaagctgttccgtgacagtatggaggactacaaggcgagagccgaggcagtccgtcaggcagaggtctataagaaatgctttgccattagcgtgtgcccggcagagggcgtagagagcccgacagtagtaggcgcacaggctgcaaacgagcttcttgacattgtgggaatgaaggcatctgtcgttcttaccccatatgaaggcaagatctatatcagcgcgagatcgatcgacgaggtcaatgtccaggtcatgatggaaaagctgggcggaggcggacacagaacgatcgcaggtgcgcagctcccgggtgttaccgttgaggaggccaaggagaaggtaaaaggcgtcattgatatgatgctggagaaaggagaaatttaagatggaagttgtattattagaggatgtgaaggcacttggcaaaaaaggccaggttgtaaaggtaaatgacggatatgcgagaaactttatccttccgaaaaaacttggtgttgaggcgacatccaagaacttaaatgacttaaaacttcagaaagcaaatgcggaaaagattgccgctgagcagctcgcagaggcaaaaaagcttgcggaggagatcgacaagatgtccgttaccgtatcgatcaaagccggtgaaggcggacgtgcgtttggctctgtttccacgaaagaaatcgctaaagcagcgaaagatcagttaaagctcgatatcgacaagaagaagatggtacttccggagccgatcaagagcatcggaagctttgaggtcccgatcaagcttcacaaagaagtaacagcgagactcagtgtaaaagttgttgaagcgtagaaaagatggaagaagcgttagtaaagagagtcctgccgcacagtattgaggcggagcagtcggtgatcggttcgatgttaatggaccgggatgcgatcatcgcggcgtcggagatcgtggttgcggatgatttttatcagaaacagtacgggatcatgttcgataccatggtggagctgttcaatgaaggaaaaccggtagacctggtcacacttcaggacagactgaaggagaaggatgttccgccggaggtatgcagtctggactttgtccgcgatattcttgcgactgttccgacctcggtaaatgtccggtcctatgcgacgatcgttcatgaaaaagcagttctccgccgtctgatcaggatcaacgaggagattgcgaacaactgctatgcaggaaaggacagcctggagacgatcttggccgacacggaaaaacagatctttaatcttctggagagccgtgcgtccggagattttgtaccgatccgccaggttgcgttaaatgttctcgacaagatcgagcaggcaacccggtcgaaatccacggtaacgggtcttccgaccggatttatcgatctggattaccggatgtccggacttcagccgtcggatctgatcctgatcgcggcccgaccgtctatgggtaagactgcattcgtgttaaacattacggattatatcgcggtccgcagacagaagacctgcctgatcttcagcctggagatgtcgaaggaacagctggtaaaccgtatgctttccatggagtccaatgtggattcccagaaactccgtaccggtactctgacggatgctgactgggatgctgtcgtggaaggaatcgggacgatcggaagttccaaacttgtcattgatgatacacctggtatctccatcatggagctgcgttccaaatgccggaaggtcaaactggaacatggtctcgatctggtcatgatcgactatctgcagttaatgtcgggaagcggaaagaacggcgacaaccgccagcaggagatctccgagatttcaagatccctgaaggcgatcgccagggagctgagtgttccggtcatcgccctgtcccagctgtcgcgtgcctgtgagacgagaacagaccatcgtccgatgctttcggaccttcgagagtccggagctattgagcaggatgccgatgtagtcatgttcctgtaccgtgatgattactataataaagatacggataatccgaatacggcggaagtcattatcgctaaacagcgtaacggcccgatcggaacggtatatcttggatggaaaccggagctgacccggtttgtgaatattgcaaaagagcagcagtaacagattgctgtttgagcgcccgttttcaactgatcttcagatgaaaacgggcgcttttgtcatattgggacatgccttcacatatattattaacgatctggtaactggtttgcgtgcagagggcggtctgaaatatgctgcagaatcagaaggaacagagttgagaaatcgttacagtttgcggacagaaatctgatcagcagaaaattctgtatgatgctgtaatgggaaatcatgtgaaaggaagagaacagccatgtcagaaacacattatctgatctctgatgcctcgaaaaaggttgacgtggaatctcatgtacttcgctactgggaggaagaactggagatgaatatcccgcgcaacgagatgggacatcggtattatacggattttcatattcgtctttttaagcagatcaaggaattgaaggaaaaagggtatcagctcaaggcaattaaggcggcacttgcgaaaaccctggatgcggagggagaatcggtggcacctacagatattttagaggaggatgttgcgtcggcattgagagaatgcgcggaacaggagaagaagaatctggagaagatggatcctggggagatcacggagctcatgaaccgggagaaggcggaacagtttaaggatttcctcacccagatgatcggacaggccatcgaagagaacaatgaaaagctgagtcaggatatcagcaggatggtgaatgataaggtgctgaaggagatcgattatctgatgagggtagcggatgaacgggacgaagagcggtttcgccagctggacgagacgataagactctaccagaaggagagcagggggcgggcggaagctgcggcggcaaaggcgccgtttctgccatcactcttcagaaagaaaaagtttggacgcaatgcaaataaattgtgatgaggaagatccgcacagatcaaaaaagccgctgctcctttgggaacaacggcctttatgtattggtttgcgtttgtgatcaaccctcgttgattgcgcctgtcggacagacaccagcacaagtaccgcagctgatgcaagtatcagcgtcgattacgtactgtccatctccctgagaaatagcgtttaccggacattcaccagcacaagtaccgcagctaacgcagctatcgctaattacatatgccatgacaaaatacctcctttgtttatttctttcattctataataaacggtcaaattattcaaggggtaaatcatgaaaaaatgtacctaatgaggaacaaaaaaccagtaaatatgcggttagacagagataaccgcggttagttttgcaaaacctccttgccaagaaacgaaaaaagtattatactctcgatatgctggcatatatggctgtacgcttgttatgccagaaacaatcgtagaaaattgccctcggcagatttcgaaggtgaaaggaggatttatcatgcagatttcaaaagaaatgctcatcggtgagcttcttcaggttgatgaaaatatggctcagatcttaatgggcgctggaatgcactgcatcggatgcccgtcttctcagatggagtctctggaagaggcttgcatggttcacggaattccggtagagaaacttgtaagtgtgatcaacgaatatctggctcagaagcagcagtaatgtgtaactgatcgaaaacgatcggtctgctgactttggaaaatatcagagaaatgaaaaaggctgtgacaccgggaagatcttcccggatcacagccttttttgatcaacaggaaatttcgatggaacttcctgttaatcaaaaaggcactgagtgcctaagatgtttactcgtgcgaagatgtatagaaaatatttcacagagatcataagttctgaagtaccttcagtgcatctttttttacgatcacatcgtaatgctccgcatagtaggcgccggatgctgccgcatcgccttttaatcttgttccgtattcggagagggtattgcagacccggctgaaggacagctcatcgtcatcttccttcctgaggatcagataaaaaacgccattttccggattcttgtagagaacactgcttccgttaaaaacagcgccggtctgtcttgctgcctcgcagacaaggtcaagggaggagaactggtagatcctcgtaaactgtgccggatttgccggttccggttttttctgcggatcagttacagatgcagaggatggtgccggagtgttcacgtcttccggtttcaggatcccgctctgggtcaggatattgatcagaccgtcagcgccttccagtacctccgcagtgagatttccccatccattctcatcctcatcgtctgccggtgagaacttggaaaaacgggtgtcgagttcttcgggatcttccattttcgtgatgatcagcataacactttcgttcgccatagggatcgcttcgaccataagcgggatatcttccgcttcaaagccgacctcgtttgctgcgcgctggaccatttcgcggaaaaggctgcgcgccttttcgcttccataagccagttcgccgaggttcatattgcggacgctcagatcaaagttgctgagtgtgcagcggatctggttttcattgatacgttctattttcataggatcacttcctgtcttattactaatcaaagatcattgcggtcgatcggtctctggtaaaagggcaaaaaaccgcatttttacatctataatatactatatcctattcggcttttgcaatcatatgaggagaatttattaaaatttaatcagttttgacatctacaagatgatttaaaatgggagtatctatattagaataatcacaagaggttgtattgccgaaaggaggtgtgaagatttatcgaacgcgttctgtttggcaaatatcggttgtgcggagaattgggaaatggacggtccggtaccgtgtatctggcgtatcacgtagagctggaggaatatcgggcagtaaaagtcgttcccaagtccatagcggattatgatacttttagaaaagaagcactttttctgaaaacattgagacatccgggaatcccaatcgtctatgatgtggaagaagataccggatacagttatctgatcgaagaatatctggaaggcgaatctttatatgctctggtgaaacgcctgggcagcttgtcggttaagacggcagtggatcttggaatacagatctgccgtatcattcagttcatgaattcagcagaaaaccctattttatatttagacttgcagccaaaaaatctgctggtatgcaacggaatccttcggctaacggattttgatcacgcacaatacgcgtcagatgccgccgcatttggagaacggtatgggacaattggttttgccgcaccggaacagtataaaggagaacctttagactgcagaacggatgtatacgcgatcggtgcactgctttactttatgagtcatggagacgttcccgggagtattttggaaattataaacgaaccggaatacagaaaacttgaccggatcatccgcgggtgcatgaaagcggagaaagaggagcggtaccagagcgcggaagaactgcagaggactctgcaggaactgcaaaaccagataaaagagcaggcaatagaatctcgaatcgttgtttttaccggagcaggggcagggatcggaacgacccatgcagctctcggaatgtcttactttctgacccgaaacgggtgtccggctttatatcaggaagaatacgatacggatacggtccgcacacttgcgaaaaatatgggggtcaaggcggaccggaacggcgtatatcaaatcggatgcggaaacatccggccttattatggcgaagctgtgaagctgccatatctttattttccagtaatcataaaggacgcgggagtgatccggtcaggacgggaacttccggaagcagatttttatgttcttgtatgcgggggaaaatggtgggagatcgacaggactgtaaatgcggcaaaaatgctgaaaagccgtggaaaggtgatcttgctcttcaaccatatggagaaaaaagcacgtctgaaacttccaaaagttttatctgatattcattatttctttcttccgttcttttcgaatccatttaaagaagataaagctgccaacacctgttaccgggaattgtggaatgatggtacaggggggaccaggtggaaaagaaaaaaattattggcgggatacaggagaaacgatgcaggatgattgggatcgcgggcagcaatgtcggagtgggatgcacacatttttcaatcatgctggcaaactatctcacgggttatctcaggagaaaagcaatattgctggaatttaatgagtcaggagactttgaaagactcgagcaggtctgtacgggacagacgggacggaaaaatccatacaggatcctggatgcggattattataagcatgcagggacggagaatataaaggaggtgctgttggaaggatatgacgatatcctgatcgattttggatcggtcaaagacggtgaacatgaatcatactggagatgtgataagaaatttctggtgggttcttttacagagtggcagcaggaaagtttccgggaattcgagatggagaaaagagcgaagcagaaaaagagctggcagagtctcgcggtatttgggagcgaggagaccagaagagaattctcaagaagatatcggatcaatgcagaacggattccgttttcagcggatgctttctcggtcacggaggaatgcggagaattttttaaacggatcctgtgataagaagatggaaataaacaggcttgctgaatgcttacaaagcaacatgataaatgagatctgatcagtcaatgacgcagcattggggagaaacatgtcacagaaaataccttcttctgccgggcgcagatctgacctgaattcagatgcatttaacgtaattatttagtaggtctgcgcatctactgcgctgaccgtaagaaaacattggcttgaaagcaaaaatagcagaaatttactgacagtggattgaacagacgaagagcgacaacagggggaagatcgatgcgggatgacggaaagaccatgcgcaggatcaatgcgcgatatgaaaaagggaaaggtatatatgagtatggaaacagtaaatggaacgtatggatcagaagagcagaagatcgaggagatgactcgctacctgaacggacttaagaggtacacggaaaaagggatcccgatctacatggatggaaagctttccggtcagagagagtgggaaaagctgtttgaagtgcgtgaggacggaatgttctacatgggggattatgtgcaggcagaaggaggtggattaaaggagatccggtttgataaagtatatctgagcgaagcagatatttcagagacgagaaattccggacggagaagaagaacgagaagatagaaaaagtgttgccgctcgcagatggaaaaactgccggttccgggtgaggatcctggacaggcgcaaataacggaatacagattcaaaaaacaggggatcgttctgccggatggtccgtaagattgctgacggtaattcgttacaaaaagttaacagacagacatttcgcgttgtggtatactaaaactatccttaagatccggcaaagtatacgtccgtgtgtattttgccggatcatccgtaataaaataacgattcagcatgtatacggagagaggaagaaacagatgcggatctttgaagaatagcatgcggaaagagtgatgacaaatgaaaaaaatagttcctgtattgaccgctgtcagtttgatcatcctgatcgcagccggctttgtcggattccgggtactggagcggtatatgccgacgaaagagcgggcagatcttgcggaagtttatcatgtatccggggatgagacggcgatcatttataattatgaacagcaggagcagacaggaatctatgaaaatggtcagacttacctgcctatctcgtgggtaaatgaccatatcaatgagcgtttttactgggacagtatagaagatcttcttgtatatgcattgccggatcagattgtctatgccgatgcggagacaaagggctccaatggtgcgccgctgcttcttgtgaaggatgaagaagtctacctgactctcggtctgatcgcgaactacacggatgtgcagatccaggcctttgattccggtgatggaaaacgagtcctgatcaatgactggggggcgagaaatgtagcccgcgtgaagaaaaataccagtctgaggataaaaggcggggtcaagagcaagatcgtaacggatcttggcagggatgatacagtgacggtcatcgatacaatggaaaaatggtcgcgggtcgcatccccggacggaaatgtcgggtatgtagagaataagagactgtctgatatggaaagtcagaaaattttcgggaattttgaagcacctgtatacaagagcaccagtatgagtgggaagatcgttctcggatggcatcaggtgacgacccaggatggaaataatagctttgacagcgttgtgacaaagacaaaaggaatgaacgtgatctccccgacatggttttccctgacggataataatggaaattacaagtcgcttgcgagcaaagattatgtggcgaaagcccatgcaaaaggacttcaggtgtgggcactgatcgataatttcagcgcagatgttcagacagagacgctgctggcgtcgacttccacacggcgaaaactgatcgacagcctgatcgcggatgtaggaaaatatgatctggacggtctgaatcttgacttcgaaagcctgaaaaaagaagcaggtgtccattatattgaatttatccgtgaattgtcgatcccgtgcagacagaaagggatcatcctgtcggtagataactatgttccggccggatataacagtttttatgatctgagagaacaggggatcgtggcagattatgtgatcatgatgggatatgatgagcactttgcaggaggtgaggcgggttctgtatcttctatcaattatgtgaagaacgggattgccggaatgctggagaatgttccgagagaaaaactgataggcggagttccgttttatacgagactttggacagaagtcggagatggaacgattacgtccaaagcaatggggatcgcagaggaaaaaagatgggtggataataatcaggtggagctcacctggcaggcagatactgcccagtattatggcgaggtgcagacaagtgatggcgctcagttcctctggatggaagaggagcggtctctgaaagagaagatgaacgtgatccgacagaatgatctggcaggagtcgcatgctggaaacttggatttgaagattccgctgcatgggattcaatccagtggaactgagaaactttcggaggatcacacggatcctaccaggttaccatctcatccagcagaagtttttgttctttactggaacgtgtgaggtagatacgggtggtctcaatgctttcatgtccgagaagatctgccaacagagaaatatcgccgcttctggataaaaagtttttcgcgaagcgatggcggaaagaatgtgggtacatggtagtgggatcgatcccgtaccggattgcataatgttttaactgggaatggatgcctctggtcgtcacggggcgtccattttttctggtaaaaagaaaaccggagatgatgccgcggtgttcacaccagatttttgcttcccggcaaagggagtcaggaatatagatccgtcggatctttccgcctttggaatagagatcaaggtagccgcaggtcagatgttccattttgatctgtaccagttcactgacccgggcaccggtggttaccagaaaacggacaacaaagtaccagaagtcacgatgctctgctttcagcttcgtctggagagcttcacagtcctcgtttgtgatgatagagtcctgaaaggtatctctgggggctttcactgaatgaaggcgaaatccggcaagtgtcggatcaagtgcaggacactcctcttccagaaacagaagaaactgattgatggcaaagatcctttgattgatcgtggcgggactgtaagtggaaattaaaaaactccggtatttccggagctggtcttcggatatggacgattcgatagagaaaaactgacggatcgcccgcccatacgcattttcggtattttccgacatgttcttttttcttaaatatgatctgaacgattctgccagggtttcctggtctttagaaatttttttcatgcttttatcctttgaatttgatggtggattaccaggttacgatctgattgaagagattttgctgttcaatgctgcttttgtgaagatagatgcgggtggtctcgatactttcgtgacccagaatatcggagagaagtgcaatatcattgcattgttccacaaaattttttgcgaacagatggcggaaggaatgcgggtgaacaacggatggatcaagatgatagcgcagagcgaaaactttcagctgatcacggatcccgttagtactgataggacagccaaagcggttcaggaacagactgcctttggacctgttttcgttttgcagccacatcagacaggtctcccgtacactgtgggggaaataaatacgccggatcttgttgccttttgaataaaggtcgagctgaccacgccggatatcctctatctggatctgaacaagttcactgatccggaccccggtggcagccatgatccgtactgcaaagtaataattggtctttccgtcgcggatcaggcattttttcagatattcataatcagcctgactgatcacattctcgagaaatggtcgctgttggagccgtaccatgaggagttttgaagcggggatcccgagaaattccatgaaacagttgatcgcccggatcctcagatttacggtgcgcggtttgtaacgctcgatcagataacacttatagagaagcagattatcgtgggtaacatcaggatacaaagagagaaactggcgagcagaatagagataggatcggatcgtctgataagcttttccgcttcgaagaagccagggctcaaaatcggagattttctgacgggatccttctgaaagaagatttacgggaagtgtgatcgttctcataatattaccatgcctttctgtgaaaaatgatttagttgttatatagtgtgctggcgggaaaagttgtgtattgcagagaaaaaaggataagagagaaaatgagcagggagtggaaagtgttaatgaaaaaatccgccggagtcatcgaaaaatgcctccgacggatttttatttacgcgaacaacgaaccaaagtctgcgcttgtgcgagaccctagcgactgccgcgataacaagggaaaacccgcgaagtgtgttttctcttgtttcatttgcggaaagaagattatcgcaagtgatcgtacacggtgcaggaatgtgcactggcactgaggtcaggaatgatctaattctggaaatctatggtcacgttccctttttcatcatatttgactgcgtccttatcaagagtcagtgcgtcgatcgcatcgaggtatgccttgatggatggatactgcggtttatagtttgcgatgatttcctttgctgcctttgcgtcatcggagagcagggcatctgcgaggaagagttcaacttttgcggcattcacgcacatccggttcggatctgcgatctggaaatcgatgccgtgaagagtaccggttcctccgcctgcggaaatctggacacccggcattacacatgtgatatcgccgaaatcggaggagcctgtgctccagccgtcatagtcgaagacaaccttctttcttccgcagagtgccacgcagcagtcttcagccagtttcataaatgccggatcatgatactccggtgcatatcccgggcggtcactcagctcgacgcctgcgcccatagctaatgcggcacctgtcagtgcacggttcatcttgatattttcacgtttgatcgcttccagggattttccgcgaacatagctttcgatcttcatctcatccgggatgatgtttacagcacagtttgcacccattaagatcggatgaaaacggatggtatctttttcctggaaggtttcgcgcaggtcattgcaggcctgcagaccgagcatagcggcatattctgcattgactcccatatgaggagctccgccggcgtgagcggattttcccttgtaacggatatttttcgccatgcagccgttcattccgagctgtgcgtggaagtcgagatccgtgtctccgtcctcattgacaccggttccctttgtcattccgtggaccatcattgccatatcgacaccgtccaggagaccgcggtacatgaactcggtcttgccgccgttgtattttatgatccctttctggcggagctcctcgcggaaggccagctggatcatttcctcggccggtacagcgacgagacggatcgatccgcataaaccgtccagcgcgtgcggctgctttaatgcggcagcgatacctaaaagggcagcagactgtgcattgtgtccgcagcagtgtgtcatgccgtttacggactccggatgattggcgatgtcgagtgcatcaagttcgccaaagatcgcaaccttcggaccaggtttcccggtctccacatcggtgtagaatcccggaatattcccggcttttacaagtgtgtatccaagtgcctcatatttttctacaagatagtcatgggcctgccattcggtgtaaccggtctgcggatgtgcccagatccagcgctctgcgtcgagaatgagctgtcttacagtgtctacgttgtttacgatcagttgttgtctgtctgtcatgggaaatacctcctgagtatgtaatattgaaggaaaacggtcacagatcgggatgcgaaaccgtttctgaatgtaaaatatcggaaaaacccggtcatagtgcgcggtgggaaatatccgggtattggaatgccggaagatgcctcctgctaagcacgtatctgttttaaaagtgtgatcagtgcatcggtgtgttcctttgtggttgcccagcttgtggcgatccggatcactgtgtgcgtatcatcgtatttttcccagaaactgaattctgcggattcttcaaggttgtggagaatttcgtcctccagaatgataaagatctggtttgtcggagtctcaaggaaaaactgataaccgttttcttttaatacgtttttgatcgagtctgcatagttaagagcggattcaccaatatgaagatagagatcatcggtaaacaggacatcaaactggatccccaggatacggccttttgcgaacagggcaccgtgctgtttaacgatcgtaaaaaaatgcgggatcagtgccggatcggggatcacgacagcttcgccaaagagagcaccgcattttgtcccaccgatgtagaagacatcgcagagtcttgcgagatcttttaatgaaacggtattttccggagcagccagtgcatatgccagtcttgcaccgtccacataaagcggaagatggtatctgcggcaggcctcgctgagagcagtcagttcttccagggaatacagcgtcccgtattcagtcggctgtgagatatagaccatgccgggcatgaccatgtgctcatggttttcatcggataagaaggtatccatataagaggagatctgtgtggctgagatctttccgtatgtatggggcagcgggagaaccttatgtccgccaaactcgatagcgccggcctcatggaccgcaatatgtccggtctccgcacaaaggactccctgataggaacgtagaagtgcatcgattaccgtggcatttgtctgggtgccgccgacgagaaagtagacacctgcatccggcgcctcgcaggctttgcggatcttatctctcgcggaggcggaaaactcatcgagaccgtatccggaggtctgcatcatatttgtggagagaagtgcatccatgatcaaaggatgagccccctccatgtagtcacaggtaaatttcagtttttcatttgccatgtcataaacctgacctttcgtgttgtctgactctattatacagatggcatattgacgtgtcaatgcaggaaagtaagggaaagaatctgaaaacagggatctctggatcacacataattcgatgagggagaaaatagagtgttatgaaaaacaaaactttgggagaacagtgcatgaagcggaatctgatagagccggttcttggtttctgcctgcttggaatagtgatcctggcagtaaaatatgggagcattcatgtgacagggagcaccgatgcctacataaaagagatgccggtggtagtgatcgatgccggacatggaggaacagatccggggaaagtcggtgttgacggaagcctggagaaagacatcaacctggctgttgcaaaacggttaaaaacatatttagagcaggatgatatcagggttatcatgacaagggaaacggatacaggactttattcagatacggacagccggaaaaaaatggcagatatgaaaaaaaggtgcgagatcattgaagagagcggcgcggatcttgtggtcagcatccatcagaacagttatcatgaagaatccgtgtccggcggccaggtattttattaccgagattcagcaaaaggcaaagcgctggcggaaatcctgcagaaaaggttcagctatgttcttggagaacagaaccggagacttccgaaggcaaatggaaattattatcttcttctgcatgtgaaatgtccgatcgtgatcgtggagtgcgggttcctgagcaaccgaaaggaagcaggacttttgaacagcggggaatatcaggataagctggcatatacgatccatatgggagtggcggagtatctgaatggcagaaaatgatcatgggaaactgcacaaatagtgaaatactgatcaggacgaaaagatgaaaaggaacatttccggcgtgcctctgcattggaaggataaaaaaaccgccggaaatgcgagaatttccggcggagcatttttataaaaattattcgagtacgagtgtaccgtcaccttcggcgcggatcgcagatttgaagaactcttcaaatgccttttccatgtaagccatatccttggaaccggcagtctcatacggagagtgcatcgctaactgcggaagtccgatatccactgtgtttaaggaaacctgtgcattggagatgtttccgagagtggaaccgccgagaatatcggaacgatttaagaactcctgatacggaacacctgcgcgctcgcagaggcagcgcataactgcagcggaaacagcgtctgttgtgtatttctggtttgcactgtgtttgatcacaagaccgccgtttaagtatgtgcggtttgtcgggtctgtcttatccgcgtagttcggatgtacagcatgtccgttatccgcagataccatgaagctggaagcaagggaagtgagatactcttcttctgttcttccaaggctgcggttaatgcggcgaaggatgtcataaaggaatgtggagccggcgccctgttttgtaccgcttccaacttcctcattatcaaatacggcaacgaccggaatgcagcggtcgctctcactgtttaacagagccatcgtggatgtgaatgcacactgaaggtcgtcaagacgcggagcggagatgaactcgccgtcgcagccccagatcgtaccttccatgcggttgtagaggaaaagatccattcccttgatctgatcaacggaaacaccggcttcctcggcgatcatttctttaaatgccttgccggaattgctcatacggtataacgggagcatgtccttctggatgttgtatttataaccgtcgtttacttccctgttcatgtggatcgcgaggttcgggatcatgagaagatcgcggtcaacattgatcagctttgttgtgagacgattaccatcttttacgatgatacggcctgcaacggagagtggtctgtcaaaccacggagcgcagagcattccgccgtatttttcaacatttaattttacatactggttttcaacattcatctcggaggactctttgatctttaaagtcggggagtcgctgtggcttgccgcgatatggaagcctgaataatctttgcgggataccttgaatgcgatgatcgcggactggttgcgggttacaaaatatttgccgccctcagcaaggttccaggtatttccctcagcgaggcactcaaagcctgcttcagtcaggtagtttgccagctcatgaacagcatggaaaccagtcggactctttttgataaaagaaaataattcttcgttcagattctgaatcatgtttttgttactcctttcgataataacacctgtaagtcatactatcttattatacaggaaaaatacgggataggcaagtttgcgctatgctgtgcgcaagtgatgaaacaggcgggtaccgttttacagcagctgacagccgtgttcgctatatcgaaaaaccaattcgaaatagccccgttcctgtaactgtgacggtgtgaatagttaaattctgacgattttatgaagattgagaaaaaacgcggaaaagatacctttatttgtattttcatgttagaatatggaaataggaaatacggtgaaaagcaccagagaaaagaggggaacaaatggattggaaaaaaatcagacgggcaatctgtggggcagctgcggccgtcgctgtatgctttacggcagcaggaatgaacacaaaaccggtatatgcggcagatatgggagctgtgtacggaatatttgagcatggagtcggctggagcgcataccacggagaccagacggcggaacgtgccggaaacgggacttatgtgacagcgatccgggcgagtctttccggacagccggagggaatgagcggaacactttcttatcaggtaaatttaagcggttccggctggctttcctggcaggaaaatatggcggagaccggaacgatcgagacggggatgccgctcgaggcgatccggatggagctcacagggcagttaaaagatcattatgatgtttattactcagtattccagaatgggtcatggacagctccggtaaaaaatggtgagactgccggaacagaaggacagggacttcgcgtggacggaatctgggttactgtgacagaaaaagatgcagcagctccggagggaccgaagaatggaggaattgatccaacaagaccgatggtggcgctgactttcgatgacggaccatccaaatatacagagcgtattctgaattcgctggaggcgaacggcggaagagcaacgttctttatggttggaaatcgtgtggcttcttatgcatccacggtaaagcgcatggcggatctcggatgtgagacggacagccatacctgggcgcatacatatctcacaaatatgtccgaaggtcagatcttgcagagcttaaaccagacctgtgatgcgatcgttgcagcaggcggaaatgcaccgaaaggagttcgcccgccgggaggaaagatcaatgatgcgagcaaagcagttcttgcgaaggcaggaatgccgtcgatcgtatggtcggtagatactctggactggaagacgagaaatgcccagaagacgatcgataccgttttaagccaggtcaaagacggggatatcgttttgatgcatgatctctatgagcagagcgcgatcgcagcggagacgctgatcccggagcttacaaagagaggttaccagcttgtgactgtcagcgagatggcggagcttcgcggcggaatggcagcaggacattcctatggacatttccgctaagggggaacttgcacggataaaaaatgattgcacagcaaataaaaatgtgatattctgttatcgaacaaataaatatcgttcttcggggcggggtgaaattccccaccggcggtatagtccgcgacctgcgctgagcagctgatttggtgaaattccaaaaccgacagtatagtctggatgagagaagaaattgtatgacaggaatagtagatacaggtcccggacttttttaattgtccgggatcttttttgtataacaacgagaacgtgccggggcacattccgatgaattttttcctgcacagcaattccttgttgcgataccgtgtccctatccggtatttctgcagaagaacaacacgtacaaggaggatcattatgaaccagaacaaagtattaagtgtcagaaacatcgtgctgatcgccatgttcagcgcactcgcagccgtattggagacgatccaggtggcagttccgtttgcaccgccgttttataaactggatttcgcagagctcccggtactgatcggcggtttcgccatgggaccggtacaggcggcactcattgcgatcgtgaagaatcttttaaaactgctcttaaacggaacaagcacttactatgtcggtgagcttggaaacatcatcggaagctgtatgttctccgtgccggcagctctgatctaccgcagacataagacgaaaaagacagcgatgatcgctcttgttgtcggtgtattctgtgcagttattggtgcagtatttgtaaactgtgcaatcactcttccgttctacgcaaaagttgctttcggcggaatcgagaatatcatcgcgatgggaacaaagatcaacccggcgatcacaaacctttacacattcgctcttttcgcaatcatcccgtttaacattgtaaaatgcggactgaatgcgatcgtgacggcgcttgtatacaagcatgtcagtgtgatcattcattccgggatccacagagagaagaaaactgaaacgattcagtaggtctgcgcatttactgcgttgactgtaagaaaacattggtttgaaggcactgaatggagaaaaaacaatggtaaggtactataatgaactgacaagactggaaatggaacaggtcgataaagatgagacggtagtcatgatcccggtaggggcattggagcagcatggaaaccagtgtccgcttggcacggacgagatcattgcagagggaacagcgagacggatcaaggaagcgctggaccgggagatcccggactatccgatgctcattttcccgctgattccggtgggactcagcacggaacacatcaatttctgcggctccgtgacattgaaaccggacacgttctatcacgttttgtatgacatctgcaaagggctggctcatcatggttttaaaaagatcgcgatcttaaactgccacggcggaaattctccgatcatccaggtgctgagcagagaacttcgaagtgagcttggaattgccgtatttatcatcaactgcggtgcattttttggcaatcaggcggtgaaagatactgtgacacctggaaatgtttgggatttccatggaggagagatggagacatcgatggtcctcgcggaacggccggagacggtaaaactggagacctctgaggcggggatcccgaagaaattcatgggaaacaagacgttcactgtttacggaccgatcacactcggctgggtatcggaagagtgggaaaccgaggatggaaagccgatcgggatcggcggagacccgagcggggcaacggcagagaaaggcaaccagatctacgacagttttgtggagtcgatcctttccggactgaaagagatcagaagatggaaggatgttacttttcacggataggagttttctgaactgaaaattccgtatgataccgttatggtcgcggattttgccgatttggaatgcgaagcatcggcaaaatcctgttacagtgcgcgggcatggagtgcccgtgtactgtaacggaaggattgacggagagccagtaaatccgccggaaatctgttgcaaccataacagccatgtgctaaactgaatacgcaattaaacaaagtaaggtgctgcgctttgtgcagcacctttatcattagaaaaaactgggatcatgcagaaatactgcggatttcaaggcgcagggcagttctgagagcgtggggaaagagactccggctccaaacattattgataagagaatcgagagtgcataatatgaatacaaaagtagttcgcatcagagaagaagaaaagacaagagaagcactggaaaaaaatccggggcttctggaggcggcagagatcttaagaaacggcggccttgtggcatttccgaccgagactgtttacggtctcggcgcgaatgcgttaaatgaggaagcggcaaagaaaatctatgcggcaaaaggacgtccatccgacaatccgctgatcgcccatatttcctgtatggaggaactcccggcgatcgtaaaggaaattccggaagccgggcggaaactggcggaaaaatactggccgggcccgctgaccatgatctttccgaaaaaagacattgtgccttacggaacgaccggtggtcttgacaccgttgcggtccgcatgccgtctgacccggtggcaaactgcctgatccatctggcgggagttccggtcgcggcgccgagtgccaatacatccggaagaccgagcccgacaaaggcggaacatgtcatcgaagatatggacggaaagatcgagatggtgatcgacggcggtgccgttgggatcggcgtggagtccacgatcgtggatgtgtcgagtgaggttccgacacttttaagaccgggggcgatcacgatcgagatgctccgtgagacactggggcaggttgatatcgatccggtgatcctgggaccggtgagcggagatatcaagccgaaagcgccgggaatgaagtatcgccattatgccccgaaggcggacatgacgctggtcgagggcgatatggacaaggtcgtggcttatatcaatgatcagacaaagaaggcggaggccgagggaaagaaagtcggcatcatctgcaccgaggagagccgggatctgtatccggatggaaatctcgaggtgatcggaagcagagaacatgaggagacagttgcccacaacctgtttgcggtgctgcgtgactttgatgcgcgcaaggtagactgcatcttctcagagagcttttccaaggaccagcttggccaggcgatcatgaaccgcctgtgcaaggcagcgggatatcatattataaatgtgtaaaaatccatggaacagttacatcgtgatacaataacagatcatcacagagatggaggagaaaccatgtcagagaagagagacggatatattacctgggacgaatatttcatgggagttgcgaagctttccgcgatgcgctccaaagatccgaatacgcaggtaggtgcctgcatcgtgagtcaggacaataagatcctgtccatgggctacaacggatttccgaaaggctgttccgatgatgaattcccgtgggataagatggatgaggacccgtacaacagaaagtatttctatgtgacgcacagtgaactgaacgcgatcttaaattaccgcggcggcagtctggaaggaagcaaactctatgtgaccctgttcccgtgcaatgagtgtgcgaaagcgatcatccaggccggtatccagacgatcgtttacgagagcgacaagtacgcgaacgatgcgtccacacgggcgtccaagagaatgttaaacgcggctggtgtgcggtattatcagtataacccgacaggacgcaagatcgagtaccgggtataacggaggaatcaatgaaatttttgctggcggcgatcaacgccaaatatatccactcaaatcctggtgtatacagtctgcgcgcgtttgcgcggacaaagatcccgggagcggatatcgagatcggagaatataccatcaaccatcagatggatttaattttacaggatatctacaggagaaagccggattttatcggcttttcctgctatatatggaacatttcctatatcatggagatcgtccgggacataaagaaagtgctgccggaggcggagatctggcttggaggtccggaggtgtcctatgatgcgaaaaaagtgctgacgtgtgagccggatgttcgcggtatcatgcgcggggaaggcgagctgacgttcacagagcttgtgcgtgcttatcttcagagagaaaaaacatccgtaccggacggatatacaggtgaaagctttaggggacaggcaaaggagaaaacttcctgctgtgcggaaaatacccggatgccggaggctggcgaaggagaaaatgcgcattcagatcgtctggagttgagccatattccgggaatcacgtaccgcacggaaagcggcgagatcgaggaacatggtccgcagcgtcttcttagtctcgatgagatcccattttactatgatgatatggcaggattcgagaacaggatcgtctactatgagagcagccgcggatgtccgttttcctgcagttactgtctttcttccatcgataagacggtgcgcttccggagtctcgatctggtactcccggaactgcagtttttcctggaccataaggtccctcaggtcaagtttgtggaccgcaccttcaactgcaaaagagaacacacgctggggatctggcggtaccttgtggagcatgataacgggatcacgaacttccacttcgaggtttccgcggatatctttgacgaggaggagctggaactgatcggaaagatgcgcccgggtctgatccagctggagatcggtgtccagtctacaaatccggacacgatccgggagatccacaggcacatggatctggtaaaactgaaacgggcggtggaccgtgtttacgattaccggaatacccaccagcaccttgatctgatcgcgggacttccctatgagaactatgaatcctttatgcgttcgtttgatgacgtttaccggatgcgtccggatcagctccagatggggttcttaaaggtgttaaaaggatcctacatggaggagcaggttgcggcatatgatctgaaataccggggaatcccgccatatgaagtgctttccacaaagtggcttccttacagcgatgtgatccgtctgaaaggcgtggaggacatggtcgaggtctactataacagcggccagttcccggcgacgatgaagctgctggagaaaagattccagagaccatcggagatttttgtgaatctggcggaatactatgagaagaacggccttaccgggatcagccacagcagactggccaggtatgagatcctgtaccggttcctggaggaggatatgagggaagaagagcgggatcatgttacggctgcaaaggtcccggaaaccggaggtgcaaaagagtggaccgcagagaagatgaaaaatgcggaaaccggacagccgtctttagcggacttccgtgacagtttaatgtatgacctctatgtccgcgaaaacatcaagagtcgtccgtcctttgccagcgaccagtctccgtacaaaaaggaagtccgagaattcttcatggcggaggaagaaaatccaaaatggctcacggattacgctggctttgattcgaggcagatggcgaaaatggctcatctggaacatatggaagatgggacgtttgtactgtttgattataaaaagcgggatccgctgtctgggaatgcgggagcggtgcgttttgtatacaaggatggagaagagacatggcagatgaaatgataaattcttatgtcgcactggatcttgagacgacagggatcggtgcacgccatgaaaagatcacggagatcggtatggtgaaggtgatcgatggcgaggcagtggacacctatcatacgatggtaaacccgcaccgggagatcccggagaggatcgtggagctgacggggatcacggatgatatggtgaaggatgcaccggggatcgatgagatcctggatgaggtcctgaactttacaggagagcttccgctgcttggtcatcagatcatttttgactacggtttccttgttcaggctgcggtaaaccagaagcggaaattcgagaaatatggggttgatacgctgaagctctgccgctatctgatgccgggagcggaaaagaaaaatctgggtgctgcctgcgcatattttggcgttcatcaggacacggcacaccgtgcgctttccgacgcttatgccgcccatgatctctaccaggaattaaaaagaaggttcggaaaagagcgcccggaactcttcaccgcaaaaatgctgcaatataaggcaaaaaaggaacggacggcgtctaaaaggcaaaaagaacacttgcaggatttactaaaatatcatagaatagacataactgtcgagatcgatcacatgtccggaaacgaaatctcccggatgatcgacaagatcattttccagtatggaagaataccggaaaatgcgaaaaaacagggatagatttcgggaacgctggaagaatgactattaaacggcatgacagctgatgagagctgtgagatgcggaccggaatggaaagcaagaagaggtgaatggtttgtttaacatgaataacaaaaaaacaagaaagattttctctaccatcgtgatcgtgctggtcgtacttgcaatggtagtgccgatgattctaggttcccttctttctatcttttaatatgatgataccagggtcaaaaggtcagaaatccgatgcaagcttgcttgcaagaggatttttgatcttgggacccgccaaaacatgaataagcagccatttttcgaagaaaaatgagcggattatgaatgtttttgagtattgtgggagcacgaagtgcggaacaatacggtatcacaaggggtcaaaaccttttgaccccaacatcatatgatgagaaaagacctgggatatatcaggcagaagaaagatatcagcgaggaaaaaagaatgaaaaaaaatgtgtggatcgcaggtgtgacggcgttactgagcgccggacttgtctggatcgccccggtttccacactggcagatgagcggatcccggatggggtctccgttggagccgtcagcctttccggacttacggaagcggaagccgaaaagcagatcgaaagttatgtaaatgaaaaactaaatcaggatatcacacttgtggtaaatggcgcggaggcgaaatccgatgcgaagacgcttggagttgcctgggataatcaggatgaggtggcgaaagcggtccaggggacagagctgaagggaaatcttgtaaaaaggtatatgaaaaagaaagatcttgaggtaaatccgctgaagatcgagctggatctctctgtggatcaggataagatctcttctttcgtatccgcgaactgtgattctgcggtggcggatgctgtcgacgcaacgatcacgagaaagaacggaaagtttgagatcacaccttcaaaagaaggtgtgacagtagatatggacgcaacgaaagcggcccttaatgaggcgctgaacagtgaggacacaggcgcgatccgtgtggaggcgtccgttactgtggataagccgaaggtgacggaggaagatcttgcaacgatcaaggatgttctcggaactttttccacgagctttgcgaccagcggtgcttcccgatccacaaaccttgcagtaggttcgggaaagatcaacggacatgtgctgatgccgggagaggttctttccgggtatgagtgtatgcatccgttcacactggaaaacggatataagacggcgactgcttatgagaatggccggtctgtcgacagtatcggcggcggtgtctgccagatctctacaactctctacaacgcggctttatacgcggagctggagatcattcagcgccagaatcattccatgtcggtcagctatgtaaaaccgtctatggatgcggcgattgccggaacttacaaagacctgaaggtgaagaattcttatgataccccgatctatatcgagggatacacacagggaaagacactgacgttcacgatctacggaaaagagacgagaccgtcgaaccgcactctggcatttgagtcagagacacttcagaacgtgccgtcaccaacccaggagatccaggacccgagccttccggccggaaagcgcgtgaaagtggaatccgggcatacgggattaaagtcgaaattatataagtgcgtatatgtggatggacagctgcaggaacgtaccctgttgaactctgacacatacaatgcgtcaaaaacagtttaccgtgtaggaacgggagctgctgagacagcagcaccggcaccgaccgagacggcagcgccaactgagacggcagcgccgaccgagacagaggcgctggcaccggttgagacagaggcgccggaaacacaggcacctgctgaaactaccggactgcagccgggcgaaaattatggccctggaatgggtgagaacgcggcttaggccgcatagaagagagaccggaatcatgagaaaaattgagcgcgaacccaacggagcggggatcttcagaccgggacaggatctggtagtcgcagggacgatcggaaaaaacggtgtgaaggcggctctgtcggcaaaagaaaaagagatatcggcccgattcccggaatggtttgtcaagcggatccgggagcaggcagataaaaagttagaactgactccggagatgttcgatgcctgcggcgcaggagaatgggaagaaatttcggagggcggcatactggccgccctttggactatctcaggagcgtatgagcagggaatttcctttgaactgaggaaaatcccggtcgcacaggaaacaatcgagatctgtgaactttttgacctgaatccataccggctcgcatcgggagaatgccttctgatggcggtggaaaacggtggggatgccgtgaggatcttaagcgaggcggggatcccgtccgcagtgatcggaaaagtggaaaaaggtatcgcgagaaagatgaccgggatcggaacaacaggatttctggaacgcccggcacaggatgaaatctataagatcacaggagaatgtgtatgacagtgatctgactgggagaaagctttcctgccgggacagccggtcggaatatggatttacctgtaatcgctgctatgactttgtaagaaactgctgcccataagagaatgccggcggcagatttctcaggtgaaagcactgaacagatatgtaacaaggaggatttatcatgcgtgaaaaaattttggcgatcattgaaaagaacagccgaattgatctgaaagatctggccgcccttttgggcgagagtgaagcagccgtcgcgaatgagatcgcggacatggaaaaagaaaatattatctgtggatatcacaccatgatcaactgggataacaccggaaacgagaaagtgatcgcattgatcgaagtgaaagtaactccgcagagaggaatgggatttgacaagatcgcggagcgcatttaccagtacagcgaagtgaattccgtatatctgatgtccggtgcgtttgatttcaccgtgatcatcgaaggaaagaccatgcgtgaggtcgctcagtttgtatctgaaaaactgtccccgatggattccgtcctcagcacagcgacccattttgtactcaagaaatataaggaccacggcacggtcatgtatgagaagccgggggatgaaaggatgatgattacaccgtgagaaacccgttatctgataaaatcgtaacgatcccgccgtccgggatccgtaaattctttgatatcgtaagtgagatgaaagatgcaatctccttaggcgtcggagagccggattttgatactccgtggcatatccgtgaagagggcatttattctctggaaaaaggacgtaccttctatacatccaacgcaggcttaaaagatctgaagatcgagatctgcaactatttaaagagacgttttgacgtagaatatgactataacaaagaggtcatggtaaccgtcggaggaagtgaagcaatcgatatcgcgcttcgcgcgatgttaaatccgggagacgaagttctgatcccgcagccgagctatgtgtcctacactccgtgtacgatcctggcggacggtgttccggttacgatccagcttgaggagaaggacaagttccgcctgacaaaagaaaaactcctggaaaagatcacaccgaagacgaaagtcctggtgcttccgttcccgaataatccgaccggatcaattatggaagcggaagatctggcagagatcgcgaaagtctgcgtggagaaagacctgtttgttatctccgatgagatctactccgagcttacctacaagggacagcactgcacgatcgctgcattcccgggaatgaaggagcgtaccgttctgattaacggtttctcgaaatccttcgcgatgaccggatggcgtctcggctatgcatgtgcgccggagatcatcctgaaacagatgttaaagattcaccagtttgcgatcatgtgtgcgccgacaacaagccagtatgctgcggtcgaggcgctgagaaacggtgatcatgatgtggtcgagatgcgtgaggcatatgaccagagaagacgttaccttgtaaaggcacttcgcgatatgggatttgactgctatgagccacagggcgcgttctatgtattcccgagcatcaagaaattcggtatgacttccgatgagtttgctttaaagcttcttgaggaggagaaggttgccgttgttccgggtactgcgttcggcgactgcggagaaggatatctgagaatctcctatgcgtactccttaaatgatctgaaacgtgcgcttgagagaatggagcgtttcgtgaagagacacctgaacgaagagaaataaaaagaattgtgactgtgcggataccggacagtcatggaaaacggagcttccccggcttgatcatgaaggtggtcgggccgggaaatttcttgtttaacaggaaattccgatggaacttcctgttaaacaaaaaggcacattccttcttatttacgcgaacaacgagccgaagcacattctttttatatgacaggagagaccacaacatgaacatcgtattatacgagccggaaatgccggccaacacaggaaatatcgggcgcacctgcgtggcgacgaacacgaagctgcacctgatcgagccgctgggatttaagctcagtgagaaacacctggtccgcgcggggctggactactgggacaagctggatgtgacggtgtacagtgattatcaggatttcttaaagaagaatccgggagcaaagatctacatggcgaccaccaaaggcgaacatgtatacacggatgttccgtatgatccggacgcctatatcatgttcggaccggagagccgcgggatcccggaggagatccttgtggagaaccgtgaaaactgtatccggatcccgatgtggggagatatcaggtccttaaatctttcaaattccgtggcgatcgtgctctatgaggcgctcagacagaacgggtttgagaagatgacgatggaaggacatctgcatcatctgcactggaaagagtagaaattttgcggattccgccggaaggtgagacaccggaaggatccgtacagcctggaaaaggaaaaaggggaaagaggaaaacaatcatgatgaatgaaaaatgggaagaacagtttcgcgaacagatccatgatttcgtggagacaattgaaaaatttgacaaaggcgagatcgaccggaaggcatacaagggaatctccggaggattcggaagctatgcgcagcgggatccttccaaacatatgctgcgtctcagaatggcaggcggaaacctgacggaaaagcgcctggaattccttacagaggcggtaaaggattacggtgtggagctcatgaagcttacgacttgtgagactgtccagcttcacaatttaaaggcggagcaggttccggtcctcatggaaaaagcaatcgatgccgagatctacagccgaggcggcggcggagacaatccgagaaatatcatgatgagcccgctctccggagtacagaaaggggaagcattcgatgtaaagccgtatgcggaggcagcggcagagtatctgctctccatcgctggtgaaatccatatgccgagaaagctgaaagtggcgttctgcaacggagctgacgattctgtacacagtgcattccgtgatatgggattcatggcaaatccggacggaacattcacactccggatcgccggcggactcggcggcggctataagatgggagtcctcgtagatgaacatgtccaggtgacagagatcctttactatatccgcgccatgatcgagacattctgccagcacggcaattatgagaaccgcgcgaaagctcgcacccgtttcatgcaggagacactgggagttgatggattaaagacggtgttccttgagaatgtgcagaaaatgaaggaaaaaggcggtctggacctccatgtggaagaaaaaacggttacgaaaaagggctccggagaaatctctgataagcgcgtcattgcccagaaacagccgggactctacgcagtcgcttatcatccgatcggaggatgtctcccggctggaaaaccggcagagcttctcgcacttttaaaggagatcccggatgcagagtgcaggatcgcacctcatgagacgatctatatcatcaacctgactgcagatgaggcaaagaaggttctcgcagcaacggctgacggagcccagacgacctttgagaacagtgttgcatgtatcggcgcatcgatctgccagcagggcgtcagagacagccaggcggcgctcagagcggctgcagcggccgtcagagaggcaggaatcccggacggcgctcttccgaagatctgtatttccggatgtccgtccagctgttccgcgcatcaggcggcggcgctcggtttccagggcgcagcaaagaccgtagacggaaagccggagtctgcgtttaagatgttcgtcggtggaagtgataaactcggtgcggcaaaattcggcgaggccggagccgtgatcctggagcgtgatcttccgaagcttctcgtggagcttggaaaagcagcggcagcatctaacatgaactgggagacttggatcgatggtcatggggatgaattccgggcgattgtggaaaagtacgcgtaaaagactgcgtgctgtggaaagacggaatccttataaatataaaaatgtcggcagttttaatctactgccgacattttttgcagaaaacgtggatttttgttcgcagctgggaaggcgctgaacaattatggatcagtcaggacaggatcttacatctcgatcaactgaaacggcacctgtcttgcgcgcagcatctgcgcttcgcggcgatggcaggtgaagatgatgatctgaccgccgtaggcggaggcaagccattcgagagctgttttcaggcgatcatcatcgtactgggtaaagctgtcgtcgaagatcagcggaaaacctccggattcggagccggaccccgtgagaagctttgcggcggcaaggcgcagggcgagatagacctggtccatggttccgctgctgacgttttcgagcgggacgagctttgtcttcgtgttcaggaagacgttcagattctcgtcgatgctcatgctgtcgtagatcccgccggtgatgccggtgatatactgggacgcctctttgttcagatagagtccgaaagaatcccggatcgtggaggagaggtctgccatggtctcctgggcgaggtcgatggcgacgatctcatcgtggatgcggtcattctccgcgagagtccgctttaacgcttttgctttattcttgcagttgctcaagtgttccagctttttttccaactcccactgggtccgctgctgtttctcgatcatctcgctgcagccggcctgccttgtctggagattactcagatcttccagaaatttccggatctccgcctcggactgggcgaccatatcacagagcttcgaaaattcgcccatccgcgcgcggaatgcgttcatggcatcttcggatactgcggaatccccgagatgtctcgcgagaagagcgcctagttccgccgaggtgctgtcgaacattttgtgatattctttatctttctgacggaagatcagggagatgataaaaaagatcacagccgccgccacagaagctccgcagacagggagatatgcggtgagattgaaatatccaagagccgccgctgccccgagtcctgcgatcccgagaacggccgtaagcgcggacaggacttttctggacttcttgctgcactccatattcagcatattgtattcactgtatattttttctgcattggaggacatcgcatccacggaagcctggtctgtaaaaccattgtctgccaggactttctttccgtttgcgagtttctcgtccagatcctttttctgtgtctgggtattttcgatcagtccattgacctgggtccgcatattctggtaggaggcgagctggttctcgtattccggaccggcgatctcagattcaatattccggatctcagcgagaagagaggtgaattcccggcttgcctccgggatcagcccggcttcgagcgaacgtttctggttgcgcaggaatgcggtggcttttgtgatatttaaggaaatattgccggtggtgttcatgttggcaatgtaattcttaagttccgtcaccattccgtcctcggtggcgctcttcagctggccgatgctgatcgtgttattgtacatggtctcagtgagcccgtttaagagcctggagataaactccggacttgcgttctcctcaagaccttttgtctcattgatgatctttaaagacttattttctttccggaaccgccgctcgatgcggtagatggtcccatctttttccagtctcagccagccttcgtaggtcccgctgttttcccacggttcgtactttgtatacaggtcattctttgccgcccgtccccgcccgcgctcgatcccgaagagcatgccgcggataaaggtgtggagcgtggattttccggcttcgttctttccgtagataatgttgatcccgtcgttgaaggagatggtccggtcatgaaattttccgaacccgtcgatatgtaattcgagtaatctcatggctgactcctttcgtcttttgtcataagcagggcgtggatcccgtaataaagcgcttttttctccacaggactcatatcttccttcatgagcgcctggatataaaagccgatcatgtcgctcggatgttccgcgaacaatgcgtggaaatcatactgcggttccgattcatccaggatctcgatgatattccactgaccggagagaagatccaggtcaaaactgatatcaggatcccgcatgccgcggatgcggaaacgatagatattgcccgcgccgcgcttgcggatctcgtcggcgatgatctgggagagctcggtgttggtcgtctgaggagtcacattgaccactaacgggatatactgggcctggcagacttccttaaactgcagggaggtcacatgaccgctcgcggtgtcgatttccccgacaaaatatccgtgcggtccggtctccgtcatgtcgagcggttccggggaacctgcgtaggccatgcggttttccaggagaacctccggcttgtggatatgcccaagggcgatataggagaacggggatgcagccagtgcattccggtcaaaaggaacatgctttgcatcaccgccatggagcatgaggatccgggtacgtcgggatgccggaagagagatgttgtcgatctttgcctcggtaatctcggcagtgtgatagctgaatccgtaaacttcggtgttcagctcctcaaaatagacggaagagaggtcctcgtccatcagaaatgtcacgttcggcgcccaggtaaagctgaggagtgcggaactcttccggatccggtcatggtttccggcaatgatgacaactctggtcccggggatcgtagagaacagatagttgacttccttcaagtcgcgggccagcggctggcggtggaacagatcaccggagatcagaaggagatcggcgcggaagtctctcgcgtcctcaatgattccctggaatgtcagtcggatcgcctgttcccgctttttgccccagggcttatcactgtccgggatcatgccccagtggatatcggcggtgtggataaatttcataggttcctcccagtgtaaaagatcaggaaaaatcgaaaaggagcgcaacagatcgtctgtgcgctccctgcggctgccatgcatcgaaaggacgcggcgggctgctgtttttccttataactcgcagttattaacggtacgcgggaacgggatcacgtcacggatattgcccattcctgtgaggtacatcacgcagcgctcgaagccgagaccgaaaccggaatggcggacactgccgtattttctgaggtcgagatagaagccgtagtcttccggttttaatccgagctcattcatgcgggcgagaagcttgtcgtaatcgtcctcacgctggcttccgccgatgatctcgccgatacccggaacgaggcagtccacagcggcaactgtctttccgtccggatttaacttcatgtagaacgccttgatctccttcgggtagtcggtaacgaataccggtttcttgaagatcttctcagtcagatagcgctcatgctccgtctggagatcgcagccccagaataccttgtaatcgaactcgtcgttgtgctcttcgagaagcttgacagcctctgtgtaggtaacacggccgaattcggaatttaatacgttgtttaaacggtcgagaagtcccttgtcgacgaactggttgaagaagttcatctcagacggagcgttctcaagaacgtagcggatgacatattttaacatgccctctgcgacagtcatattgtcgtcaagatcagcaaatgccatctccggctcgatcatccagaactcagctgcatgacgggtcgtgttggaattctcagcacggaaggtcggtccgaaggtgtaaacattgcggaatgccattgcgtaggtctcagcgtttaactgtccgcttacggtaaggcttgtgtgctttccgaagaagtcctcgctgtaatcaactgcgccgtcctcagtcttcggaacattatcgagatcgagagttgttacctggaacatctcgcctgcgccttcacagtcactggatgtgatcagaggtgtgtggacatagacgaagccctgctcctggaagtactgatggatcgcgtaggcgatcagggaacgcacacggaatacagcctggaaggtgttggtacgcgcacgaaggtgcgggatcgtacgaaggtattcgaaggtgtgacgctttttctggagcgggtaatccgcgctggaagcgccttcaacgacaacttctgtcgcctggatctcgaacggctgctttgcctccggtgttgcaacgagagtaccttttacgataatggaagcgccgacatttaatttggaaacctcagcgaagtttgccattgtatcatggtaaacgatctgtaaggtatcaaagcttgtaccatcatttaatacgataaagccgaacgccttggaatcacggatgctgcggatccagccaccgacggtgatctccttgtctaaatatttctcatgctctttaaagagctctttgactgttgtcaactgcatgattgtttctccttctacatacatctcctgtaacggtgtgttacatagtcttttcgtaactgctcagtatcttcacagttacgtctcttcttaaaatgtgcaatctgctactagtatagcgtattttgtgtgtggattcaaggaaaaatgggcataagacaggggttttcgcatttttcccgcacatttttccgcgcatgggaaacagataaaatcagatataaagacaaaaagtaagtaaagtatccggataaataaaatatttttgtagaatttacggtgaatccccattataatagagaaaaacaccacacgggagggaaaacgaatgaatatttacgatcagatcaaaacgatgaccgatgagatggccggggatcttgtggcacagagacgtgattttcataagtacgcggagccgggctggtttgagatgcggacttcgtccatcatcgccagaaaactgacggatcttggatatgaagtgctcgtgggggaccaggtctgcaaaaaggattccagaatgggcgttccgtccgatgagaagctggaggaacagtatgagcgcgcggttgcccagggggcagatccggagttcgtgaaatacacaaagggcgggatgaccggtgtgatcgggatcctgcgctgcggtgaaggtccgacggttgccatgcggtttgatatcgatgccctcggcgtattcgaggaacatgatctgagccatagaccggcgaaagagggattcaattccgtaaacgaaggttttatgcatgcctgcggtcatgatggacatgcgacgatcggtctcggcgtggcgaaagtcctgatgtccatcaaagatcagctccacggaacggtaaaactgatcttccagcctgcggaggaaggcgttcgcggtgcgaaatccatcgtggacaacggtcaccttgatggagtggattatctgatcggctcccatgtgacgaacaaaagtgaagatgacccaactgccgtgatcccgggaagtcacgggtcgcttgcgacgacaaaatatgacgtgatcttccacggaaaatcggcccatgccggcggatctccggaggtcggacggaatgtcatgctggcagttggaaccgcgatcttaaacctttatgcgatcccgcgccattccggcggtgcgtcccgggtgaatgtcggaacggttgttgccggaagcggacgaaacgtcatcgcggatgaggcgaagatggagatcgaggtccgcggcgagacgacggagatcaacgagtacatgaaagattatgcagtcaatatcatcgagagtgctgcaaagatgcacggatgtacctgtgagatgaaactgatgggtgcggcgtactccttaaagagcgatgaggcactcatggagcgggtgaagagagtctgcgaggaagagcttcacatgccggtggctgaggatctcagcagcaaaaacggcggcagcgaggatgtctcctacatgatgaaccgcgtccaggaacagggcggacaggcgacattcatgcgcgtcctcacccacgaggccggaccgggtcacagccggatcttcgatatcgacgagcaggttcttccgaacgcggtgaagatcttctgcggtgtggtatatgacattatgcactaacgggtgagagtccctaacacgcccggataatggaaagtgtagagccgaacagcaagggtgtccattgtgaggtggaatctgaaggaagctgtcggcaaatctccggtccgacggacaaaaatcacatatgaggctaggctatgagagataagttggctgaaagtaacgaagtctaataactatcctcatcgggaagcgttcaaaaaaactccgtctcatccgcatgactcgatcgcggatgagacggagtttttgttatacctgaattagcttcagatggctgataccgaaggcagaccgatttttatgagagaccgatcaaaacggcaaggatcacaacgatggatccgaatgtaaacaggacagcctggaatttgatctggaactttgcccatttgccccagtcgagctttgccgcagccaacgcgcctaagaggcagccggaggtcggaacgatgaagtttgtgaaggcgtcaccaagctggtacgcaacaacagcaacctgtctctcgacaccgacaagatcggcgagaggagccatgatcggcatggtaagtgcagcctgtccagaaccggatacaacgaagaagttgaacacggactggaagatatacataaaccatgcggagatcaccggcgggaaattctgcattccgtcgctgatgctgtgaaggatcgtatttaagactgtaccgtcggttgcacttgtgccgccgaggatgatgataataccctgcgccattccgacacacattgcagcgcctaaaagatcggcagcaccgtggtcgaaggattttgcgatgtcatttactttcatatcattcagcttgaatacaacaccgatgataccggaaacaagacccattacgaagaactgggaagcaatttccgggatatagtagccctcgcttataacgccccagatcgtccataccatgcaggcagcgaccgtgaggagcacgagcttatgaccgagggtgaacggcggcatctctttgccgttctttgcgaattcttttctgtattcttcatcagattcatacgcaacggagagcttcggatctttcttgatctttaccgcgtagcgcatcgtgaagacgatcgtaagtcctgtgaagaagatccataacgggatacggaaccatgcaccggacatgaccggaataccagcaacaccctgggcaacagccagtccgaacggattctgccaggaagaaccgaagccgatctgtgtagatacgtaggagcacataattccgacaaccgcgtcatatcccattgcgataaacattggtacgaggatcataacgaacgggattgcctcctcacccataccgaagactgcgcctccgagggagaacaggactacgaggatcgggatcaaaaggatctcgcgtccatttgtcaaagcgatgacccgcataatgccgctttctatcgcgcctgttcggagaacgataccgaaagcaccgcctacaaccagaatgaaggcgatgattccgacagcggtaccattcttatcgccgacggtcataccctcgaatacatagtttaaaattccctgaccgccaaagtcctcggttccgaagatcggagctgctttggtcactttgtttccgttttcatccagaatatactggaagctttccggatccagaacggttcttgttttttccacgccgttctgcatatacgtgatttcttttgtgtcgtatttacccaacgggataaatacggtgagcagagccgcgaacagaatgacaccaaaaatgatgatgtaagtgtgcggcatctggaagcccttttttttctccatggcttatccccccataattgtattctctgcctgtgaaattccccgcacaggtagtgtatctactatattaacataaattctgtgatacgtcattactcttttcctttaattctgcatattaataagtttatacaatttcgaatcagcatttgtggtacttatgtaaccaatcaggaacataggtattgtattgcgtatcatacaaaaagaaaaaaatgtcagaatatacacaaaattgggattgaaaggatgaaaagtttgttcacatcttctaaaaagtatgttataatagagtcaccatctaagaaactagtgtatgggacaaaaagagcagcaagaggtgatatcatggtaaaaaaagagatgatagcgatgctgttggcaggaggacagggaagccgcctcggtgtattaacacagaaagtggcaaaaccggccgtctccttcggcggaaagtacagaattattgatttcccgctcagcaactgcatcaactctggtgttgatactgtgggagtattgacccagtaccagcccttacgtttaaacgcgcacattggaatcggtattccgtgggacttagaccgcaacgtcggcggcgttacgatcctgcccccttacgagagaagtaaaggcagcgactggtatacaggaaccgcgaacgcaatttaccagaatctggagtacatggagtcctacaatccggaatacgttctgatcctttccggcgaccacatctacaaaatggattatgaggtcatgctggaatatcacaaagcgaataatgcggatgtcacgattgccgctatgccggtgccgatcgaggaagcaagccgtttcggaatcctgatcacggatgacaacaataagatcacggaatttgaggaaaaaccggcgaacccgagaagcaacctcgcttccatgggtatctatatcttcagctggaaggcactgaaggaagcgctcatcaagctttccgaggagccgggctgtgatttcggaaaacatgtgatcccgtattgcttcgagcagggcaaacggatctttgcatatgagtacaatggttactggaaagatgtcggaactctcggctcctactgggaagcaaatatggagctcatcgacattatcccggaattcaacctgtatgaggaatactggaagatctatacaaagagcgaccggatcccgccgcagtatatttccgcggacgcgaagatcacaaagtgtatcatcggcgaaggttccgagatctacggagaggtaacgaactctgtgatcggatccggcgtaacgatcgagaaaggcgctgtagtcaaagactccatcatcatgcaggacagcgtgattggtgaaggcgcggtggtagaaaaagcgatcgtggccgaggacgtaaaggtcggcgccggggcgcaccttggtgttggtgaatatgcgccgagcaaatatgaccagaaagtataccagtttgatcttgtgacgatcggcgaacactccgtgatcccggagaacgtaaagatcggcaagaatacagcaatttcaggtgtgacgaccgcggaggattatccggacggagcgcttgagagcggcggctacattgtaaaggcaggtggaatcgtatgagagcaatcggtattgttttagcaggcggaaacagcaaacggatgcgcgaactttccagaaagagagcgatcgcggcaatgccgatcgctggcagcttccgaagtgtggattttgcgttaagcaatatgagcaactctcatatccagagtgttgccgtactgacccagtataattcccgctccttaaatgaacatttaagttcttccaaatggtgggatttcggaagaaaacagggcggaatgtatgtatttaccccgacgatcacggcggagcacagtgactggtaccgcggtaccgcagatgcgctctatcagaacctggacttcttaaagaagagccacgagccgtatgttgtgatcgcagccggagatggtatctacaaactggactacaataaagtcctggaatatcatattgaaaagaaggccgacatcaccgttgtctgcaaggacatgccgggtgatgtggatgtgacacgtttcggtatggtgaagacgaatgccgacggacggatcgttgagtttgaggagaagccgatggtggctgattcccatacgatctcctgtggtatctatgttgtccgccgccgtcagcttatcgagctcatcgagcgctgcgcgaacgaggacagatatgacttcgtacaggacatcctggtgcgctacaaaggtctcaagcggatctacgcatacaagttaaatacatactggagcaacatcgcttctgtcgatgcttactaccagacaaatatggacttcttaaaaccggaagtccgcaattacttcttcaaagagtatccggatatctactccaaggtggatgatcttccgcctgcaaaatacaatccgggcgcatctgtgaagaatagtctggtatccagcggctgtatcttaaacggaaccgttgagaactctgttctcttcaagaaagtctatatcggaaacaactgtatcatcaagaactcggtgatcttaaatgacgtgtatattggggataataccgttattgagaattgcatcgtcgagagccgcgacacgatccgtgccaacacaacatatatcggcaaaccggacgatgtgaagatcgtcatcgagaagaacgagagatacaccctgtaaaaagggagccgcaggccggaagcgggatattccggatggcgcggcaaaaggcagaaaaacaggcattcaaatattgactggccggtgattacataaaatctgcggagagcgcagatgggggaggttattatgcaggtaacagatgtacgtgtgagaagaattgagaaagagggaaagatgaaggcaattgtgtccatcacactggacaatgagttcgtgatccacgatattaaggtcattgaaggggagaaaggcctgtttatcgcgatgccgagcagaaaagctgctgatggcgaataccgcgatatcgcccatccgatcaattccggaacacgggacatgatccagagagtgatcctcgacaagtacgagacgaccacactggaggaagcgcaggcagtttagttctccgggaaacttgtccggagtgatttcctgacgcaggtcctgcaaaaaaatatagccgcagagagcggcttgtgaatggggaaatagaaagtccgccgaatcgaaaggtttggcggactttttttgcgaattagaatcgacaaagtgtatgcaggaaccggtgtcgagctgcatttgagttgagcagaatgataaaaaagacctccagaaaccggtatgattccggaactggaggtcgtagatttttatgatttcttatatgattacataagtcccgggatcagaagcggaacatatacgatcatgaagaatacgatgatcagtccgatcaggtacggaataacagatttggagatccgctcgatcggaagtcccgtgataccggaagcaacgaacaggttgatggcaaccggcggtgtgatcataccgatggcgataccaactacgaacaggattccaaaatgtacggtgctgattcccatggccttgacaagcggcaggaacaccggggaaagaataatgatcgcggaggaggtctccatgaagactccggcgagcaggatgatcagggagatcaggaacatgatcacatacttgtttgtggagattccgagtactccggatgcgatcgcctccgggattttgtagtttgcgagaacccagccgaacggaccgctgcatgcgatgatgatcatgatgactgcggatgtttttgcacttcccttcatgatctcaacgagacctttgaagtcgaggtcgcggtagataaagaaggaaacgaagatcgcgtagataacggctacggcagcagcctcggacggtgtgaagtaaccggagaagattccgccgagaatgatgagcggcatcaggattccccagatcgcttccttgaaggtgcggagcacatttcctacggagaaaggctttcccttcgggtagttaaacttgcgtgcctggtagagggagatcgcaacgaggatcacacccatcaaagcacccgggatgaaaccgttgcggaacagggtgttgacactgtcctcagagataacggcgtaaaggaccatcggaacggacggcgggataacgacaccaatcgttccggcagctgcgatcagggcagccgcggagtcttcacgataaccacgtttctttaactccgggatcagagtcgcgccgacagctgctgttgtagcggcaccggaaccggagatcgctgcgaagaacatacctgcaaggacggatacgatggaaagaccgccctttaacataccgagcagagactcagcaaactcaacgagcaccttggaaaccttaccttttgcgagaagatcaccggcaaagatgaagaacggaaccgcgatcagggagaaggaatcggtgctggcgaacatacgctgcacgaggatcaggagctttacatcgccttttaagagaacgaggagagctgcggctgcgatcgcgaatgcgaccggaacaccgatcaggagcagaacgataaaggaaataaataataatgctgccattttatgcctcctcctttccgaataagagtccgagaactgcatctactgcatggacgaacatgaggccgcatccgaccgggatgcagaggtaaatgtatttcatgggaagacgcatcgctgcggacagctggtttccctgttttccgaagtatttcattccatagatgatcacaacaacgaagaggatgcagcagatcacatggacgagaagttttaagatcttactgaatgcggccggaaccatatcctggatgaaggtgatggagatatggccgctgtgtttgtatacacagcttgcacctaagaatgaggaccagactaaaagataacgggtcgcttcctcactccaggagagagcggtaaatgccatacggcagacgatctgggcgccggtgatgatgaccatggcgccgagcatgacaacgatgatgtaggaacataaggtgtccaggacatcgctgagtttatgaaaacctttaacgaaagccaacggtgtttcctcctttttaaatcctgagcggttactgctcacgacaggcgttttccgcagccatcatctgtaaggggacgccggcggcaggtcctgcaagtgtggaaaatgcttatcgtgaacagtaaccatgaaatgtgtttaagatgggaccggctgcacaggagatcctgggcagccgggtcagatcacatgctgaaattccgactgcgaaagcagtgccagcggatatcagcacaaaaagttacgatccagaaaccgggattactttaaagcatcctggattcttgtgatgtagtcagcgtaatccggatatgcatcgtatacgctctgaacagcagcacggaagctgtcaacatccgggttttctacgacttccataccatgatccttgatctcctggagctggtcagcttcctgatcagcaacccactgacgctcgtactcagcagcttcctgagcggattcctcgaagatcgtctgaacatcttccggtaaggatttgaagaggtcattgctcattgtgatgatcgctgtggagtaggaatgacggtcaagtgttacatatttctgggactcccagagtttgtaggagtagataacgttgatcgggttctcctcgccgtcgatggtgccctgctgaagagctgttaaagcgtcggaccatgccatcggaactgcgtttacaccaagagctttgaatgttgctgtgtaaacatcgttctccatgacacggagctttaagcctgcaacgtctgctgcgtttgtgattggtttcttgctgtttgtgatgttacggaaaccacgctctgcgtaagcaagtccctttaagtctgcatcttcaagagttgcaaggagctctttaccgatctcgccgtcgaggatcttgtaagcttcttcgttgtttgcgaacaggaacggcatatcaagaacgcccatagcgctggagaagtttacgaacggaccgcttgtgatgatacccatatcaagagtacccatctgcatgctctcaagcatggtacgctcatcgccgagagctccgttcggatggatctcgatctcgtaggcgccgtttgtgcgctcttttacgagctcagcgaatttctcagcacatacctggaaactgtcctgctcgtttacggtcgtaccaagctttattacggttgcgtctgtgtttgaagtcgcttccttgctctcagcagcggaagaatcagcagcggctgttgtctcagcggcagcagcagttgtctctgtagaattgctggaagagccgcagcctgccatggaaagaaccatagcgcctgccataacggcggataataattttgcactttttttcataatgacctcctaaagtcttttaagaatagattgattataagtatatatcttaactgcccctcgcagataagaaactaaggaattgatggtggtgttggcaaagtgcgcgaaaggagattgctccgcactgcgtgctcccgcaatctccgccggcattcgtaatccgggctttcgccctgcttactcatgccggcttggttgtcaaatgtctgaacatccttgcgtgcgagcacgcagtctgttcatccgtttgacaacgctttcggggcaaaaaaaaactcctgtctcttattttctaagagacagaagcgaaacttctgcggtaccactcttattgctgtcaaaaaacagcctctcgatcccgtcgtttttcaaatatgaaaaattaacaggcaacacgttaacgggtgtaaaccgaaccagcctacttggaacactttcagtggttagctccgggaggattgtctgtaacgcggtgtctgcagcttttcaccagccagctgctctctgaaaggccttcgttaagagcgttcccatcatcgcaaggaatatttaaaactgccctttattatagtcacagattttcaaaagtcaagagaatttaaaaaaataaatcgcgtattgtgagaaaaatatgatatgatagatcgtatagtaaatttatttcataggagatattccaacaggttattatagagaatggaggaggagaatgaaaccgaccgtcagtataattgttcctgtctacaatgcggaaaaattcctgaaccgctgtgtggacagtattctcggacaggaatatagagattttgaactgatcctcgtagatgatgggagcagagatatgtcaggctcgatctgtgatgcgtatgcgaagacggatgagcgtgtggtggtgatccacaaagaaaattccggggtttcagacacgagaaatcagggaattaaaagggcaaagggaacatatctccagtttgtggacagtgatgactggctgacgccggatgcgacaaagcttatggtccgggcggcagaggaacatggctgtgatatggtgatctccgatttttaccgcgtcgttggggatatggtatccagaaaaggggacatcgagtcagactgcgtgatcgaccgggaggaattcgcgtcgtttatgatggagaatccggcggattattactatggagtgctgtggaataagctgtaccggcgcgatctcgtaaaccgcttcgggatccggatggatgcggagatcagctggtgtgaggatttcatgttcaatctggagtatgtccgctatgcagagacattctatgcgctgcggacaccggtgtactattatgtaaagacaaaaggttcgctggtgaaccagaagatcagcatcacgaagactgtgaagatgaaacttatgatgtttgagtactacaacaacttttataagcatgtgctggacgaagaggattatgagaaaaaccggcttcaggtgtaccattttctggtggatgcagcgaaggacggctttgttttcccggcatcgatccccggaaaccggaagctcggagaggagcggagcagtgcgctgcaggaggtgatttccgatgatgggatcattgtggataaatatcgagatcggaaacttctggagagatatctggagtcggcggcattgaagcatgatatgacaatggaggaactttctctgcttttatatctgaaggatgcaagccatgaactgagcagaaagaatcttgcggatcttatggattttagccgcggagaccttgcggtggcggtccagcggttgtccgcgaaaaagatggtggaggtaacggagcttccgagaaggcggggaacagaacgaaagatccgactggaacttcttcctgcatcagaagttgtgatcacggatcttgaggcggcggagaacgattactatcaggcgaagtttggaaattttacagaggaagagatcagacagtatacgctgctggcacggaaagtgcgggagaacgagaggagtattttgcagcggggataggagaaggcgcattcgcgagaagctgcggactgcgtcaggcggtcgtactggtgtggaaatacaacggataaacatcaaaaatatggagataaagatggaaaaagataaaacttgcaaaatcgtattcagtgacatcgacggcacgctgctgacgtcggacggacagatcacggaggggacgaaggagatgatcctgaatcttgagaagaagggaatcccgtttatcctgacttccgcgcggtcaccggaaggcgtgcgggtcattaagagaatgctggggaatcatgcaccgatcattgcgttctgcggtggactgatcctcgataacgacggaaatgagatctacagtaagatgattccgttaaaacgggcactggaactgaaggcgatgctggataaggattttccggctgttgcctgcaataccttcggcggcgagaagtggatcgtggatgaccgggacgattggagagagcagcgggaagagaaaatcgtgggatttccggctgaaattggatctattaaagatacatttgaaacagaaggcggaattcataaatttctcctcatgggagatccggacgtgatgacaaagctggcggcggttctggcaagagatttctccgaactccagtctgcggcatccaacccggaatatctggagatcacggcagcgggcgtggaaaagtcggaaggtttgaagacgctctgtggaaaactcggaatttccccggaagaggcagcggccttcggtgacggcgagagcgatctttccatgatgcgtgcggcagggttcggcgcggcgatgggaaatgcgccggagaatgtgcggagacgggcaccgatggtgatcgggaagaatgatgaggaagggctgctgaagaggctgaaggagatatttaaggactgagaaaaattgaagaaataattaaaaaaacagacccatttgatacaaatccagaaatcaaatgagcctgttttttaattaccaatatccgagcgacagaagatgtttcaaaaactcaaccgtattacttctgtttcttcaccgcattcctcaccgcatccgttgtccactgacaaagctcagcgatcttgaaatcctgataccgtctcatagtcgtgaggatcctgtccccgatgggcttgatatagctgtcgtcaatgacatccagaccgatcatgatcgccagtgcgttcagtaccggggctgcggtacagtccgcatcctgaccttccatggcgatgatgtggcaggtctccttaaagtccatatttccgaaccagagggcaataacttcggcggctgcgttcggataggcgtgaatccagttatactctttgtagcgctcctcgcaggccgtccatgccggctcccaggaagaattttccttgcagagatccagcgcatgctttacgaccgcgtagtattcgctcttatgcgggatcatgtccaccgctttctcaacaacggtccggatatggtcctccgtgaaagcgagggaggtgagcagggcgttgaagatcccgcccagcatgccattgttggagtgggagacgatcgaatcgtccgcggcaagtctcgcagcgagcttcgggtttccgggtgctaacattccgtgaagcggggtgcgcatctgcgctccgatccagtcgtaaaagtagttgtttgttgtgccgctctccggcggaagaagcccgcggcggagattttcgatggccgtcttctcggcggaatatccgtcggagatcagctccagccacttgtaggcaacgtcggcaggcgtgatgtcatagcctttttcgatgaatccgtcgagataggcgatctcgtaggtgatatcatcgttgtaggtctccgggcggcggagatatccgtagacctcgccgaagcgtctgcggatctgttccgtggtataaccttcgatctgggttccaaggcagccgccgatgagctgtcccatccatcctgcggtgactttctttgcaaagtcatcggaaaagacgtcatagggcgctgcagggccgaaatcagcctctttttctacatccgcgaaggtgcggtaggtgttgtagctccagtaaggggaggcgggatccttcggcgcttcattcagtgcgtggaagatcttcgcggtagccacctgaatcgcggctccgtccttttcctcggacgccttcaggccttcctccatgaatttctcagcttccgtcacatcatatccccggttgtgcatgctctgcaccgcggcgatcaccacgtcgcagggcgctttggatcccggaaccttattgtcccagtcgtggaaaagctgtttgtcggaggcgcggccggcttccgtgtaggccatccagtccgcctcattgtcgtcgtgaagctccggcggaaccgcgtccgccgtcagcttatgttcaaattcccatgctttcataaagaatctccctcatttcagctgtaaatgttccttcccggttctggcgcagataagaagtgcggtacggcagggaagaaaacacagtgttaaaaatgatttatatagaaatgttttgcctgtaattataacagttcagaatttcaaaacaattccatcaacttttctttttccccgacatacttctcttcgaataaattccgatcgcgatcatcgtaaccacgtaaggaatcgtctgaatgagctgggatggcagatttaacatctgaagccgtacggccagtgaatctgccataccgaagatcagtaccgagcaggcgatcttccatggaataccgagacccatagattccgccgccattccgatccatccgcgtccggcgatcatgtctcttgagaagaaggaaacataacccatggacatgtatgctccgccgatcccggcgagacagccggcgatgagaagggcgatgtacttatatttcatgacgtttaagcctacggattttgcggcactctcattctcaccgacagcgcggatccgcagcccgacggtagtcttccagaaaaagactgtgaggacgatcaccaggatcagcccgagataagtcagaacattatgtccggagataatggcaccgagaaccgggatatccttgataagcggaatcctgatctccggcatcaccggactctttaaactctgggtggaacctttatttccggtcagatagtaggtcgtaaagaccgtgagaccgccggataaggtattcagggcgattccggcgagaaccgggtttgtattcaggatcagcgtaaagtaaccgaacacgaaagccagcaccacgccgactgccattgcgaatatcacgccgccaagagcgctgtgggtaaagtaaccgccgacaggtcccgcaagggcacagcttaacatgattccctcagttccgatgggatcgatgccgcctttcacgaagaccatgcaggccatggccgcgaacaggatcggagtcatcacacggatcgaggtaaagaggaagtcaggggaaagaatcacactccagatattcatgcctgtacctcctttttcgctgcagcttcgaattcttttgtctctttgatgatgagtttcttcttatatccgctgaggatcgcggtggcggagatcagaaggaccataactgcctgaatgatgtttacgatctcaaacgggatatcggaatttctggacatgatatccgcgccaatccgcaggtaagataaaaacagtgctgcgaacgggacatactgtaccttccgtctggcgacgatggcgatcagaacaccgtcccagccatagcccgggagtgcggaatactggaagcgctggtacatgccgaaaagctccgcagcgccgccgagtcccgccaacataccacccagaatctgggtcaggatgatcatgaggccggagttgatgcccgcgtagtttgccatattgaagttttcgcccacaaggtttgccttaaagccgaagggtgtccggtttacgatgacccagatcacaaggacagtcacaagggcgatgatcgtaccggagttgatacgcgtgccggtgatgatcttgcttaaagcgcatccttccggaaatttgtaggaatagttggagttctgggtcggatcatagaagaaggtggtgatgatccagagcccgacgtacaggcaggtgtaattgagcatcagggaagttacaagctcattggagccggtctttactttcatgatgcccgggataaagcagataaatccgcctgcgaccgccgcagccgccatggccacgatcagtgccgtttttccggaaagtccgagtcccagggaagccgcacaggcagcaacggcgccgataaagaacgcgccttccatggacagattgaaaagtcccggtttgaagaggatgatgaccgcaagtcctgtaaacattaacggtgtcataccttcgatgacgtttccgaaacggcggacggaggtcagcggtccgaaaataaagtctccgagagcggagaggggctggctgctgatcaggagaatgatcgcgaagacgatgatcagggagatcaggatggcgatcatggtccgcagcatttctacataagatgatagaggttttttctgtttcatgattccgatacctcctgatgtttcagcccgagcatatagtttccgagctcgaactcatctacttttttcgcgccctcgaagtaggcggcagcctgtccgccgcacatgacgagaatgctgtcggagagctccatgatctcgtttaagtccgcggagatcaggataacgccctttccggcatcgcgctgttcaatgatctttttccagataaactcgttggcacccacatcgatgccccgggtcggctggttggcgatcagaagcttcgggtcagaggaaaattcccttgcgactacgaccttctgcatatttccgccggacagcataccgatcggctgatcgtcattctggcagaggacgccgaagtcgctgataagtttatctgcccgttcatggatatttttataattgagaagtccgtgtttttttaacagcgggctgtcgatgatatctgcgatcatgttgccccagaggctgatgtttccggccgctccggttttgatacggtcctcggggatataggaaattccgtcatcgcggatcgcgcggatggattttccaaggatttctttcccgtcaaagaggatactgcctttgacaccggagtagaaaccgaagatcgcctcggcgagttcattctgtccgtttccctcaactcctgcgatacctaagatctggccctttttcagtgaaaaggagacatggtccaggagctttcgtccttctttattttcataggtcagatcagtgacttttaagagcgtgtcaccgaattctgccggctttttattcattttcaggatgacatcgcggcccaccatgaagcgggagatgtcttcttctgtcgcgttggcgaccgggatcgatcccactgtccgtccggcgcggaggactgtgatattgtcgcagatctgcatgacttcgcggatcttgtgggagatgaagatgatcgtgtgatcatttttctttagtaaaagaagctgttcaaagagttcgtctgtctcctgtggcgtcaaaactgcggtcggctcatctaagatcaggagcttcgccccgcggagcaggacttttaagatctcgaccttctgtttctggctgacggagagctctccgacgacagccatcggatcgatctttaagttgtactttttggcggtttcctccaccgcccggatcgctttttccttgtcgatcatgatcccgtttttcggttccatgccgaggatcacgttctcatatacccgtagagaatccacgagcatgaagtgctgatgaaccattccaattccgagacggatcgtgtcagcggcactttttggctggatcttgtttccctcgaagatgatatcgccctcagtggcgtcctcgtcaccgaacaggatcttcatcagggtactttttccggcaccgttctcacccatcagggcatggatctcaccttcccggacagaaaagctgacatccctgttggccatgacaccgttggggtagatctttgtgatatgttccattttcaggatctctttgcccatacggatcctcctttcttataaaagccaaggggacttgttgacaagtcccctgatgtactcgatattctgggaaaatcaatggtcttggaaagattccccagatggtttacataaaatatcacagcaggttttgagtggatccgccggataaaattacggagctacagagtcgatgagagcttgaacttcgttctggtcagcatcgccgagagcagtcgggatctcgatctttccgtcgagaacttcctgtttcttctcctcgattgtctttttgatctcgtccggaacgttcttctggaagtactcgttgtcagcaagacctgcaccgttttcctttaaaccaaggaattcacatttgccgtaaggaacagttccctcttcctccatctcagccattctcacgagggaatcgccgacattctttaatacggaagaaaggatcacgtttgcctttgcctcatcggaaccggagaacagcattgcctgatcagagtcaacgccgatgatgtatttgcccatttcagcagcagcctctacgcagccaagtccggcctgctcagcagccgggaagataatatcaacgccctgattgtactgggcgatagctgtctctttaccctttgcggtatcatcccaggaaccgatgtaggaaacgtataccttgatatccgggtcaacagattttgcgcctgcgatgtatccaacaaggaagtcagtaatgatcgggtgctcggaaccgccgacgaaaccgatcttcttgtcttcatttgcgtttggcatgtctttggattctgttacaagtgctgcgagaacgccggcaaggtagctgccctcgttctgtttgtagctgatcgcgtaaaggttcggccacttgccctcttccatatcagagtcgaacataacgaatttctgatccgggaattcttccgcaacctgctcgatgacctcagcggaggaagatccgttggaaatgataacatcgtattttccttcctcagcgagatcctggaatgtcggctcccactttgtctggtcacggccgatctcgataacctttatctcgcagccaagatcggaagcaatcttttccatacctgcgtttgcagaatcgttgaaggatttatcacctaactgtcctgtacatacgaatacaaaggacggcttctttgcgtctgtctcagcagcggcagcagttgtctcggcatcagcttttgcgctttcagcggcagcagttgtagctgcagcatcagtttttcctccgcacgcggtgagcagcagtccggctgataagaataatgcggtagctttcatggtctttttcatgttttcctcctgtttttcggcttgttctccggggaatatgatcaccggagaacagatttgatttttttcatgggtatactataccaaaattgtgcaaattagacaatgaatatagtgaaaaaagcgaaaaatcgttaagaaaataacaatgacgacagttgtgcctcacaatggccgatgatataatgaaaatgtgtgaaaaggaacacagacagcatatgcaatatggaagacaggatggtaaggctatgaaagggaagattttaacaggcgcggggctgctgctgatcgcggcggctcttcttcttactgtttataatataagagaatcagaccgggccggagcagagtcagaggagatggtggtccggatggagtcactgacagcagctctgccggagcggctggagacggagaaaaaggaactggtgccggaatataagaagaatccggagatggaaatgccgacagtggaggtaaacggacaggaatgtgtggggatgatcgagattccggcgctggggctcaagcttccggtcatcagcgagtggagcgacgcaaagctcaagaaagcgccgtgccgctacagtggttccgcgtacttaaagaatatgatcatcgccggacataattaccgcactcatttttccggcatcaagcgcctgaatccgggcgattccgtagtattcacagatgcggacggaaatatattttcctatgaagtggcggagatcgagacggttggcggctatgacatcgaaaagatggaagccggggactgggatctgacactgtttacctgcacgaataaggggaaggcgcgggctgcggtgagatgcagggagattgagaaatagagaggagtatttttacttgaaatgctctcagggaaacaaagggtctgtgtacggaaacagggaaagtgccttcggagagggtgtactttccctgttttttgctgttacatctggaagagatgaccggcggcagatttcgcagatcaaatattattttttataaaaacagtttccgccaacaattttataggaagaataactgtcggttgaggcgcgtttggcggctttgaagaagaggtagtcaccgatattgttggagccggccagagcatctttggtggcctttatgcaggacttggacgggcctttggcaaggtatttgtccagaaggccggaggttgcaccggggaactggccgtcggcgtagatcacgtcggagatcgttttgccccactttttggattttacacggtttacgatgcagcttgccacggcgagctggtcctcatagcggtcatcgccagtctccatcgcgacgcaggctgccatcaggtagatctcgtcctcagtggcggagatcacataggacggtgccgcggaggttccgtttccggatgcgctcagcgccgcggactcttcctttgcgtcgacagcggcagcaggaaccgggccgatggaggcatattgactggaaatatagccgtttgtgtcggcggagagctgaacctttgcccagccgtcagattcacttaagacagggaaggaatcgccttcagccgcctgttttaagattgcggaatctgtggacggggtctcgcggacatttaaggtagttgcggtgatctttgcggataagagaccgagctcttttgctaacggctcgatatctgtgctgaagagcaggtatttatcgctcatccagccctcaatttttccggaacggaccttcgtccagccatctttcttctctaatacggttccgcccgctccacggtagcactttccgacgatctctccgtccgtggacggtttcgtccgcatatttaacggttcacttgtcacatttgccacggcaagattgtcataggcggatgcggcgagagatggaagagccgggaatgcggtggaaaggaacaggacagatgcggcggcagccgcttttaaaagaaacttctttgaaaagtcaggaatcagattctgtaattttctcatgcaaaatttcctcatatcagttgaatatcccgtttgtattacgggaattatttcaaatattacaaaattattacaaaaataatataccaaaaatggagaaaattgtcaagttagtgtagcaaacagagaacggaagctgattgttgtttaaagcgggctggagtttgaataatctaaccaaaacttttaacaccaataaggtgtgaatcgcattttaggtatgggaagtcttagcagtctgaaaatacagatttacaaagagagacaaattcattcatagcgcttgtaagatacattccttttcgaaatgagatgtataaagggcaaataactctatgcaaaggcctcaggtacgttatattgaaagaagaacttaaagctgcgatattggtggatgtaagtacggagcatcccatttcagcttgaattaattgaagtatagtataatagtcaaatacctcaaaatatttgcttggaaaaaaattttc

SEQ ID NO: 2003 - DNA, 29198 bp, Unknown
  gut microbiota DNA sequence
gaagcgagttgtgtccgctgttctccgcccttagcagtctcccgggaggttagaggaaccatccccgcatccccagcactcctgtccggacactcaccgctcgccaaccaactatccattttctttttcccccttttcaaatcccccattctatgataaaataaccttgtttcattaggaggactaataatggatatcaactacgaattatataaagtattttactacgtcgcaaaaaccctgagcttctccgaggcctccaaatgcctctacatttcccagtccgcggtcagccagtccgtcaaggtcctggagaaaaagctcggccagaccctcttcatccgaagcacaaaacgcgtccagctcaccccggaaggcgatatcttatttaaacatatcgaaccggcgatgaacctgatccacaaaggcgagacccagctcttagaggcaaacaccttaaacggcggccagctccgtatcgccgccagcgacacgatctgccgctatttcctggtcccgtacttaaataaattccacaagctctacccgaacgtccacatcaaagtgacaaactccacctcgatcgagtgcgcccacattttagagaacggccaggtagatttcatcatcacaaactacccgaactccggtctcttaaacacccacagcgtccgtgccatccgcgaattccgcgatgtcttcgtcgcaagcgccgagcacttcccgctgcaggataagaccttcacactcaccgagcttctcgattatccgatcatgatgctcgaccgcaagagtacgaccagcgagtttttacactccatgttccagaaatcccatctcgacctggtcccggagatcgagctcagcagcaacgaccttctgatcgacctcgcaaggatcggcctcgggatcgccttcgtcccggatttctgtatcccggaggacgaaaaacagctctttatcctaaagctctccgagactctcccggtccgccagctcgtcgttgtccacaacgagaaccttccggtctcccaggctgcaaagcagtttatggatatgctgtaggatttagccaaaaagagtcatgtcccgcgcaactacatgccggacatggctcttttttcttttacttttttcttttacttttttcttttactttctgctctcccagaaatcctccatgcactgtcccacgtttccccggttcaccatctgaaaatgctcccactctctcggaaacagttccagatattctctctttaagaaccggtcatcgaggagcaggatgatcccctcatcctccgtggtccggatcacgcgccctgccgcctgcagaaccttattcattcccggatactggtaggcaaaatcaaagcccgcctcctctttctcctcgaaatatccgcgcaggacttcctgctccacacagaccatcggaagccccgttccgacaatcacagcgccgatgagacgttcctccttcagatcaattccttctgagaacacgccgcccatcacgcagaaggccgccagcgaatgattccgtttcttctcaaattcttccagaaattcctgtcgttcctgctccttcattccctgtccctgcaccagaagatctgccggaaaatccagctcctccacagcctgttcgacctgctccatatactggtaggaaggaaagaacaccatataatttccgttcttcgaccggacaacctcccggatatactccgcaaccttccggtattcactcgcactccgcctcgaataccggctgctgacatccgtcgccaccatgagaagccgcttctcttccgcaaacggggagttcgcatagaccgcgtaatcatcctcatttccggagagcaatgtcttgtaataccggatcggcagcatcgtcgccgagaacaggatcgtgctgttcccctgtgccatgcagagtgaaagattcgaggacggatccacgcagaacagccgcactttaaaggaagaaacgcccacattttccgcgtagatccggtaatgatcgtccagaagctcatagacattcaggaaatcccggagtccaaaataaaagtcaaggacctcgtcccgcccttcaaaatccggaaaatcctccagaaatgtctccatatccgaaaagaccgccatcgccgctgccgccagggatgtcacatccgataagagctgccatgtctcgcattcccgcttcatcgcaagcatcacctgattgcacttctcgagatccttcgtaagcttcggagctttgccctttgtcaggcgctttaccgtgagaatatcttccttttttaactcagcactgtacatctcccgcgcccgcgagacgagattatgcgcctcgtccacaaggaacagatattcccctgtctgcccgtccgcaaaataccttttcaggcgcacattcgggtcaaacacgtagttgtaatcgcagatgatcccgtccgtccagcttgaaatatcaaggcagtattcaaacgggcataccttatatttttcggcatattccaggatcttctccctcgtcatctcctgttccagatgcaggatgtcaaagacagcctcgttcacccggtcaaaatgtcccttcgcatacgggcatgcatccggattgcactcgcagttttccagcgggcagagcttttccttcgccgtgatcgtcacagaagtaaagatcagtccctttccccggaggatccggagtgcttcctcagcgaccgtcctcgttaccgtctttgcggtcagataaaacagcttatcgccttttccctccccgatcgcgcggaccgcagggaacaccgtggagagcgtctttccgatcccggtcggtgcctgaatgaacagccgctttttccggctgatcgtgcggtagacagacaccacaaggtctctctgtccctcccggtacgggtatgggaattccagattccggatcgatgcgtcgcgggtcagctcatggtggtagagatatctcgcccatttaaaatattcatggaccacgcccgaaaaccactgttccagctcttcctttgagcggtcggtctgaaaccgccggatctcctccgtctccagattgcagtaggtgagctgcaggcggatcccatcaagatccttgtcgcagcagtagaaatacccgtagcacattgcctgggcgaggtggacttcgatcggtgcttccagtctcgcaacatccgtatacatgcccttgatctcgtcgatcaccgtgatcccgttttccgtgaagatcccgtccgcccggccttccaccgaaagaacgagctcctgctcgtcatccgtgacttcatgtttcagcgggacctccgcccggtatccggaacccatccgtttctggatcttcctgtggatccgtcccccggccagcatcgcatccttctgggcgttcccggaccttcggttgtcgatatctccggagcgcagaacaaactccaccagattccggaccgagatccggatcgatcttttattttcctcgctcatcacatgcgctccctttcatttttgtaaatcaaatatacctgcaggttttctgcaccatacgtggaaagcagcaggactgcagacgctgaatcattgctgatgtttccattcttcatgtcttttgcaagtataacattccagaacaaaactgtaaacactgcggatcgcagctgttctccacaggacgctcgccgggtgcagctgcctgcagcatactccattctggcacaaatgagctttccaacgcacaaaaaaagcagccagccatacgttttgtacagccgctgcctcttcgttttttcttcgatccgttacgctaccgcgtgcatcggattctttctctcgaggaactcctcgaacagtgtgttctcgccgtcgaactcaacggtgaggatctttgtaagatcaaggctcagtactccgagaagagacttcgcatcaataatcatacggttataaaatacattcacatcaaaatcacagccgctggcaatgctcacaaactcctttgcctcgtctgcagacgcaaattttacttttttctgtttcatcatagctctcaaactcctttttgttaaacccacagatgtcaaatacctgattccataaaccctttttgcgaatcgtgaacagcaatggtttctaacattccaatatatgaaatggttcgaaaatgtttccatactgcctacgattatacatttataccatatccggagttgagcgtcaatcgacagatgtcaccatctttttgttaagtttatgacaatttttgtcatttgtcacagaaaaggcaggtagttgtctgatgtcttaatctgcaggaactccttatcagcaagtttctgcaaatgcatagtaaccgaaagccgaatacataaatggcgttttttatccatctatatatccggctttttgtgagttgtctatgatgttattacatcaaaatgtactttaagataaagagcacggccaggatgtacatgaccggagtgatcttctctttctttcctgcgaagaggttcattacaacataggagataactcccatggagattccctcggagatactgtagaagaacggcatcgcgatgatgcagaggaatgcagggattccgtctgccgggtccttgaaatcgatctcagatacggagccgatcatgtagaaacctacggtgatcagagccggagctgtcgcaaaggacgggatcgctaaaaagatcggggacaggagcagggataacaggaagagaaccgctgttgtcagggatgtaagtcctgttcttccgccctcagttacgccggaagcactctccacgaacgttgtgactgtggaagtaccaagacatgcgccgcaggttgttccgactgcatccgcaagaagcgcgcccttgatcctcgggagctttccgtcagcgtccagcatgtctgccttcgcagatacaccgatgagcgttccgagtgtatcaaagaggtcaacaaagaggaacgcgaacacgatcacgatgaactccaggaccggaacgccctttaagctgaacttgaacatgatcggtgccaggctcgggatcgagattccgtttgagaaatccgggagcaggttatagaaaccgagatccggattcggaacatacacgccggcaaactggcagatgataccgaggatccaggtgatcaggattccccagaggatatttccctttacattcttcacgatcaggattcctgtgatcaggactccgaagattgcaagtagaaccgtgatcccggcatcgctcatggatgctgtgagtccgtctgcaagtgtgctgttatatccgctgatggagaacaggctgacgagcgtggagcttccgatcacgatcttcgcattctggagaccgaggaatgtgataaaaagtccgattccgacgctgaccgctttctttaagttgaacggaatcgcgttgaagatcgcttccctgatgttaaagcaggaaaggataatgaagatgataccttctgcgagaactgccgcaagggcaacttcccaggaataccccattccgagaacgaccgtgtaggcaaagtacgcgttcagacccattccaggtgccagagcgaacgggtagttcgcaaagagtgccatacagagtgttccgatgaaggatgccaccgctgtcgccgtgaagaccgcgccgtgatccattcccgccgctgcgaggatgttcgggtttaccgccaggatatacgccatcgtcataaatgacgtcacaccggccatgatctcggtcttaacagtcgtgttgttttccttgagatggaaaaatttttcgagactcatttgtttccctccaatttgttttatcagtttttgttataaaaccgttaatttttattatacgaggtgcagagaaaaaacgcaaggaaaagagccggattctataagtcaacattttccggcagttcgcatttcatgtcataaaaaggccgctctcccctttcggttaagcgaccttccctgtaaatatcattatttcaattctctcttcaaaaaagccagcaaattcagtttcgcccgctcctccgtatctttccgcctcgtctttaccttctttacgacctttccttcctgatccctgtggatccggtaaacgatccgcaggtactctccgacctcttcccaagcctcgcggctctccgggatcaggtcgagtcccatctggaagacgtggaacatgccgtcgtagacggaacagcggacttttacgccctctgctctcgctttcttcgcagcttcccgcgtgtcatcaagaaggacctcataggagcccacctgcatgagcatcggaggaaagccctcaaaatttccaaacagtggggacagatacgggtccttcggatcagcatccccgatatagctgcactggtagagcatattttctttcgaatttccaaacaatgggtcgatcgtataattctcctcatacgaagccccgctgagcgtcacatccgtccaaggggacatcgtgatgatcccagccgggagcggaagcgcatgatcctttgcgtagagacagagcgcgagggcaagtccgcctcccgcggaatctccggcaaccacgatctgttccggatcgtattttttttcatttaaaagccatttgtaggcatagactgcatcctcgagtgccgccggaaacggatgctccggtgcgacccggtagtcaggagtcagaacatccgccccgaaccccagttccgaatatttaaccgcaaaccgccggtaaatgttcttcatcggaccgatatatccgccgccgtggagctgcaggatcacccgcccagtgaccgcctgcttcggctttaaatattccatcacaaatttccctgtcgggatcagttcatagatataatcattcgggcaccgccatgccggttccaccggattttttcggaattctccggtctggatcggcttttttaaagatgtctccatgacatctctcatcatatccctggtcagattcccgatcatgctgacttcttttcggctcatgtttcattcctttcctgtctgttccttttcctcatctatcacacatgaaatctccgccgcaattcccgtttcacactcctgtccccgagcagcaccgtggcaagaagcgctgccaccgagatcaccacagaaagcactgtgagcagcggatgcctcgtccagccgatcttccagaagatcagcgggataaagcttaataccgtgatcgcgatctggtacataaaatagctctgccagttcagtcggttcacgagcatcatgagcaggatcgccgccacttcaaataagacaacgcacgggatcgcatagtccaccgaccagccatgcagtcccgtcagcgtgtcgatcagaagcaggatcgcctggatccccagacactgcctgacaaggatcccggaaaggcttgcatggcgcatcacggaaaattttaatgtcatcgccacataggcagcggcgcccgcggtcaggagtgaccatttaaacgggatctgccggtaggttgcaagatttacgatccccgcaaggaccgaaacgaacaccagcgaaagataaaacatccggacagcctttttgatctttctgcggtcctgtgcgatcaccggataccgtcctttatcatgttcccggtctgtgatcccgttgctctcctgctccaccgggatcccctgatcttccagaaaacggaaaaacacttccggcagacgattctctgccattgcactcgtaaacgccaggcagagctttccatcgtaagctaccgccccgcatttcatccgctgcttcggagatgcaccgacgagaagctcaaaatcctcaacattctctctcagatcttcccgtatctttgcagggccgatgttggaaaaggtcatcgtatgggcgcggcttgtgcgaaggaagatcagttccatcgccagatgcttgataaacagagggatcgccctcacataccactttttctcgttggatacattgtaggagatcgtctcctccagtcgctccttcacgatctgttcgtccatctgacgactgacgtttgtgaggacctcccggaagttctccggcgccctgcctttcggccaggagatattgactaccgcaaaaaaatttgcgagcgtctccgagtcaaaaaagctccgcagattgaccggcagattgagcgctgccggttttttcaggttcttcccgtccgtctctgtccggatgacagaccatagaagtgctgctgccaggtattttgtgatactgaccccgtatttccggcactgtgcttttagatccgcgacctgcagtgttccctttaagacccccatctggtcaaacggaagaaattccccacttacctgaagtgccggttcgctctcatagtggcgtttcggtaattttctgtaatagcggagataatcatcctcttttaatggagaaaattctttttcttccgtgataaccggaagatttttctttaactccagataatgctccgtcagccgcgaggcaaaccggagagctccgagtccgtctgtcagcccgtggaaaacctcaaaattgatgcggtttccgaagtagctgacacgaaacggaaatctcgccgcacgatgtggatcgataaaccggcacggtgcgctctgctctttctcgatcacaggatcccggtcgttcgtctcaaaatagtaccaaaaaaatcccttccgaagcttcacccggaaattttcaaattccgggagtgtcaggatcaaggctctgtggagaagttccggatccaccgcctccttcagattcgccgagatccggaatacactgctcagatcttctccggacaccgccgcaaaaagttttgccgtgttgtccagtctccgccatgcggcgccctggatgcgccggcgtttctttgtgaattgctccgataaattcttcattcagatcccgcacctctttcaggataaaaaaataaccggaaaaataatttttccggtacattagaagcaggggaagaggggctcgaacccccatctacggttttggagaccgctgctctaccattgaactattcccctatattttgttgcgcatcacttaatgctccattatgatagcatgaaatgttttaattgtcaacactaatttgaaaatttcttatatttttgtatccggcacttcgagcgaaaaaatcagctgccttatgccaacctgcagaccgatccttttccgctcaaagcattaccgcatcctccgtacttttccgatcagatcagctggatcgcctctctcacattctccaccccgatcagtctgatccgtttctcatcctttaacttctccagatttgatttcgggagcagacagcttgtaaagcccatcttgatcgcctccgacacacgttgggccgcctgggagactccgcggacttccccggaaagaccgacttccccgaagatcagcatccccggatccacctcccggttcttaaagctcgacacaagcgccatcacaacggcgagatccagcgccggttcgttcatcttcattccgcccgcgatattcacataggcgtcataccggctcatcgcatacccgcatcgcttttccaggatcgcgagtaaaatgttgatccggttgtaatcgacgccgttcgccgtccgtcttgccattccgaaattcgtcgctgtcacgagcgcctggacctccaggaggatcggtcgcgttccctccaatgaacaggctaccaccgccccagacgcttccttcggacgcccggagatcagcatctccgacggatttagcacctcggaaagtcctttttcttccatctcaaacacaccgatctcgttcgtggacccgaaacggttttttactgccctgaggacccggtatgcgtcattccggtctccctcaaagtagagaaccgtatccaccatatgttccagcacacgcggtcccgcgacaacgccctctttcgtcacatggccgacgataaagatcgtgatcccgtatccctttgcgatctgcatcaggagatttgtcgattcccggacctggctcacgcttccaggtgccgacgagatatcttcccggaacattgtctggatcgagtcgatgatcaccacatccggctttgcgcgctcgatcgcgctgtggatcgtgtcgagatttgtctcgcataaaaacagaagatctcccgaaatctccccgatgcggttcgcacgcatcttgatctgctttaacgattcctctccggaaatatagaggacccgttttccggcccctacaaggtttctgcagacctgtaaaagcagcgtcgatttcccgattcccggatctcctccgaccagcacaaggcttccctttacgatcccgcttccaagaactctgtcaagctctccaaagcccgtaggcgtcctgtcctgctcctccaaagaaatctccgagatgtggaccgggaccgccgtctttccggctccgaccgcattgatctgtccggccggcgcttttttcgtctgggcaaccggttcctcgacaaatgtattccattccttgcacaccggacattgtccgagccattttgcggactcatagccgcactctttacagaaaaaagctgtatttcttgcttttgccacgatattctccctgtacaggaaacgctccgaagtgtatccccggagcgctctgtgatactgccgtccatatcctgtccggacagtgatttctgattttcctatttacttgcgaacgatcttgacctctacttctctgccctcattaagttcaacagaaaggctcagtttaccgctcatatttgtcttcataccgccgacgccaacgccgtcctcgaaaacctcatactcgcagtcatcctctaactgtactgtgatctgggcatcctcaaatccttcgactttgaatgtcactgttgtatcggtcactgcaaaatcctttacagcagttcccggaacagactcataaacgaacattccgtttctctctaactttgtgatttccttaaacgtcttaactttataaagatcaccttcgtgctcgaagtcttctactttagattttgctgcgaggctgtagtttccgaaacttaatgtcccgtttgcctctgtacggatcagttcgttgattactgacataatgcttactctccttttgtgtatttcaacagagggttttctccccttcactgttgtaaatgctgcagggatctgattaccggaccaggtcatcactgcatcgtcgtgcctatgattttaccacactggcggaagtttttccagcagtttgtggatgtcttgcagaaaatttcagttctccgtccttacaggtgatcttcacggaatctccctcccggacttttccttccaggacgagctccgcgagcttatcttcaatgagattctggatcgtgcgcttcaacggtctcgcgccatatttctcatcgtatcctttctcaacaaggtattccttcacgtcatcaccggcatttaagcggatagacatctggctctttgtccgcttttcgaggatatttaagaggatcgtcacgatctccttcatgtgatccttcgtcagcgggtggaacacgatcgtatcatcgatcctgtttaaaaattccggcttgaacatccttttcacctcgtccatgactccggtcttcatgcgctgatagcgcactttctcatcgtcctgggacatgaatccgagctgcttcggcgcgatgatgttctcagcaccggcattggatgtcatgatgatgaccgtattcttgaaatcaatcttatggccctgggaatccgtgatatgaccgtcatccagcacctgcagaaggatattgaacacatccggatgggctttctccacctcatcaaaaaggatcacagaatacggatttctgcggactttttcgcttaactgtccgcctccctcgtatccgacatatcctggcggggatccgatcatcttggaaacactgtgtttctccatatactccgacatatcaacgcggatcagggcattttccgttccgaacattgcctccgcaagtgctttgcagagctccgtctttccgactccggtcggtccgaggaataagaaggagccgatcgggcgcttcgggtctttcaatccgactcttccgcgacggatcgccttcgcgacggcaacaaccgcctcgtcctgtccgaccacgcgctcatggagaatggattccagttttaagagacgttctgtctctccctctgcgagcttgctcaccgggatctttgtccatccggagatcacatccgcaatgtcgttctcgtccacagtcagctgcctgctctccttctcactctcccacttttccttcatcttgcggatcttctcccgcttcgaagcctgtttcttcttgatctcaccggcgagctcgtatgcctcgctgcggatcgcgtcctctttctctttctcgagctttctgatgtcctcctcgagtgtcttgatgcccttcggctccacatagaccgtgagtctcgtcttggaggccgcctcatcgactacatcgatcgccttgtccggcaggaaccggtcattgatgtagcgggcagaaaggcggactgctgcctttaacgccgcatctgtgatcgtcacatgatgatgctcctcatatttcgggcggagtccctttaagatctggaccgcctcgtcctccgtcggctcctccacagtcaccggctggaacctgcgctccagagccgcgtctttttcgatatatttccggtattcctcgatcgtcgtcgcgccgatcagctggatctcaccgcgggccagggacggttttaagatattcgacgcatccagtgcgccttccgctccgcctgcaccgatgatcgtgtggatctcatcgataaagagcaggacattctccgcctcggtcacctcactgatcacatttttgatccgctcctcgaactcgccgcggtatttggatcccgcaaccattccggagagatccaggatcaccactcgttttccgcggatcgtgtccggaacatcaccggaagcgatgagctgcgcgagaccttcgatcacggctgtctttccgacgcccggttctccgatcagacacgggttattcttcgttcttctgctcaggatctggatcacgcggcggatctccttctccctgccgatgaccggatccagttttccctcttttgcgaggaccgtgagatcgcggctgtacgcgtcaagcgtcggagtcgcactctgtccgccccgcggctggcgtccctgagccagttcctcttttcctgcgtttccatcctctcccatcgcggataaaaggtcgatatagaccttctggatgttgatattcagtgtatttaacaggcggaccgccacacagtccgattctttcagtaacgccatcaggatgtgttccgtcccgattaacggcgcatggaacctcaccgcctctttatagctgttttccagcacatgtctcgcgctcggcgtgtagccatcgcgttctttggtggctgtgttctgataggaagagacaagctgctccacaagagcgagcagtctgtcgagcttcacctcattggcctcgaggaccatggcagcggttccgcttccctcctcaatgagccccaccaggatgtgctccgtcccgatcacatgggaccccatatcctccgccgcttcaccggcaagaacgagcgcctcctgggctttttccgtatattgtgccatctgttttctttcctcctgatcgatcagaaatatccgcagaccccgcaccgaccggtgtcctggttttttcggtcatttctgattttctgcagccgttcagtgcccttacaggcgcaggcacaaacctgctgaacagttgcgattctctatcttttcttccggagatcatgcctccggctctataatttccggcagccgttttctcaaaaattccgctctcgcagcatccagctcatctttatcgagcggacggtctgccagactcagaagatttgcaggctggatcccgatcatcagtccgtaaacggaacacggctccttcaccgtcaggatcccgtctgtgatcccagtcatgatctgggacagaaattccattccgtcctttctcgtcaggcgtctcgcatattttaagactccgtacgatttatagcattcatccgctgcctgcaccggctttctctggcggtattcccggcgcatccggcgttcctgggcatccagctccagcgctgcctttcgcacgatatcaatgatctcctgttctgtctgacccagagtcttctggttcgagatctggtacagggaaccgaagttttccgcgccttcgccgtaaacgccgcggacctgggtcccaaaacggcccatatccgctaccaggctgctgaaatttttgtttttcgacagcatcggcagatgaaggaccactgctgcccggagtcccgtccccacatttgtcgggaacgaggtcagatatccgtatttttcatcaaacgcatagtcaaaccgttctccgatgtaatcatcgatccggtccgccttttcgtaaagccggtccagggtcagccccgtctgcagcgtctggatccgcacatggtcatccccgtttaagaggatcgccgtggactcatcctccgacaggatcatccccgtcggatcttttttcttcatcacgctgcgatttaaagcccgccgctctaaaagtgcagtcttttccagatctcccatcctctccaggtgtgtaaaccggtactgcatccggtccatggaggcgataccggtgagtccgccgagaagtttctctgaaagctccacactctgttcctttgtgagacgcccggggaacgggtactctttcaggtttcgaaccagacggatccggctgtagatcacatttgtgcctgtctttccaggcatctcataccatttatccattctgtttctcctcttttaacgcccggatctcatctctgagcttcgcggcctcctcgtactcttcccggcgcaccgcgtcttttaatctcgcttccatcaggcggatcttttcctcttttgaaagttccgggatattcaccggatcctctcccggtccggcagcttctccgatcatcgccggatccggctgaaatcctgccggatgttttccgacatgtttttcgctgccctgaagatggcggatgtggtcgctgatcagcggatcaaaaacactgtagcagtccgggcatccaaaccggctgtcctttacaaattcctcatacgttgttccgcaggtcgggcatacgacgccggaatatttttcatcctcttcctccgtctcctgggttccaaggagtcctgagagaagttttcccaacgggaactctccctcaaagagtgcggagaactgtccgaggtccgcatgggcggcacactgggtacagaggttgtgctcggtcttcacgccgttgatgacttccacgtattttacggtcgcttcccgttttttacaatgttcacaaagcatgaatgttcctcctttatgcctgtccgccgaactcatcatagatctggtccacaaggttgtggatctcgtctctgccgacgtttttacagatcccgcgcgccacgatcagcgcaagatcatttttcatctcctccatcgtccgcagtttatccatatccagggcgatcacggccccgcgtctgcggtccagacgcaggaagccttcctgtttcaatacagcatatgccttattgactgtatgcatgttaattccgatctcatccgcaagctgtctgaccgacggaaggctgtccccgtcgtgaagcacatccatcgcaatgccgcagatgatctggttgcagagctgggtgtagagcgcttcctcactgtcaaaatcaatcttcaataccattctatcaccgtctttgttttagatttttgataccgagaccgcgcaaacacccccggtatcattgtattccatttgttatatgtgtatagtaacagattgcatggaatccgtcaagcggaatcatgatttcgacgtacatatgttcttttcagctttttattccaggtccagccttccctccgctgaccggttcaccgcgatccgctcgatcgtccaggcgatatccgcggccttacctttcagtttttcccaggcatccggatcctggtatacacgaaacagtgctccgaagatcacgtcatattctcttctcgcaccttccggaagtcccgtcgcctccgagatctcgtcaaagcggtatcgcgcagctttcgggaactggtcttttttcatctcatccccggaattttcatagatatatgccccgaatccgtccttcaccgcatccggctttgaaaaacgcagttcctttttcttctcgtcgagggaataaaaacaggaatacagcgggtttcctctcttatctttaaaaccccggtattccccgccggacgggtcatacacaaacctccagccgtcatcgcggaatttctttctccacccatccgggaacgcattgataaatccggcaatcatgttttcttcctccgggctcacatcttttttcgtcccatccgcgttcactgcccggatatccccggccggatccggctgtccgtcatagtcaatataggaaaatccggcatattcatttacgcgcatgctcccgtccggacgaaacgcataagtctttccccggatcgtgcgaacaacctcctgattcatcgttccgtccgcatcgaaccagtaccactttcccttatcctgaaaccactggatcatcgcatttcccgaaggatcataatagtaccagtttccgccgcccggaccgtcgtactgccagccctccgagagggaaccatccgtattaaagtggtaacggatgtttccgaccgttctccatcccgtctccatgatcccgttttgatcaaaatgataccactcaccgtcaagatcctcccaggtgccgcgcgccgctcttccgtccgaatatgtgaacgtatacccggcatccgtgagtgtccacgtcccgtccgcagcgaatgacgtcatggcatgtatggcagtcagtgcgagtgctgcggccgtcaacgcatattttttattcttcttcacagacagtcctcctttccgcgttttccgctgttttctgttcgttatgatccgcagccagtcatttacagagtctgacttgtcggcacagatctgccggccgtctgctttctgacagccgggctgccaagtgtcctgtccgccgctgctgttaaatctccgttctcatccatatcaggagcagacggatccttactattatcggttgaatctgtgtgtaaaatcatttatactgaataaaggattgtttcatccaaagtcagcactttcacggactcggccccgtcagaacaatactgaccgcggttgatttctggtctgcaatcctttcgccgtccatcgaggacaggcgaatccttactattattgacaaagaaactcacacgaaaggatttttatatgaaacgattttttgcctgggtgggaatcctcatcatcgccgcggtatttctctccctcatcgtcctgacattcaccggaggttccgaaaatgtcatcatggcacttctcttctgcgtcatcgtcatcccagtgatgctctacggctacgcgctgatcttaaaatatctccgcggcaggaacaaaaaagacgatcagcagaatccgtaatccttcgccatcttttccagacggtcagcagccattttcaatgtctctttccctctggaaaaatgcaggcggatatagttgttcaccggctccttaaagaaactggagcccggcactgccgccacaccatacttctttatcatccattcacagaactccagatctgtccatccggaaaattccggtctctcaaggaatccagaaatattcacaagaacaaaatagctgccctgcggagttgtgtgcgggagtcccatctgctccagtcttccgcagagataatctctcttttctatataaaggtctttcagccattcataatactccggtccaaattttaagcctgtgactgccgcttcctgaagaggtgccgcagcgcccaccgtgaggaagtcatgaaccttctttgccgcctcgatcacgcgctccggtccgatcagatagcccagtctccatccggtcatggaatacgtctttgaaagcgagctgcaggtgatcgtccgctcgtacattcccgggagtgccgccatggaaatatgacggtttccatcataaataatatactcgtacacctcatcggtgatcacaaatgcatcataccgcttcgcaagctctgcaatctcctccatctctcccatagtaaatacttttccgcacggattcgacggattacagaggatcagcgcctttgctccgtcccgaaacgcctgctccaggaccgctctgtcgtaatggaaatccggcggcacaagcggaatatagatcgggtctgccccggagaggatcgcgtctgccccatagttttcatagaacgggctgaaaaccgcaaccttgtctcccggattgcacaccgtcatcatcgccgccatcatggcctccgttcctccacaggtcacaacgatctccttatccggatcgatcggacgattccatttctttgtatacatgtctgccagagcatcgcggaaatttttcgctccgaatgtgatcgaatactggtgagggccatgttccgccgccgccttcaacgcctccaggatctccttcggcggatcaaaatccgggaatccctggctcagattgatgctgcccggcgtcatatcgttaattctcgtcattctccggatgacggagtccgtaaatgtctgtactcttctgcttaattccggcataggaaaaacctctcttctgatgtattttgtcatttatgacaccgctgcctcctgagcaattacgcacttgcgggccctgcggtcttttatcctagtatcatcttaccacaactgatccgcgtggcatatttctttttatttacaattttataaaaagaacggaatcctaccttaggcagagattccgttcttatattgttttcatctttatctatcagcgaaactttatctccgctctgttccttctcaaaatatctttccggacacactcattcatagaattataaattacaccatccgcaaccatttacatttttcctgtttgcatctcttttctttaccttctccatgaaataagaattctcatagagaatccggcgctcccccctgtaacgcaaaaagactcaagtctcacgacttgagtctttcgtgcggaagatgggacttgaacccacacgatgtaaccaccacaagatccttagtcttgctcgtctgccagttccgacacttccgcgtatcgggtgtttcaagattttgtatctctcaccgacgcatataaatataccacaggttatcatatttggcaagtactttttttaattttttaaaaaaaatatttttttagcaatattcaaaaaactgttgacaaatccattcccttatactataatgtgtattgtcaatgagatacgtcatctggtgagatgcagaagtggcggaattggcagacgcgcacggttcaggtccgtgtgatagcaatatcatgagggttcaagtcccttcttctgcacgaaggcttaagtcgaaagacttaagccttttttgtttagtagaaagttccgatggcacttcccgttaagcaaaaagtttataaacattccatcctaatcccccgtcaaacatacgtgctatgtaccaacgatgcactctctttctcgtccatccccatcaccagcccagcgcagcgtcggcgtcctctccgccaacacacagcgccggtgaggctccgggcatggaccgcctgatcccgggagctggtttcctcttagcccgcaggagaatgcgttggagagctgcggacacttgtctgagcgcagcgagttgtgtccgcagctctccgcccttagcattcttctgcggggttagaggaaccctcccggaatcccgaagcgtccaggcccggagtctcaccggcgcgtacctcccgacactatgaaccaacgcacttctctctttcgccagtcttcttccaaaccaacacccagcagcagacaccccacaaacgcaaaaacctccccgacagatcactccatcaggaaggttttctcttatctcaccgacaattaagccagttttgtttttgctaactcagcaagctttgcaaagccctctgcgtcgttgatagccatatcggataataccttacggttcataacaacaccagcctgctttaagccgaacatgaacttgctgtaggaaagaccgttgattctagctgcagcgttgatacgagcgatccagagctgtctgaactgtctctttctctcttttctgccagcgtaggagcttgttaaagctctcattacggactgctttgctactctatactgtttggaacgagctcctctgtaacctttggctaacttgagcactctgttatgtctcttcttggcatttaagccacctttaattcttgccattgcttaatttcctccttaatcttaattccgaaaacaaattataaatacggtaaaatcttcttcattaccttgctgtttgtgatatcggtaacgatgtcttttctaagatttctcttacgctttgtggatttcttagttaagatatgggacttataagctttatttctcactaactgaccagttccggtctttttgaaacgttttgcagctgctctgcttgttttcattttaggcattgttgtttcctccttaaaattgttcccttatcgttttgcagttaaaaacattaccaggcttcttccctctactttggaaggcttatcgacaacagcgatatcggaaagtttctcagcgaaatcatccagaatatacttcgtctggttcatatgagccatctcacgaccgcggaaacgaagcgtaatttttaccttgttgcctttttcgatgaactttctcgcagatccgatctttgtattcagatcgtttgtatcgatattcggggaaagacgaacttcctttacctcaaccgttttctgcttctttttcgcttccttctccttacggatcatctcatacttgtatttgccgtaatcaatgatcttacataccggcggcttcgctgccggagcaatctttacaagatccagttctgcatctctcgccattttgtaagcgtcttttgcagacatgattccaagctgctcaccattttctccaattaaacgaacttccttatcacggatctgctcgttaatcattaactcgctaatagctgtacacctccaactctcatactctacatatgtcgatagaaaagaaaaagcagataggtaactatccgctcgtaactgcattggtttggcatgctgctgcatgataaaaaccgatgtctatgaacccgggtcacttactcgtgccagggtgaggcggatacctgctttcctgtcagttgctctcacaacttatgtaagtttactataggaatcccgttttgtcaatccctttcttttaaaaaaatcatcagacgtcgcgctctccgtatcaggtcgataagccgcgtgaaaaagccggaacacacagaacgcagccggattccatgtccgctgcgtcccgtcacttccttttttatttttccctgaagctcgcacactctgtctgtccgaccaccatagccccgtcaccggcgatcgtgatccgctctgcccggcatgtgcggtcatcattgtaaaggcagttcatcacatcgcagtcgacctgcagcttcgattccggtgtcttaaagaggttcttaaaaagacctccgcgattttcctcaaaactcccgcagcaggtatcacagcagtttctcgcctgtgcgccctccacgaggatcgtatttttacagcagcatttttccgcgttgtgaacacatgttgtcactgtacagtccagttttgtcataacatgacctccttttcttttcagagaccattatgcacaaaaaggtcccggattattcaccacggaacctttttctggcatatctgcaccacgcagtcgttattttctgcctgttttacgcctcttccaccggatatttcagtctcttcaggcgttccatcagcgtgctgctgtccttcatgagcggatagatcgtaacgatcggcttgtcattcttatcgatcagttcataactcacgatcgaacccgtctttttcttcttatacacgaccgcttttttcagatccgtaaatgggaccacttttttctttccgatcacaggattcacccggatcgtctttccatcgatcgtagtcttccataaaagcccccaaagagcaaacaggagaccaacgatcccgcagataacatagaatgccttgataaacggttttccatccgctgccggattcataaaaaagctccccattgtcaatacatccacgatccccatgaacggcaccaccaacgtatacttcaatttgagtgtcggcagtttctcaatctgcatcttctcttctttcttgatcttcatccccacaatcctctccgttttatttttcgcgcagatcactcatcccgcacagtccctgtccccggcaggaagttttgatccatttacgcatttttcactttctcgatcaccttattgcagcgtttctcaaggaagcctccaaaagtctccttcttcccgcggtaaaaaccagctttctccaccggtatcgcaagagaacggttccagaagatcatataatatttgctggtctccttgatccatgcgatcccttcgtactggtactccgtgatgatccccggacgctccacggtaaaggtatcctcatagaaattcagggtgcagcgctctccttttaagccggaactctccagaagctgcagagcctgatttttatctgccgatatcgaatttgtctttttcccggaagtctccccgttctgtctctcattcattcgtctcaagaccaccgctgccacaaggccgcagagcaccgcctgcaggatcctcgtggacgtttcaagctgtccgaacgccatgtaaacagccgctcccacaagaagcgccatcaatgtatccttcagtccgaaatccgggagctgaaaccggatcttctttccgttttcttccttcggcatcatcctcggtttggatgccacgacctgatgataaaacatattttcatcgtatgttgatcttactgcgtatattggttccatcctgcacctcctatcgtaccgtgagctgttccatcggaagatgacatttttccgtgaggaaacctgcaagttccgtggaatttccctgcaccgcgtcatccttcatgaaataccggaccacatttccgcgttccacgatcacatacatgccggacatatcgatgagacgtcccacattatcgtacttcacacgggatttctcattctttccgacaacctcatatccgtcatcatagaagcggtattcccactggtaattgtcatccatctttcctgcctcaaactgcagatggatctgtttcttcgcatccatccagcctttgaggagcgcatatccgccgaacaggaagcccatggcacaaaggatcccgatcatcatcagcgcatccccgatcgcgcctccgacgatcgccttcgctgccatgcagagcaggaacaaccccagaaagatcgacatgatgcgttttccgccggactggaaaccaagtttccggactcctttttccagatgaagcagcttttcttccgtcacatggtgccggatgataaacctcgcatcctcttcattccgtaattccatcttattcctccttgtgtctcaactattttttcagaactattactggaagacaatgatcgccgctgtcaggctcacgatccccagaatgatcgatgccgagttcactgcgctggccagattgatatctccatcaagcatggacgtatacgcgactccgagcgccgataccggaccaaacatcaagatcgcaagtgttctgcggatctcctgagaaaatggaaggaactgataaaacaggaccgccaggaccgctgagatcacgaagcgggttcccaggatcttcgccacactgcctgtctgttctctcgtcatatgtaattccagtcccagaccgatcattgtcatggaaaggaatgtattggcatttcccaccgtctcagcaacctggtccgcaaagaccggaagccggagtcccgccatggtcagcgccgtcatgatcacatagcagtcaaaaggaaccgactttaaaagctgcaccacgatcctgcggatctggtgtttatccccgtttcctccttttccggcaactgacatcgccactgcataggaaccgccggtacagaccaccgcgtttcccgtatcaaagagactcgtgcacgccacgccgggcgcacctaaaaatccctggacgaacggcatggtaaaacatccaatattatatcccgaagcattcacaagaccaaaggccttctgctctctcgttccccttgcgaacagtccgtagccgatcaccgcgtacgcgccgctgcacaggaagccgatcaatacgatcaccagcatggagacatccatggtcgcctggctgaaattatggatgatcgccgccggcagcgtgatctttgtgacaagttttgagaagaccggaagatccgtctgatgcaaaagaccgatcttttttaaaccgtatcccatcaggataatcagaaaaaaacatcccgctttcaataatactgcactcatttttcatgtccctctttttatgtcttttgggcagaaatataaacaaaggttattatatctcaaagtcgcgatcgaatcaatcactcttttccatccggaaaagtattgatcccatatcccagagtgatttcacatagcgatttcgtttttcccgcactggacagttttctgttctgatgttatacttgttctgttctcatacagttttcagggaggtttttaccatgtccgaagaaaaagatgcaaaaatccaggaactggaagccgaaattacccgtttaaaagacgaaaattcaaagcttcaggagactgtccagtggatgcacgacctgatctggaaaatggtccgtgaacgcgaggggcagaaaggagatcctgccgatggtacatacgcttgttccgatgtccgtgaagatcaagatcaaaaactttgagacaccggcacggctgatcaatcacatggaattatcctgtgcagttggtatggcatgccgcgaggcttcgctcccatgcccggagggaactgcaggaatggggctcaaagagttcgtaaaatcggttccggatactattttttcaagtccggccgtcaatgagaaattgaaggttctgatccgcgattatatctataagaagggcgaggttctggatgacgactcactgatcaccctgaaactcggatatgaagaatcttaggtgtggctgccgcgagccaggtcagctgcataatctgatccggatccggatcataatggaaggagtttacagcgatgggaattactgaaaaagagtttcttgataagatgatcgcgctggcaaaagcaggcgaggatgaaatggagcatttaaaatgcatgttttacgcatgggcagaatttttcgaagctgacgaggagaccgcaaacgggattgccgaacttctcgctgacgccgcggagatttccgataaagatgcgtttatcaaaaatttaagcagtattttataattgcaaaaagaccggatcctgcgtaaagaacggatccggtcttttttgtttacgcgaataacgagccaaagtccgcgcttgcgcgagaccttggcgactgtcgtgataacttcccgttacgcaaaaaggttcatttttattcctctgtgctgtcatcttccgggcagagatactcgatcagagcgtcctgctcttttccggacaggcggaagaaaccttcgcctacgcagaggtaaccatcttcaacataaacttcgctggaatcaaaatactcgcctttcgcgaacttgcggtttaattccgcattgatctcgccgtagttttccactccgaggatcttgttcttcttctgttcgatcttcattaagtgataatatgctttctttaagtaatcgccccgttttttcataagagttctcctttgctttttatattctctgtaataaaagtgtacgggataatgctgagtttgtcaatcaggtatcctgttcgtcaaaaaaataataaaacattcaaaagcagatttcatcgtcacttatgtggagcggacgttttcttggaccaagttgctatagagaaatattgggcagtaaagcaatccctccatccactgatgaactcaatgaataaaggacttatttaggtgtccaaatatgaagttgcaaaattgccgagcgatctcctttccacaaaattttttataaaatcgctctatttattgctcgtttatggagtcgaacatctgtttgatacattttttgataactttctgtttccgccaaaaaaataagaaccccgcaaacccgcataaacgctggatttctcgagattcttataagtggacctgaggggaatcgaacccctgtccgaaaaccaatcccctgttcttctactatcatagtctgttatttaaaattccctcccgcgcccgaaagcagacatcctgactcgtttggtagcttcatgatacgcccgcgtgcgcaaagctttgcacgtgtcgtttcctgctttaaatgatgccggtgacttaaaatgcaggtcttctaaggccgacagctgcctaaattaggctgcgtatgctaattcgtcgttagcgtttatatttaggtttgccatttaacgcattgcatgcggatagcttcaccagcttcaaagtccccgtcgaaaccagtacaagcccttactggcactctcttcggagttaagctgtggcagagtctgtctgcagtctctgccgcacggcattgttttttccgggcgaccccggaccaaaaactacacccttgtgtaacccaaatcctatcatcatttcttcgaattgtcaagtgtatctttgcaaagccccctgcagttgtcatcatgcacagatatttcccgcctgcacactgcagacagatcctgccggttctttctattatagagtcgcaggatctgtcctcagccgcatctttcagcatttacaattcagaaaaatttctgtccatcaaaatccgctgccgctgccgtacgcatttacatgcactccatcaggatctgatagatttcttcacgatccagttcacgcggatttgtctttatgatattgcaggtatcaaagagctgcaccttcctgtaccttcgcatatgtaggattcggcatgatcccggaaaaatccacgatctccttccctgcttccgtgagcagagatctcatttcgtcgtaaactcccgattttttgatcgaacctccgccgtatgcaagcatcacagtctttccaaaccttccaagttctgccgcgatcgcctttcttgccccaccttccccaaaatataccttcattggatacgaataaacaaattccttcatgatagtttcctccttcatattgtctggtcctattacttttttgcagccgtatactcttatggatcttccgctcctgtccctgctgccggatgcaaatctcccggcgcacagaacacgcccgatttacgatcctgtgatccgattgttcctatcggttgttaccattgattataggatccggttgtaactaccggtcaaggggtttttgaaatttttttacataaaccaccagaatccgcaactgcatgatacaggttcttcagcccggaaaattccgtttacaaaaaatagcggttgattcttataaatgttttcttatatattagtgtatcttatttataagtattagtacaacttttaaatatttctgcaaatacctgtaaaatcattccagttatttctcttccaaaacattttcactttcatatgtaaatattgtgcaaatttaatattgacaggaaccgtcatttaatggtacttttacagtaaattcgctcagcgtttccataatgcggaaatgctggaaaccaaaatataatgaagaggtgtagacatgcaggaattaaaaccgatcaaagaaggaaaagtacgcgaaatttatgacaatggcgacagcctgatcatggttgccaccgaccgtatcagctgttttgacgtgatccttcacaatgaggttacctccaaaggtgctgttctgacccagatgtccaaattctggtttgacctgacaaaagatattgttccgaaccatatgatctccgtcgacacaaaggatatgccggaattcttccagcagaaaaagtttgagggaaagaccatgatgtgccgcaaattacatatgctgccgatcgagtgcatcgtccgtggttatatcacaggaagcggctgggcaagctacaagaaagacggcactgtctgcgggatccgtcttccggaaggtttaaaggaatccgacaagctcccggagccgatctacaccccgtccacaaaagctgagatcggtgaccacgacgagaatatctccttcgagcagagcattgatcatctcgagaaatatttcccgggaaagggccgtgaatatgcagagctccttcgcgacacaacgatcgctttatataagaaatgtgcagaatatgcactcaccagaggcatcatcattgctgatacaaaattcgaattcggtctcgatgacgagggcaatctcgtgatcggcgacgagatgctcacaccggacagctcccgattctggccggcaaaaggctatgagccgggtcacggtcagccgtccttcgacaagcagttcgcccgcgactggctcactgcacatccgggcaacgactggacacttcctcaggagatcgtcgataagactatcgcgaaatatctggaagcatatgagatgatcaccgggaaaaaattagaggcataacccccacaaacctccgcttctgagtttttccattt

SEQ ID NO: 2004 - DNA, 28318 bp, Unknown
  gut microbiota DNA sequence
tttatttactttctcatctcaagaacatctgcaaatgcctcgatagcagttgcagcctgtccgaagtctctcatctgctggtcaacaccaagtttgatgtgcgggatacctgcgttgtcgagagctttcttgaggtacggatactccatctcctccggatcacagaactgctgcatgaagagtacaagaccctgagcgccgctcttcttaaccatgtcagctacgaactcgccacggcgattcttggaagactgcggatcataaagaaggatatcgtaatccatgtttgcaaactgttttgcaagagctctgagagcatcctgctcgtcctccggaacatctgtacggaaggaacggctctcatgagcaacatcatcagctgcgatcgcgatgttgttgttctcgaagatctcaagaagcttcgggttgtcaacgatgataccggatgtaacaacctttgttcccttccagtcacataccggaagagctgcaagctctttgtttaactcctcaagttttgcagtgtattccggtttctccatgaagaagaatgcctttaatacagcggaacgctttgtaggagttacaacgtcgcagtgctcgttagcgagttttacgaactcacggcgggctgcacggctcttgttgtaaaccttaattgcgtcaaggatcgcatcgttggtgatctcgtgaccacatacttcctcgagatcagccttaacgtttgcgtactcctcctcacagaacttaagtccgaactcttcgaaacggttctgcggatgagcaaggaagataactttcatcttgtcgcccatagcaacacggaagttctggctcatcggacgtaatgtatcacagattgttggtgtgatgattccgtctaactgatccattgttccgtcaaggagcatctcaagtgcgagctgagcgattgtgcagtagaaggttgcacagtactcttttgcacggctgattgtcttgttgttggagccccagattcccatcggaaccatgcctgcagcatatacaagctcttccggagcgtagtacgggagaacgccgatgaccttcttgccctgtgctttatattcagcaagctgctgtttcggagttgcagcttttactttaaattcgtctaataatgcgttgatactcatggtctatttagcctcctttgcctggatgtttgcttccatagcctcaacaagaccctgtactcgtgtctcgtactgagcggcattgaagttacgcgggtcagcctggtcaccatcgaatcctgcacacggaatgccaagatccttcgtgaagcgacgctgcatctctgccatgtaaccggaccacggcttacagcttctgttgtagtgaacgagaacgccatctaccttgttgtcgcggcagatgccttcacgccatgcaacaccctgctcgatacatacagagttcggtgctttatagtaagcacgagccatctcatccagaccattgtatacgaaaccgaatgccggtgcatatacaactgctgttacgttcacgccgttagcctttaacggtttgaacagagccggaagcttcggccagcacggaataccctcgaacattacacggtatttctccgggaacggagttgttgtctcacccttagcgatcgtctcgtcaaggtcttttgctaactgctcgaatgcctcagcagcctcaactcttgcacgtgcagttacgacgtcagccatatggttgaacaggtcgaaaccactgtacggagccggtttgtactgtaagtaatcacagacttttaaccatgcttttgctgtacggtttgcgttctcacatgcatgctcgaacttcttctcgtcgaacttcttgcctgtaagctcctctaactgcttgattgccttatcgaactgtccgcgaacatagcgaacgttctgatcagcaacttcaacagtgttgttgtacgggatatcgatcatgataagcggaacgttgcacatacgggcaatgttctcataccactttgtcatacagttacagatgttgttgcagcagagaacgaaatccggctgcgggatctgcatctgacgaatcggggagatcgctgcaatacggcgctctttatccggtccatccggaagcttttcaagctcaagaaggtttacaagctcaagatacggagtctgagtcttcggatcttttttcggcttgcctgttgcctcatcgatcactacgtttccgtctgcgtcctttaacggcttacctgtgctcgggtcgatgatgtactcacctgtctccgggtcaaacttacgcgctacacggacaccggctgcgtaagcaaggctgatacgtgcgtatccacagatatcgttgtcgtaaccaagatcctcagctgcctgacacataagctcaccgtaacggtttgctgcgataccagctgcctggttctccggatacataacgtttaaatcaaatgctgctgcgagctcgcacgggaatttggaagaagaccaaccaactaactcgcctctctttttggcttcgcgcgcgtctttatgaacgtcatctacgactttacgcagcgcaagaacaccagggctaacctgctttgccataataaatatcctccatttcttatcaatcatgaccgaccgcggctgcgggacaggcccacagctgtttttcagccataaaattgcataacctaattctgtttaacagatccatgcagattcacatggacgataaacgtcaaactgttttatgcgcggcggcttgctgcctgatatgcatataaggctgcaccaagcgcaccgttatactgtgtcagaggagatctgtggatctcacatccaagctcattctgaagagctttgactacaccctcgttctgagcgacaccgccagtcatgacgagtgccggaacaactccgatcctatgggcgagtccagtgacacggtgagccacggagcggtggattcctgcgataatatcgcacttatcggttcccatcgacagctggctgataacctcactctccgcaaatacggtacatgtggagctgatctcgactctctttttggagagggaatcaagatgaccaagatcctggacctttacttcgagaacgcccgccattacgtcgaggaatcttccggttcctgcagcgcatttgtcgttcatctggaagttggtcattgcaccgttgtcaatatgaaggaccttaacgtcctgaccgccgatatcaatgacggtgtgaacgtcagggaacaggaagtaagctccccttgcgtggcaggataactcactcatctgtttgtctgcaaaattcattaaagagttacggccgtatcctgttgccagggtaaatgccacatcctcttttttcatacctgcgttttccagcactgcatcgatcgcacgctgtgggccgctggtacctgcacctacatcgatcagggatttcgctacgatctcctggccatccttaagcataatgcatttggaagccgtggatccaacgtcaattcccagggtgtaaattgcactcataataacctccgggtatactgaaaatgtaaaatgaaactggctttgttataccagtatatccaggccagagaaagtactcccctggcctggatacgtatcattttactctatccttcagtcagaatcaagcttttttaaatgtgttccactcacggatcgcacgcggtgttaccatctgatggaacgggcagatagactccggattctggtaagcagactctgtgaatgcctggatgtacggacggatctctgtaagatcaacgatctcgtcagccatacccttgattgtgcagtatttcggacgggacttgtcgtggtacatctggatcatgtcgttcatcttgtcgatgatcggctggagatcctcaccggccttcttagccttaacaagttttctggagtacatagcgtttgctgctgtctcacccggcattacatagtactcggaagcgcctgttgcaagggagaatacgtttgtatcattgccctgcggcccgccaagtacgtagtgagcagctgcggatgccttacgaagtgtaacctctaaggacggaagcttggagttctggatggagtagatcagagactgaccaagaccaagaagctcagccttctcagcgtcatcacctacatcgataccagttgtatcctgtaaccagatcagcgggattctgtcacgagcgcaaagtgttacgaactcgttcatcttgatcaggccctgacgatataactttccgccgataccaacagagttctgtttgtactccggatagttcataaggagaccctgaacgtttgccacaacaccaacaagaagtccgtttactttagcaagacctgttacaacctccgggccgtaaccgttcttgtactcagcgaactcactgccgtcgaaaagacgaccgattacatcgtagatatcgtacggacgtttctggttcatcgggatgatgctgtaaaggtcctctgccggaagagccggtgccttcggatcatcaacacggaagaactcgaggttgtatgccggaaggtagctaacgtacttcttgatgccctcgattacgccgtaatcgttctcatatacttcacggaagaaaccagtctcgtcgtagtgaaccggaacggaacccggagccggaacgtgcttcttgccgttttcgatctgtgctgcgatgatctgctcagcagactcttcgtcaatatatcccttcgggttcataccggaaagaataccagcgccgcctactgccatgtttgcctggctgtgtgcgataaggattgtcggggaaatgctgtggtatccgccgcctgccgggtttgttccgtagatacctacgataaccggaacaccaagctggtttaactcagcgttacggaagaacggtgtaccgccgccgcgtctgttcgggtaaaccttatcctggttcgggaactcaacgccggagcagtttaacagatatacgagcggaaggtggagcatcttagctgcatcggaagcacgcagaaggttgtctgcctgtcccggtacccatgcgccggccatcttcttgttatcggaagcgatgatgtaaacccattttccgtttacacggccaagtccgttaagaatgtttgttgtaccgaacttgttgccttccgggttgtaaaggctgtttaacgggcaccatgttccctcatcaatgagagcgttgatacgctgcattgcggagagctgtccgcgctcgtttaacttctcttctgttgtgataccagctgcaagagctttctcgatggactcatggatgtcagcctctacggctttgatctcttttgcgttctcgtcatttacatttaccagctctttaccaacagtaggcatttcctggaaatatttcggcatggaaaagtaacccatgttcttcctccttatatatacgcgatcgctgcggtcagcggtttttgccagtcactgaccgcggcatgattatcatctataaaatgatcgtttcgattattttgtttccttcggaactttgatgaaagcctgacctgggtcgatctcttcacgaataacgcgaataatctccggatccgggccttccataagctgtgctctggaggtatcgatctcgaaacctgtgttctcctgaaccatttccggagaggagaatggatagtagtaagcaaggtacattctcttggtctcttcgtcgaacttcatgataccaagatctgtaactaccatctgcggtccgcggttgcccggaagacctgctctctcacgtccgccagggccgtccatccagccgcagcttgtgatgtagtcaacatgctccatgaatcttctcttctggtgctgcatcataatgatggtgttgcagaatgtagcgataccgttagctccgccggaacctgtgaaacgggttgtcggctgaacgtagtcgcctttaccgaagatacatgtggagttaacgttaccatacgggtcgatctgagcgccgccgatgaaagcgatcatacggtcagcgtcatgaagccactcgttagcctcgaaacctacgaagcgaacgttcggccactgtactgcacagtgagccatgaaacggttatcacctacggaacgcggtacctctaccggtgagcagtccataagtccgctctctacgatcggatggcagctcgggcaaaccacacgcttcgcaagagaagcaccgattaacggaagaccggtaccaacgataacgatctgattttctttaatattttttgcgatggcataagcctgcatttcctgctttgtatactttgtataatcagccatttttgaatttccctccctcaattagtgtctggtagaatagccaagatgcggctcattcttaaggttcatgaggcgagcgccgccaaggacattaagaagatcatcctgatccttgcagccgtatacgtatttctggaggtaatccttgaaggtctccggaatctttgtgccgttagcagcatcctctgcagcctgttttgcaacttctgcagcctttgcaagcttctcgtcttccggtttagcagcagcagccttctcagcctttgcagcagcctttgcgagctgtgcctttgcatcttcagcgtcaaggtacttggaagccttatcgtactccttaagtcccttatcatcatcatcatagtagccatagcactgtgccggccatgcgccgtacggagtacgaacgacagcgtctacgcactcgccgaagattcttgtctttgtaggatcacggcggatgtactcgtcacttacgatctcctcgcatgtaacgatcgtacgctttgcagcgattgcgatatcaacatcgtggaactcatcaccatcgataatgcaggttccatccggagatgcctgctgtacatggatgatcgcgcagtcaagcttcggaaccggaacagcaagaagcttctcgcccggctcaaacgggttctcgatatctacgcactttaagttgtcaacgccttccattgtttttctcttctcttcgctgatgccccagaatttaacaaggccggaaccctgcatcattcttaccgggagatacggaagaccaagagaagctgcgtgaagctgtaacataagaacgtcctgagagtagtcctcgtatgtaagctcacctttctcgattgcagcacggaaacgacgtgcaacgtttgtataaccagagtttgctgtgtagcagttgatgtaagctcttacacgaccctcaccgattaaggagtcccagtctccgcctgccgggccggaccagcctacaaaaccagttttaccctgacgaaggatctcgtaaacagcagcatacggtttacggtttgttgtaaatccgccgaggcagagtacatcgttatcatgtacgtacttctctacggcgtcgtgtaatgacataactttattagccacaataaagcctcctttatttatatttgcagttaaaaggcctgcctgttctcctcagacaggcctgaactgctttttagttcctgtaaaaatataccatgttatgaaacggatttcaacttcgattccatttctggaatggattttatcaagatttgaacatcagcatgaagtaaccggctgctactgcagaaccgataacaccagctacgttcgggcccatagcgtgcatcagaaggaagttggtcgggttctctttcgcaccaactgtctgagaaacacgggctgccatcggaactgcagatacacctgcggaaccgattaacgggttgatcttaccgcctgtgatcgcgcagagaactttaccaagcaggataccaccgactgtcgcgaaagcgaaagcaagaagacccatagcgatgatggcaagtgtctggacacgaaggaagatctcaccatttgctgtagcacctacggttgtaccgagcatgattgtaaccatattacaaagtgcgttctgtgcagtatcggaaagtcttccggtaacgccggactcacggaacaggttaccgagcatcagcataccaagaagcggtgctacggacggaagaagcagggagcagaacagaacaacgaataccgggaaaacaactttctcgactttgctgacttttcttaactgcttcataacgatctgacgctctttctttgttgtgaggagcttcatgatcggcggctggatcagcgggatcagagccatataggaatatgcggctacagcgatcggagctacaagatccggagccaggttgtttgcgatatagatcgcggtcgggccatcggcaccaccgatgataccgattgctgcgcactcacccggtgtgaaaagtccggttgcatttgcaagtgtaaatgcaacgtagataccgaactgagcggctgcaccaagaagaaggctgaccgggtttgcgatcaacggaccgaagtctgtcatcgcgccgactgccatgaagatcaggcacgggaataagctggacttaacacccatgtacatgattctcagtacaccggactgataccagtgatctgcttcattcataagacctgcaagcggaaggttcgcaaggaacataccgaatgcgatcgggagcagaagaagcggctcgaactgcttcttgattgcaagatataataaaacgaaggatacaaggagcataacgccctgctgccaggtgattgcggcgaaacctgactgagcgaggagctccgagaaaactgaaagtatattcacgtgtggcacctcccgcttagtttaaggtaaccagaactgcacctgtctcaacggaatcgcctgtgcttacattgatagctgcaacagttcctgctgccggagcaacgatctctgtttccatcttcatagcttccataacgattacgcactgaccgtagcttactgcgtcaccgactttaaccttgatgtcaaggatcttacctggcatcggagcttctactgtctgtccacctgcggacggagctgctgccggtgctggagccggagccggtgctggtgccggagctgccttcggtgccggtgctgctgccggagccggagctgccttcggtgccggtgctgctgcgaggatcggtgccggtgcgcttacctgcgcgcctctgtcaagcggtctgtactcgtctactctctcgatctcaacttcatacttttttccgtttaatgttgcaacgtatttcatttcttttaatacatcctttcctttttttgcgtgcagctgattcatattcgcatagctgcttttgcttttacatttgggtcttttacagttccttgatacttactacacggaactcttccccggacaatcttgcttcctcactgactgccgcgagaagcactgcataggattcttcatcgatggccggagccggtgctgcaactgccgcagctgcctttggcgcactctccttaaataatgtaccgatgaccttagagataatgataaccgcgattgcgagcactgcaagtgctgagaatacgactaacaatccaacgagtgaaatgacaatcgaatccgcaacggtcataccgcctgtccacatatacttaccgcacctccttcgtttcgtttcatttaagaaacttttgttggttagttattccgtattgtgaaatgcattccacatttttctcggcgcataagggtacttgacaaatcagcacccataatcactttgtttctatgcagttttcacaatatcgtaatttgagtatatcagctttctgcgcaaatgtcaacaaagccgattgaaaaaaatttatcaaatatactaattcaacgagatataaagacaagtacagcttatgtccttatatcgacaaacctactctgttagtactgttttccagtcctgaccgttccgttttcactgctgtcccggcacattcctgcgccggagtgcttcgcttgcgacagtcttcagcctcgtgggagttcacaaaaaccgcccgtcacctcctgcatgatatgcatgaatcgacgggcggtcacagtctcagatatggttcccgatttacggctgttttccaatataagcaaggattccgccgtcgacgtagaggatatgtccgttcacgaaatcagatgcctcagatgcgaggaataccgccggtccctttaagtcctcgacagtcccccatctcgctgccggtgtcttcgcgatgatgaactggtcaaacgggtgacgggagccgtccgcctggcgctctcttaacggcgccgtctgggatgtcgcgatatagccaggtccgatgccgttgcactggatgttgtattctccgtactcggaggcgatgttctttgtgagcatctttaatccgccctttgcagccgcatatgcggatacagtctctcttccgagttcggacatcatggagcagatgttgatgatcttgccggatctttttttcatcatcgacgggagaaccgccttcgccatgataaacggtgcgttcaggtcgacatcaacgaccttgcggaactcttccgcactcatctcatgcatcgggatcctccggatcattcccgcattgtttacgagaatgtccacagtgccgatcttctcctcgatgtcagcgatcatcttctttaccgcttcctcgtccgtgacgtcgcagacatatccgtgggcatcgatgcctttttctttgtatgcggcaagtccgcgctttaaggactcctcattgctgcagttaaacactacggtcgctcccgcttccgcatagctctccgcgatcgcgaaaccgatcccatgtgccccgcctgttaccagagcaatctttccttccagggaaaacatgcttttcttatccattttgtctgtttcctttctctctataataataaggtatcgatcatcctgccgtcatccgttctttcgttcaggatatcttattttaaatctgtaggagtgatcgtatccatatcgtcaaactcctggttctctccgcccatcgcccagatgaaggtgtagttggaggttccggctccgcagtggatgctccatgacgggctgatcaccgcctcctcattcttcatgacgatgtgtctcgtctccgtcggctcacccatgaaatgcatgaccacctggttctccggaacttcaaaatacatatagatctccatgcggcgctcatgtgtgtggcacggcatgctgttccagacactgcccggttccagggccgtcattcccatggacagctggcatgtttttaaaacgtccggatggataaactggttgatgactctcttattggacgtgttggagtcaccgagcggacgtttcgcagcatcctttaaggtgatgagtctcgtctcgtaagatgtgtgggccggcgcgctcaccatatagaattttgccggagcattttcattgtcgctggcaaagatcacttctttcgttcctttggtgatgtaaaggcagtctttataatcaagatggtactccaccccatcggctgtgatcgatccggaaccgccgatgttgaagatcccgatctcacggcgctcaaggaagtaatgagtcccgaagtttttccagcaatcgatccctttttcgatggaaacatgttctttcaccggcatgcagcccagtgtcaccatgcggtctacatgagagtagacagataccacctcgtccgggcggtagagatcctggatcaggaactcatttctcagttcttctgtcgtgtagcgttttacatctctctgatttgcggaatagcgaatatccatatgttctatacccctttttatatgatattgtggtcagaagtccgctcctatctccgcagacagagctacagaaagcatcggaactcctgaccctgacagcattctatgcagaacgacaaattttgtcatcctatctgactatctgacttttttcacggcgtaccggagtgctccgacgccaaaaagcgccagaaggaaagcgtccagcaccaggaacatgatcgccgcctggaagcccagcttgtccgcaaggactccgatcacctgcggggtcaggatcccgcctagggaaccgatccccgtaaacaccgacattccaagcggggaatttcccatgagatcgccggtaaaggccgtcgttgtcgggaatgcgcccgccatgccaagaccgagaagaaccagggctgccactgccatcgccgtattgcctgcgaatacaaggatcagcaccgaggcaaactgaagaacggagatcatagccaggatctttgccggcggcacattcttcgagatcgaagcgatcacgatcctgccgatcatgatcatgatccaggttacagacaccataacggtcgcgagacttgcggacataaatccggtgctctttaaataggtaacaaaccacccgtttacggagttttcaagtcccatatagaagaacagtgcgccgactgccaggagaaatcctgtattttttaagaaccagaacttgtccttctgtcctgatgccggaccattctcctctcctgccggtttcttttcttccttttcgatcttgcggtaatccatcgtcgcataagaaacaacgatgagaaccgtgaggactgcaagaagctgtaagatcgtcttccagttcatccccgcacccataaggatcatggtgacaaacggggacaggaacgcgcccaccgcataccacatgtggagcaggtttaaatatttgttggagctccccgtcacctgacggatcgcgtggttattgatgatcgtgatcattccctttgtaataccgatgagaaagatcatcacatagagaaccgggaccggaagtccgaatgtaaataaaagcaggcagaccggatacgggatcgcgaggaccacgaccgccatcttctgggacatcatcccgcaaaataccgggtagaccaggctggaacataagtttccaatcgccaggaacgacagcagaccgcccgccgccgtaaagctcaggtttctctcttcgatcaggtttggcaggatgactccgaagatcaggatgaccattccgctgataaaataagccagataacagtgatcgatcaccgaccgcctgtcttctctcgtgatttccatcatatgtgttctcccccacaaagcttctgaaaggcgccgcagtgaccggatcctctccgctttattgttaatttttctccatactttttccatcatatcaccttttttccgtcaagacaaggaggatttcccctgatattccatcttgtggaatttttatactatttttttgtaagaattttccactccgaaaattccgaaggatacttttcgctgtggattttctggtctgaaaatccgtaattcgttgacactctccccgacttactatacaataagaggaaacagtgtctgccgcctgccatttccggcagtttccggcagtttctcccgtctctgcggagagggggcaaaataaggaggataaaaggtattatgaaggacataaagaaggtgacgttgatcggtctcggcgcgatgggggtattttttgcgccgcgtatttcagaaaaacttggggctgatttccggatcctcgcggatggtgcgagaaaagagcgcctggagcgaaaaggtgtgaccgtcaacacgatcaattatcgctttccgatcatcaccccggatgtagagggagatccggcagatctcgtcatcatcgcggtaaaaggatatgatctggagcaggcgatcaaagatatcagaaatcaggtcggaaaggacacgatcatcctctccgtattaaacggcgtcgagagcgaaaagcaggttgcagctgtctatggagaagaacatgtcctgtattcctacatgcggatcagcattgtcatgaaggacggaaagacagagttcgatcctcacaaaggttcgatccacttcggggatctgaagaatgatccggaacactattccgagaatgttctcgcagtaaagaatctattcgatctctgcgggatcgactataaggtcgatgcagacatgttaaaaggcatctggttcaaattcatgtgcaatgtcgccgaaaatatgacctgtgcgatgttcggcgttccgttcggctctttccagaagagcgatgacgccaattatttccgtcacaaagccatgtgggaagtgatccatgttgccaataaacttggaatcgacattggtcagaacgagatcgaccgccaggagcacacgatcggacgtcttccatatgaaaataagccgtccacactccaggatctggaagccgcaaagcatacggaagtcgatatgtttgccggtaccgttgtacgtctcgggaaagaactcggcgttgagactccggtctgcgagtgtttccttcatgggatccatctgatcgaggaccggatgttcggagttatctaagtctcatacttctgcaagtttaaagctgtccgctgtttgtttctgcggacagcctttctttttgtttttctcttttctgcttctttttcatcctgttttcccggcaaaaccttattttattagttctttgggcaatactgaaaacaaccttgcatttcccgacaggctgtattatattaaacatatgaacgatggttcatatgtttatgtataaatagatcgcaaatataattcttaggaggtcgactctatggatgaattagaaagaaccaagcaggaaccggatgagcatgaagctgaagaatgctgctgcggacaccatcatcaccacgatgaggaccacgaacacggcgagcatcatgacgcgcatcacgacgagcaccatgaacatgaacactgcggctgcggacaccaccatcaccacgatggcgaggaccactgctgcgatgatgacgatgatgacgattgctgcggacatgagcacggcgagcaccatgaacatgaacactgtagctgcggacaccaccatcaccacgatggcgaggaccactgctgcgatgatgacgatgatgacgatcactgtggacatgagcacggcgagcatcacgaaggtcacgaggaacatcaccactcctccgctccgaaatccgagtgcatcgtctacgtgatgaaaaacatcgactgcgcaaactgctccgcaaagatcgagaaaaagatccaggaactcccggaagtcgatgactgtatcctgacgtttgcgacaaggcagctccgtgtctactcttccgagggcaccaaacttctcccgaaaatgcaggcgatcgccgatcagatcgaacctggaaccatcatcgaggtccgcccgaagaatccaaaggctgtctgcacagtctatgtgatgaaaaacatcgactgcgcgaactgttccgcaaagatcgagaaaaagatccaggaactcccggaagtcgacgattgtatcctgacgttcgcgacaagacagctccgtgtctactcttccgaggggacaaagcttctcccgaagatgcaggcgatcgctgatcagatcgaacctggaaccgtcatcgagatccgtgaggaaggaaagccgtcctccgacacccacgatgacaaacacgaccacgatattccggagctgctcgccggagctgctttatttatcatcggtgagcttctctcccattcgatgccgccggtatcgatcggctgttttgtgatcgcctatctgatcctcggacgcgaagtcctcctcaccgcactcaagaatatgaagtccggccatgtcatggacgaaaacttcttgatgagcgttgcaacgatcggtgcgttcgcgatcggtgaatttggcgaggcggtcggcgttatgctcttctaccgcgtcggtgaagcgttcgagcaccgcgcagtcgagaagagccgcagtcagatcatggaagccgtcgatctccgcccggagactgttcttctggatgagaacggcactgtccgagagatcccggccggttctgccgccgttggaaatatcgtgcagatccgccccggcgaccgcatcccgctcgacggagtcgttatcgagggcgagagccgcatcgatacctccccgatcaccggagagccggttccggtatccgtaacgatcggaagcaccctgacctccggctgtgtcaatacctccggtctcttaaagatgcgcgtggaaaaagagctctccgagtccatggtcacaaggatcctggattctgtagagaatgctgcagccagcaagccgcaggcagaacgctttatcacaaaatttgcacgggtatacaccccgttcgtcgttgctctcgcagctgcgactgcgatcattccgtccctgatcaccggaaactggtcccactggatctacacagcgcttaccttcctggtaatcagctgtccatgtgccctcgttttaagcgtaccgctcgcattcttctccgggatcggcgccggatccagaaaagggatcctctttaaaggcgggatcgccctggaaacgctgaaaaatgtaaagaccgtcgtcatggataagacaggaaccatcacaaagggcaatttcattgtccaggacattgttccttccgcaaattacacagcagttgaagtccttcaggctgcagctgcatgcgagaccgtttccacccacccgatcggcacaagcatccttctcgcagcaaaagagcaggatctgagcctcgaaaacccggcacagcttgaagagatttccggaaagggcattcatgccagactttcctgcggagatgtcctctgcggaaacagaaagctcctgaccgagttcaacgtggactgcggtgcttacgatgaaaacggagccgtcaccaccgtttatgtagcgatcaatggtactttcgccggaacgatccagatctccgacacgatcaagccggaggcaaaggatgcgatcaggacattaaaatccatggggatccgctcagcaatgctcaccggtgacggggaagccgctgccgaagctgttgcggatgctgtcgggatcgaccatgtttatgcaaagcttctccctgccgacaaactggaaatcctgcagaaactccgcgccgagagcggcagcgcgatgttcgtcggcgatgggatcaatgacgcaccagttctcgcaggcgccgatgtcggagctgcgatgggcagtggtgcggatgccgcgatcgaagctgctgatgtcgtatttatgacttccagcatggatgcgatcccgaccgcgatcaggatcgcaaagagcaccggcgcgatctccaaccagaacgttgtgttcgcactcgcagtaaaggcactcgtcatggtactgggactcatgggaatcgcctccatgtggctcgccgtgttcgccgatacaggagtggcgatcctctgcgtattgaattccatccggatcctgtacaaaaaataaagcaggaaattccatctggatttccccctaatcattaaaaagctctgaagaaccttttcacattgttcttcagagctttttcttatgcccgatcatattttcacatcttcgtctggtttcaggcagatatctttcacggtccggacttttttcacgtagcccccgcttcttcgcccggatctgtgctcttctatttcagcattcccatcaccacgaccgccacaaacaacacgcacatgcatccgataaagatatcgatcgtccggaccgacacgttgatcttatcgtacatgcgctccttgatggatctgtttttcagcctctcattctcctcctgaagccgtttattttcttcagcgaattcttccaggctcttttccttcaaggtctccacagcctctttggcggcctcagccacagtctcagcctctcccatcttctccatctcttcttccatcctctcacctccagctttttccggattcacacaacagcaacaagtgaaaacacactttgcgagtttccccttgttatcgcgacagtcgccaaggtcccgcgcaagcgtggactttggctcgttgttcgcgtaaacaaagaacgggcttcggaactcatccgccgcccgttctctcaaactgcctaacaacagtttctttattacttctttgcaatgtactttctgatatcgagtgcgatcgcaactacgataacgataccctgtgcaatgtactggtagtttgtatctactcctaagtactgtaagcaggtctttaagatctcgaatacaagaacgccgatcaggacaccggagatacgtccgataccaccgtttacggatacaccgccgatggtgcaggctgcaatcgcctcaagctcccagccctgtcccatgttaacggaggaaccaccggattttgctcctacaaggaagccgccgagtgcatagagagctgctgctgtcatgtagatgatgatctttgtcttctttgtgtttacaccggaaacctctgcggactgctcgttgccgccgatcgcatacatatattttccatgaggagtcatgttatagatgaaccacataacaagaccaaccgcaagggcgatcaggaacaggaacgggatcgcgccaaagagttttccttttgctactgctgtgtatgcgttatgataaccaccgatcggagtcgcgtttgtgtaaacaaggcagacaccataaacgataagctgcataccaagtgttccgatgaaggccggaacctgtaagtaagaaattacgatgccattgatgaaaccaaagatacagcaaattgccacacagatcagaagaaccgcgagaacccataagccccaggcatttccgaaatccggaaggttctggaagaacttgccgctgtaatccggcttctgaagtaaggtacctgctaagcaggcagaaagaccaaccatacgtcctgcggaaaggtctgtaccttttgtaattaagcatccggatacaccgcaggcgatgatgaatcgcggagctacgtttaatgcgatgttgattaagttgccgcgtgaaaagaatgtaggctgcttgatcgcagtaaatactgcaagtaataaaagaacgacgatgattccattattgataaggaaatcttttgcacttacttttttcgctgtcatgactgaacctccctgtaatctacttgttttccttgccgcttaaagtgaattttgtggcaaaggacatgatcttctcctgagttgcgtcttctccttccacctcaccggtgatgtgaccgttgcacattacgatgattcggttggacataccgatcaactccggcatttccgacgagatcataatgatggatttgccctgttttacgagatcgatcatgatctgataaatctcgtatttggctccgacgtcgataccacgggtcggctcatccatgatcaagatatcaggattgtttgcaagccatcttgcgataattactttctgctggttgccaccggagagagactggatcagcgtctttccgctcggtgtcttgatctttaatttcgcaatgctgtcctttacgaccgcatcgacttcttttttgttgatcttacccatatgggtgtaattcttgtaggaagcgatcgcagtattgtcatcgatgctcaggcatccgaagataccgtttccgcgtcgatcctctgtgatcattccgacggagctgttgatcgcatcctgcggtctcttgatgtgagtctcttttccgaggatctccacggtaccgctctcaatgtggcgcattccaaagatcgcttccataagctcggttctctgcgctcctaccagtccgccaaagcccaggatctcacctttctttaattcaaaagagcagtccttgaaggaattcggcagaatacttgtcaggtggctgacctttaagaccgtctcatccgtccggtaatcatccttcggcggatagacgttgttcaactcacgtccaaccatctgttttacgatctcctcatcggagatatcctcgatcgcccaggttccaacgtatgtaccgtcacgcatgatcgtgatatcgtcggagatctggcggatctcagccatcttgtggctgatatatatcatagaaacacctctggatttcaggtctctgatgatccggaataatgcttctacctcgttatcagtcagtgaggaggtcggctcatccagaattacaaggtttgcactctggctgaccgctttcgcgatctctactgactgcatctgtccgattgataaggtgccgagttttgctttcgggtcaaaatccatctttacatcccggagccatttctcagcttcactgttcatcttcgcatgatccaccaccttgatcggtccgaagtttttcatcggataccttccaagatacatgttctcagcgatcgagcgttcaggaatcggctgaagctcctgatgaaccatggcaagtccttttttcagcgcgtcatccgggtttgcgatctccgtcttgacgccgtcgatatagacctcgccttcatccattttatagattccgaaaagacatttcatcagtgtcgattttccggcaccgttctctcccatcagtgcgtggaccgttccggggcgaacccgtaagttaactccgtcaagcgcttttacgcccgggaaagtttttttgactcctctcatttcgagtctgtactgttctgccatcccaaaactcctttcagttacactcccccgcatttccgggtggcatattttaatcaacgaaccggatgtgttagacaacacacccggttctcatttgttacagtatcaattactttaacatatcaaggatttcctgagcgttatcctttgtaaccttctcgtagttaaccatgttgactgcgtcaactttctcaccgcttaagaacttaacagcgatatcgcttgctgcctgagcctgtgcgaagtggttgttgaatacagtacctgtctgcttgccgtcgattacgttctgaacagcctctgtcagagcgtcaacgcctacaaggtagatatcctcgttaactttacgtcctgctgcttcgattgcctgtaatgcaccaagtgccattgcatcgttgttgcagaagattacttcgatcttgtcgccgtactggtttaaagcatcctgagcgatctgctgagcttttgcctgatcccagtcaccacgctgctttaagagttcctcaacttctacgcctgcatctgtaagagcttttacagagaactctgttctgtactgagcatctacgttctccgggtcgccctggatcatgatgtaggaaactttgccgtcgccgttgatatcgcccttgtttgcagtctcaaggatctcttcgccctggtatgtaccggactgtcttgcgtcacatcctacgtatgtagcgttaagaccttcagattcccatctctcttcttctgctgcgtccggctcacggttgatgtaaacaaccgggataccagcttctttacacatatctgtgatctccggtgcggaagaagcctgtacaaggtttaagatcagaacgtcatatttctgtgtgatgaagttctggatctggtttgtctgctctgcctgatcgcccttaccatcctgaacgactacgttctcagccttgaatccaaggtcttcggttaagtagcgaactaactctgttctgtaaagagtcatgaagttatcatcgaatttgtagatgctgatgccgactttcttgtctgctacatctgtggttccagctgcctcagctgcagttgttgctgcttcggatgctgcctcagaagctgctgcggttgtagctgcctcggtagccgctgctgttgttgctgttgtggaagagcttccgcatcctgctaaagacagggccatcatggaagccagtgccattgctgttactttctttgtcattctcatgtttttgaatcctcccattcaaaaaataattttgaccgtttaggcattttcccttaacgacaagttgattatagcctgtctttgtgcatttttccatacttttttttatgataaattattgaaattctttgatttatgtaaaaaaactacaattttttgtcatatcacggcagaaaaacgcttaattggcactaccagtcccggatccagggctgcttttccatcaacttttacaaatggatccggatcagtttgcgaccatatgctgcgggcaccagaagtatttttcctgtgtgacctcttttcccatcgccagttcctccgccgtgtcaaagatccgcttcgcataagcctccctgtccgattccaccgttccgaaaagttttccctcgcggaatgcctcctgaccggccggagtcccgtcgatcccgacgagtttgagcgtcccggccatgatcccctcccgctcgatcgcatcgatggccccgagcgccatatcatcgttgttgcagatcacaagttcgatctcatccccgtaatcggaaagccattcttccatgagtgcagacgcctggtttctctcccagttcgcgatcccactcgtgatcctccggatcgggacaccgccgtcctttaaggtctggaccgaccactccgtccggatcagggaatcctggtggttcgtctccccctcaagaaggacgtatgagacgaccccgtccccattccggtcaagcgatgccggattcttccggtaggcatcaacgaggatctgcccctcaaggaccgccgactctttcgcatccgccccaacataatagagtttttcccagcggttcatatcctccgacacaggttcccggttgaagaacacgatcgggatatccgcctccatcgctttgtcgatgacaccggaagctgccgagcggtcaaccatgttcacacagagcacatcacagtttaagccgatcatccgctccgcctggctgttctgggtcatctggtttctcttcgcatcccggacatccagggttacccggatccccgtctcctgttcatattcctttgcatcctgctccatggaactccggagtgtcccaataaaggtatcatccccgcggtacaggagaaccccgatccggagagaagtctttttttcttcctgcgcaccgttttccagagcggcccgccacacggtgatcccaagcagtgctgccgccgcaagcgcgaccgtcatgaccggaaatctattctttttcattctggcatcctcctattccatcggatacagcagtttctcataggtcccgctctttaagatcccatcatcgatatattccggcgtcagcgtgatctgtttctcgttccactctccgcctgccgcctgtacggctttttccacgcttaagtatccttcatcaaagcggttccacgccataagaccggtgacaatccccttgtccatctggtttaacagttttgtcgtacttccgatcccgtaaagtgctgttacatgttcccggtacacgccgcttccctccagaatatccgcgagatccgacagcgcgcctacatccatgccgactgccataaattttccgttttccgggtacacggtcccctcgatcgttttccggtaagtgtcctcatttttcttctcgatcagactgactgaaaagccggcctggtcgagcacggaacgaagtccgtcatatgtatcggtatttcccgtgtaggaaagtccttccgtaaacagacagaccggaatctccggtgtctcattttccacgatcttctcgccgaggctccgccccatctcgtagcggtccaccgagatcgaacatgcgaccgaactgctgatcgtcgaggcgccgagaaagatcaccgggcagccaggcgaaatttcatccagctgcatgaccgcgtgatcttcccgcaccggggcgaggatgatcgcgttcgttccgtccttcacttcacgtacgatgagttcatcctgctgtctctcatcgttttccgcgtacaacgtgataaaattcacatctgcctgatattttttttccgccatatccataccttcgcggaaatttccgtaataattgtcgttcacctgttcgatgatcaccgcgacccggcggatctcctttttcttctctttgatgatcagatccgtcgaggacagcagatacaggaccaccagcaggactattccgccgtaccagccgatcttccctttatttgacattgatcttttccccctctgctgtctccgcgtacgggatcgccttcatatgaatcgtcaccgtcgtcccctcgtcaagttccgactcgatcgagagaccgtaatccatgccaaaatacaggcggatccgctcgtttacattccggacgccgatcccggaaccactcttcgacgccacatgtttccggtcggagaacattttttcgatctgctccgttgtcatcccaagcccgttgtcggaaaccttcatataaagatcatcaccgtcccggtatacacggatccggatctccccgtcaccgtccataaactccattccatgatagatcgcattttccactaacggctgcaggatcagttttacacttgcaagatccatgacctcttcgtctgcctcaatttcataggtgaaccggtttttaaaccgcatatgctggatcgtcaggtagtttctcacatgctcgatctcatcccgcacggtgatgatgctctttccgcggcttaaactgatccggaagaatctcgccagcgccgtcacgaccttcacagcgtccgcctgcttttcattctcgatcatccagacgatgatgtccagcgtattgtaaaggaagtgcgggttgatctgggactgcaggacgtcgaactcattctttcgctttgattcatgctccgcgacgatgtcatccatcagccgccggatctgggtcgccatgttctgaatggatgtgccgagatggcggatctcataggagccgcccacatagacatccgcattcaggtttcccgcctcaatctcgttcacagacttctccagcgcttcgatcggggtcgtgatcctcgtggagatataggcgttgatcaccgcgagaaggaaagcgacaaacaccacgataaacgtgatcagaagacgcgtcttcaacgcattcagggtgactccgcccatcggcgccgccccgatgatcttccatccggtgtatccgaccgtcttgacagtcaccgcccgctttttcccctggaacatctcctcgtggatcccgtcgcggtagccggccgccgcctcgaggttttcctcttccagcccggaatacaaaagctgggcttccggatggtagatcagctctccgtccgttcccatgagatagacatagccgccatttccgagcgtgatctcatcgaacagctgttccagactgtcatagcggatatcgatcaaaagcacgccctgttccgtggaggaaccctccgtgatctcgaccacgcgggccgccgagatcacccagcggtactggttttcgctcacatcaaagacccgctggacgtggggaaccgaaaaatgaaggttctccgtcttgctcagtgccgcccggaaccacgattcctccgtcggatccacaccggtcttcaggcgggaagcgggaactgcctccagaagctccccgcttctggagaacagggcgatattctccacattgtcctggttattgtcgtagagcagcatcatctcccggttgacgcgctcgttctccagatccgcatttttgatcacgtcgtaatacagggaatcggaaagcttcatgatgccgcggagccacacatccaccgagcggttcacctggtcgatcaggatctggttttcctcctgcatcgtgtcggacatctgttttgacatccggctgtacaatgacagtccgataaaaatgctggccgcaagtgccgtcaccgtaaagtacacgaagatcatatagcggatgctgatccgtttcagaaatccgttctcgttttctggtttcatactgctctcccctgtttttattcaccgtcctttaatttccgggtctgcttcccctgaattttgtcggtgagacgccgaatttctttttaaagacgtaactgaagtaattctgctcctgatatccaaccttcgcggcgatcacatatgtcttgtcatccgtcatgttcagaagctccaccgccttgttgagccggacgtccgtcagatatccgatgtacgtctgcccggttgccttcttgaacatcgttgaaaaatacgccgggctcatatgaaggatccggcagatctgttcgactgagagatcaggatcctggtaattttccataatatactgcttggcgcgttccatgctctgtctcgtcgtgttgtcgcgctccttattcatcgcgccgttgatctttaacgctgccccgaggagccattttgagaacatctcccggttcatgacctgctggatgatcgtaaacggatccgcccccacctttgaatcggcaaaaagctcatccatctccagatcatactgctggatcagctggaccaggcagtttgcgacgctcaaaatataagtctggtattgtctcgcgtggaccctcgcgtccgacatccgtccgatgatccgcgcggtcacttcccggatcttttcctccggcccgaatttgactgcctggatcagtgctgactcatcttccgaagtgaactgaagttttccggtgttcatcggctccacgtcgttgatatagatcgtactgccgacaccgacgatcgcgcggtatccaagcgcgtcgagtgctgactggaaagattcacagatcagtccaagctccgtccggctgtgaccgatcccgatcgtgaccggaatcattaagatcttccggatctccttgcagatgtcgctcaggatatcgatcagtccggtctgggagtttgtctcatccaccgcgacgatccctgcgatctccgcatccgccgcccccgagaacgaaaacagggaaaagcggcagtaatttttcagattttcctccaggatctgcattacggagatcgggatcagatcccgctcttcatgaagcggcaggatcacctcgccggagacagcagaaagctccaccttgactgcgatcgagatccattttttcgcactggccagcgggatatcatactgttccaggcgctccgccaccgtcatctcatccatctgtcggctcacaagatcctttaaaaactgctccctgaggatcggcagactgcgcttgtaattttcccgcagaagactcacatcccgcttctgctcgatctcctcgtcgagactcgcctggatcttctttaagatcgccgtcagctcctccacattcaccggctttaagatatattccgtcacatttaacttgatcgcccgcttcgcgtactcgaaatcgtcatatccggaaaagatcacaatcttcatcgacggatatttctggcggatcttctccgcaagcgtaagaccatccatatatggcatccggatatccgtgaggacaacgtccggctccagattctcgatcttctccaaagcgtcctctccgttctccgcatcgccgaccacggtaaagcctaccgactgccagtcgatctttcggataatgctctttcgcacttcttcctcgtcatccacaaggataattctgtataaatccatttcctgctgctcctatctgaaccggcgggattcttgcgccgggtcgttttcatgcctgttttcattttactatagatccgcactgtttgcaaatggttcgctccctgccagcgcagccgggatctgtttctttttcgttttagttcagactggacaaagatctcatgacaaggtcaatatccttattttccagttcctgaataatatgcaggtatgtcttctgcgttgttgtcatactcgaatggccaagtcttctcgccacacttgcgatcgagacaccggtaaacaacaatagtgaggcatgtgtatggcgcagaccatggatcgatatgaccgggatcttacactttttgcaatgcctgctcaggatatcatttaccgttgaattgtacacctttgtttttgcgaagatctgctgatcctccggtaaattttttaccagctctgagaactggatcaccgtctgccagtcgatctggatcttccggacagatgatttgttctttgtcggctggaatccgccgtcacccttataattccatgttttgctgatcgacagtgtctgatgggaaaaatcaaaatccttcggggtcagggcaagtgcctccgaaaaacgcatccctgtctttgcgaccagaagaataaaataatcccagttgacctggtccttcagatccagcgaaacaagcagcgtatgcaggtgaactacccatggtcttaagccaatgggcttcctgcttcatcgacctcgtaacctactatctccacaggcgttaatttgggcag

SEQ ID NO: 2005 - DNA, 6111 bp, Unknown
  gut microbiota DNA sequence
acctggacatgaccctgcggctgcatgaaaccacccataacgccgaacggtccaactgcttttccgtccttcatcaggaatcccggaatgatcgtgtgcagagatttctttcccggtcccagacagttttccattgtctcatccagcgtaaagttcgccccgcggttctgcagcgcgatccctgttccgggtattacgatcccggatccaaatcccatgtaattgctctggatgtaggagaccatgttgccttccccgtccgctgtgcagagatagatcgttcctccgcggaacggattgcccggctccggtgtgagcgcctgttctccgatgagcgcccgtcttccgtccgcatattcatcagaaagcagcgtctccaccggtgctttcatataatccaggtccgcaacataccggtttccgtccgcaaatgccagtttcatcgcctccagctgtttatgcacggtatctgcattgtcccgctccgcaaaggaatacccctttaaaatattcaatgccatcaacgcaatgatcccgtctccgttcggcgggatctcgcagacatcatatcccctgtaatttatgtggatcggtttcacccactcacaccagtaattttcaagatctgatctccggagatatccgccggtctttcttgaaaattcgtcgatctgatccgcaagttctccacgataaaatgcttttgcatgagtctgcgcgatcatttccagtgtctttgcatgagcttccgacctccagatttctcccggctgcggggcatgtccgtccggggcgaacgtttcaaaccatgaccggaaacattcttccgtcagcgtttctgaaaactctctgtatgcagtgttccatatttttgatgtcaccggactcaccggatatccctcgcgtgcatatgtgatcgccggttccagcaccttttccagcggaagtcttccaaacttttccgagagttccgcccatgcggacggggcgcccgggaccatcaccgggatccagcctcgtttcggcatttcggtgtatccctgttttttcacttcttctgcagtgatcgccataggtgatcttccgctggcattcagcccgtgaagttctccctttgtccagaccagggcgaaggcgtcgcttccgattccgttggaggtcggttccagaactgtcatacacgccgctgtcgcgatcgccgcgtcaactgcgtttccgccccgttttatgatgtcgagtcccgcctgggcagccaaaggctggctcgtgcaaaccataccttttttcccgtacacaacacttcttcgtgatggataatcatatttctgcgcatcaaatttcagcatatccatttcctcctgatcaagccgtttattcctgggttgtaagtgtaccgcaataaacagaaagcccgtttattgctttatcatgctggaatcgtatcacttgaaagtatgaaatgtcaataaaaaagcagcctaaaaaacggcgtagaaatttctctcgttactgtaactttctctccacgccgtatcttttattccagtataaaattttccaccaattttttcgtgaactccgtcttcggatgtccgatcacatcctccgtccgccctgtctccacaaactttccttcttccatcactgcgatctcatcgcagaaccagcggaccacatcgaggtcatgggagataaacagatagctcagtcccagctttttctggagttcctttaagagtgtcatgacctgggcctgcacggagacatctaacatgctggtcggttcatccaggatcaggatcttcggatccagggagagtgcccgggcgatcatgatcctctgcgcctcacctccgctgatctggtgcggatagcggtccagaagttcctctccgagatctaccagatccagaagttctctgacccgcgcttttctccccgctttgtcatacatcctgtggatgatcatcggctcttccaggctgtatccgatcttttttgcaggatccagggatgtctccggatgctggaagatgatctggatcgttccatcgatctcgatggttccggagtccggctttatcagtgacaggagcatgttcgcgatcgtcgattttccgcagccggaatttcctacgatcccgaatgttttcccgtcctgtaccgtaaaagacacgtccttcaccgcttccacgcgggtctttttaatgatcccgccagtaaatgtcttgctgatatggctgactttaagcataccggacgcacctcactttccttccgtccggaagttccgcctccgggatccgtccatttttgcatgcgtccactgcatgcggacatctcgggtaaaaactgcagccggaatttccctctttttttctcactgcgcgcccgatcgggttcattcccttccccgggagcgatgcgatcagtcctttcgtgtatggatgtgccggatgttcaaggatcgtctttgtctccccggcttccatgatgcttcctttatagagcaccatcagccggtcacacaatgcccctgccagggcaatatcatgggtgatcacgatcatgccttcggtgtccgtctctgatatctctttcaggacccggtagacctggcgccggagaatcgcatccaggccttttgtcggctcatcggcgatgacccatttcggccggttcatgagtcccatggcagagatcacgcgctggttcatgccgccgctcagctggaatgagtaagcgcggttgatccggttcggatctgaaaagccaaatctgcggagaaactcatccctccgggaatcggcaagctctttgtccttatttccgtggactgtcatgcactccgtgagctgttttccgatcctgcggatcgggtttaaggattccgtgggattctgtgggatcagggcgatctcttttccacggatcttctgcatctctttttccggcagccggtacaaatccatccctttatacatacagcttccttccacccgggcctgcccggagagaagtcccaggatggacatgcctaaaagtgattttccgcttccgctctccccgatgagtcctgtgacactgcccgacggaaagtatgcgctgacatcttccatggcatggatcatctcgccgccgtcctggaaggtgacggagaggtcgcagatctcaatgtcacttttttcttctgttttccattcttttttatcttccatctgatcttctctcctggctgttccgttttttcacagttacaggcaaaaatctgttccggctcagctatactgaggaaattttgcctttctttgcatgctttccgacatcacatcgtcttcatcacatctttccgcacatccagccggtcacgcagttcatctgccagaaggttgatgctaagggaaagaagcaaaatacagagtcccggagcgatggcgagcagcggttcctggcggaaatactgtctcgcatcgttgatcatgacgccccagtccggtgtcgggggctgaagtcccagaccaagataactcatggacgccaccgagatcacatttccggcgatcctggtggcaaaaaggacgctcagagttcctaaaatattcggagaaatatgcaggaacaggatccggaggtctccggctccgatggttctcagtcctttaataaaactctcctgtttcagtttcatgacttcaccgcggacgatcctggaaaatccgacccaggaattgatcacgatcgcgatcagcatgctcttcacgccctgtccaagaagtccggccaccgcgatcatcagcgtcaagccgggaagtccctggaaaatgctagagatcgtcgtgatgatcccgtcgatccagccgccgaaatatcccgcgaaaagtcccagtgcaaaaccgagcagcatcgagaggacggtcgccgccagggcgagaaggatcgattgtcttccgccgtagagaacacggctcagcgtatctcttccgatattatccgtgcctaaaagatgcgcggcagacggtttctgaagtgcttccgacaggttcgagaccagcggatcatagggagcaaggaccggcgcgagtacgctggtcaaaaggatcaataataagatcaccagaccggtctttgcttttcctgacaggtggagttcctttaatttattcatgattccaccgcctctcccgcccggatcttcggatcaagtgcgatatagatcaggtcgatcagaatgtttgtcagcacatagatacagcctgaaaacagaacatacgcctgcaccacataataatccttcgactgcacacccgcgatcgcgtagcttccgatcccggggattgcaaagatcgtctccacgatcgaggcgccgccgatgatgcccgccatatgggttcccaggtaggtgatgatcgggatcagcgcgtttccgaacgcatggcggaccactgcgcggcggcggctcattccttttgcatccgccacagtcatgtactgtcttccgatctcatcgaggatcgcgctccttgtcagtctcgcacagactccgatactcgggagtgccagcgtgaccgccgggagaataaagccggatccgtcggagatcccgctgctcggcaggatcttccactgttccgcaaagataaagatcaggacgatggcgatccagaaccccggaacggacaatgcaaccgttgaaaatgttcccagcacatgatccggcagccggtcttttcccaccgccatcaggactccgaaccccacaccgaacacgatggtcaggatcatgctgaaacccgcaagcttcaatgagatcgggatccgctttgcgagctggtccatgacacttttattcgtgaaaaaggacctgcccagatcgccgtgagccaggccgtcgacccagttaaaatactggacgacggcaggctggtccagccccatctttgccgccatggcatcatattcttcctgcgtgtaggattcgtttccgtttggatttaacacctggtccaccggatcccccggtgacataatcccaagtgcaaatgcaatgatactgatcccgacgagcaccggcaaaagcatcagcatttttttcaggatgtactttaaaagtgacatattgattatttcacccaggaaattgtcggaagtccaacaccgaaggtctttcctgcatagtgtgtgatcgccttgttgtggatgtttacgttgatctggtagcagatcggaacgcacgcgctgtcatcgaagagttcctgctggatctcatcatagatcttgctgcgctcgctcacatcagcgatcgtcggagcttttgcgacaagttcatcgatcttctcgttatagtagttgtagtttaatgtcgtgttgctgtttccttcgcttgcgaagtactgcttaaatgtggaagtcggatccgcattgttgataccgaatacggtaagtgtcatgtcgtaggtgccttcctgctgtctctctttgtagagggaggagtccacgatctcaatattgatgttgacgccaagctccgcgtaaacctgctttaagtattctgcaacagccttgcagttgtaatcggacgcggtgctggaacggatgatcatggtcatgtcggccgtcttgtctccgagaacttcttttgcaagagattttgccttctccatatcataagttccctggatgtccagatggaaggtggactgggtgcttaagaaggagtatgccggctgtaaaagtcctccgtagatcacgctgcagatgctgtcgcggtctgtcgcaaggttgaacgcctctctcatgcgcttatccgcaaggtactcgtttttatcgttgaacatgatgtactcagtcatatggctcggagtgctgtccatctcaaagttggagtctgtgtcgcagagattctttgcagcatccatggtgatcgcgccgttgtctgcaagtcccatgacttcgccggattttaacgcggatacacgagtctcggaatccgggatgcagcggatcttgaaggtctttaccttgccgttctcgccataatagttgtcatttctctcaagtgtcacatactcggactccacatggtcaacgatcttatatggaccggttccgatc

SEQ ID NO: 2006 - DNA, 49247 bp, Unknown
  gut microbiota DNA sequence
atttcatttttgtccagaaatattatttgaaaatagttcaattctgaaaattaaaagtttgacagctaccattttccatttctgtttcttctatatttatagtaacattcttttcatttaaatgttaatatttatgaatattatatcaaaaaaagaaacattttacaattatattcatttatggtatcatttaagcctaaacaagaacgaattgttcgaatctcaggggaatatcaaaacatacagggaggaaatcattatgatgcttacaaagaggatccagaacattaaaccggccgctacacttgcactgaccggaaaggtcgctgaattaagaaaacagggaatcgatgtgatcgccttcaacctcggcgaaccggatttcggtactccgcagaatatctgtgatgcggcaaaggcagcgatcgatgcccagaaaacaaaatacacggttgtctccggtatcatggacttaaaagaagcgatctgtgcaaaattcttaaaagacaacaatgtcgtttacaaaccgaacgagatctgtgtcggaaccggcgcaaaacagccgctcgtcaatgcagttcttgccctctgtgaagaaggtgacgaggttatcatcccgactccgtgctgggtcagctacatcgagatggtaaaactttccggtgctactccggtcctcgtacagaaccgtgaggaagacggtttcgccctcaacgtggaaggtatcaagaaagccatcacaccgaaaacaaaagcgatcatgatcaacacaccgaacaacccgaccggtgctgtatatacaaaagaacagctcacagagctcgcagaacttgcctgcaaacatgacttctatattatttccgatgaagtttacgagaagctgatctatgaaggaaagaaacacttctgcgttgcttcgatctccgaggaagtaaaggatcgtaccgttgtcatcaatggtgtttccaaagcttactccatgaccggatggagagttggttacgcagccggaaatgcagctctcatcaaaggaatgacttctcttcagggtcatacaacatccaacacctgctcgatcgcccagtacgcagctctcgaagcgatcagcggaccgcaggacagcgtggaatccatgagagttgaattcgacaaacgccgtaaattcctggtagagcgcttaaattccatggatggcatcacctgcaacaacgcagacggcgctttctacttaatgccgaatatgactgctttctatgataaagagtggaacggaaagaagatcgctgattccttcggaatggcagattacctccttgccgaggcaaagatcgcggttgttccgggcggtgcattcgagtctccggacaacatccgtatcgcttactccaactccatggagagcctgatcgaaggtatgaaccgtatggaagcagctttaaagaaactcggctgatctgacaaccttccatattcgtaaaactctcccgctccggcggtgataaggacagatcaaacttagctttcttcccatatattcaacgaacaacagcaaggattctcctactgacacgaagcaaagcacagtcagtctccgtgaaattaccgactgtggattgaaacaatatatgtgatgaaaaatccctgaaaaaagcctgtgaatgcaggcttttttcatttacgcgaacaacaggccaaagtctgcgcttacgcgagaccttggcgactgccgcgataacaagaggacactcacgaagcatgttttcacttgtttatgagcgccggtctccctgccgctatacaaattttcacatttttcacgacagtatatgagcctcgcccatgcgctgtaacaggataaatataatgtattattaacatttaatggtaaaatttgttatttttcatttgacaacaatcattttacattccgcatgattcatgctataataatcaaatgaacggagaagccgcaccaacttctcccaaaaactttcttctcattatattttacaacgcgatataaaagaaacacagccgcccggaacgataattggggtatcgtccgtggcggctgtgttcgtataaagatatagccgacattttctatgtatacaaagaccctgactgatcccattttgcaggaacagccaggacctttctttttttatttctctccgttcagttctttcttatagacctcaatgactttcttcatcgcatccgcacccggagctccgatcgtcacacgtttctccacgcaggtcttcatggagatcgcatcgtagatatcttcctcaaataccgggctgatcgacttgaactgctctaaagtcagatcgtcaagcgccttgttctcatcgatgcagagaaggaccagctgtccgataattccatgtgcatcgcggaacggaacaccgtggtttacaaggtagtccgcagcgtctgtcgcgtttgtgaagccgttctttgcgctcgcctccatcacatccttgcggaaagtcattgtggataccattcctgtgaagagtaagaggcagccctttacggtatcgatcgcgtcgaaggtcagctccttgtcctcctggagatccttatcataagccagcgggattcccttcatgaccgtcagcatggacatcagggcgccgtagacacgcccggactttccgcggatcagctcagcgatatccggattcttcttctgcggcatgatgctgcttccggtgctataggaatcatccatctccacgaagcggtactcattactgttccagatgatgatctcctcggagaaacggctcagatgcattgcgatcgtggagagcgcagccaggagctcgatcaggtaatcacggtcggatacggaatccatgctgtttaaggtcggtccgtcaaagccgagaagctctgcagtgtactcacggtccagcggataggttgtccctgcaagagcgccggatcccagcgggcagtaattcatgcgctttctgatatcagcaaggcggcctctgtcacggcggaacatctcataatatgcgccgacatggtgcgccagtgttaccggctgtgccttctgaaggtgggtaaagcccggcatgtaagtatgaagattgtcctccatgagctttaagaggacctcaagaagtccctttaaaagtccgtccatctcgtcgatctcgtctcgcgtgtagagcttcatatcgagagcaacctggtcgtttctgctgcggccggtgtggagtctctttcctgcatccccgatccgctcgatcaggttcgcctcaacgaaagagtggatatcctcggactccgttgtgatctttaaggttccgttgtcgatgtcctcgcggatgctctttaagcctgcgatgatcgcgtcacggtcctcttctgtgaggatcccctgttttgcgagcatcgtcacatgcgcgatgctgcccgcgatatcctgtctgtaaaatttctgatcgaaggagatggactcattaaagttatgtactaactggttttcttccttcgtaaatcttccgccccaaagtttcatagccgttcctccgttgtctcttttctattatttatagtgtctgtcagatcttcatcatcgagatccggaatctcttcaaattccggttcttcatcaggatcatcttccgcttcctgctgcatgttccggatctgttccattctctttctcgcttcccgtcgatccatctccctgcgcaaaaaccacagaaggatcaggatcacgatggatccgcctgagatcaggccgccggtttttaatccctccgggaaataggagaagtcgatcacatgatcgccggcgctcacatcgatagccaggaacgcaccgaacgcctttctcgtctccaccttctcgccgtccacttttacggtccatcccttatcaaacgggatcgaggtgaaaagcattcccgctttcgccgcactcacggttccggaaagtttcgtatctttccagctcgtcagatgcatcggggactggttcagccggtcatagacctggatcatcgcgtcctctgagaaccggtaggcgatcgcatttaactgttcgccggcctcatccgccgtgagcttcacttctgtgcccggagccagagttccaagctccagaagatatccgcggtccacgttgctgaaggatttctgaccggtcggcagttccgccttcacagtctttaccttcttgttcatgacgaacacataatattcgcccgtctcatccggtgtgaaagtgaaggtgtttttattcaccgttccgccggcatctacaaggacttcgtccgccccggaaaccaggcagagatcattctggacctccgcaggattatccatctcatactgccagttttcctcgatatctgaaggaaggacaaagccgagcggcagtgtgtagagattttcatagagatatgttccgccgctctccctcagatacatcatgagctccgtgttggagactgcctcggaacagagtgcatatttcacagaaaaaatgctgtcgacaagcggcgtgcttccagtgatgctgtaagcatttgtggacgattcacatccaagcttcttaaagaacttcgagagatccgcgttcgccgttgaggaaaacagggataccgacggaaagttcatccatgccccgtcattcttcgtctttctcgtctttttctccacccggtagaaatccgatgccggctgcagggaatcctttaagatccggacctcctcattgtcgctggtgtaagactcacggctcgttgtcgtcacactcgtcaccgacatgttgatcgaagcctcaattgcaaccagcgtcaatgccaggaatccgcacaccgtccgctttccatccttatagagatacatcagtccggcataagccgccaggaagatgatcgccacatagtagacgataaagtggaaatgttcctgtgtcaccagcttttccgccagcaggacaaagcacgcactcccccagaaggcgatcgcgatatgctttttcggcgtctcatccagatacatatacgcccggaagcagataaacagcatcaggaagatgtagatgaaggactgtctgcatggaaggctgttcggatagtggaatccatgccagataaagttcagcgcattgatggaaaagctcgcaaaaaagatcaggagcagtccgcagtagacggctttctccttcactgcgatcttcttacatgcgagatacatcaaaaagaagaggaataccgcgacaccgcagtagatattcggccagtggtcaagaccgatctccgtctccacatttccgatatggcgggcgatcatgtcaaagatcgggaaatacgagctccacgccttcgggaagtcaaaatcaccggatgccgtgctctgcagcgcatagatctccggaagcaggattcctgctgccagtccgcctgagagcagcgagtaaattccaaaccggacgcagctgtccacgtattttctcaccggccccggcttttccatgatcagcagcgcgataaaataaagcaccaggaacaggcaggtcatgatcgagatatagtagtttgagaggatcgaaagtccgagcgtcacacagtaaagcatgcctttctgctctttcacaagtctctcaaggccgtatacgatcagtgggaacagaagaatgcagtccagccacatgatgttccagctgtacgccgccatgtatccggacagggcataaaagatcccgaagaacccaatccccaggatacagttctggctgtgtttctttaaataccaggcaaagctcagccccgaaagtccgatcttcagaacaatcatggtcgtcataaactcgatgataaacttcttcgggcagagcaggatcagccagtttaacgggctggccaggtagtaggcatacagcgccgcgaaattgacgcccattcccacatcccagctgtaaaggagacttccgccggtccgcagcttatactggaactccgaaaagaacggggcgtactggtgatacatatctgttctcagaaaacacctctccccgaatggaaaaatccccctctgaacgaaaatgcagatcatgacgagcaccgggacaaagaaggcgatcagaagaccatccctcggctttaaaaacggcgttgtctgccgcttgttccttcgattttccggacgatccgcagttggctcatccgggatcgtatcgattccttttatttctgtcataaagtaaaaactcctccggcttcatcagcctgtaatcatttttgctttttcatactcccaacatccgccgggcagacatcgcagatcatttctttttatctcctgtaaagatcaggatcttgctgaacacataattcagaacaacgaccaccacggagatcagcagcttgcagatgaaaaactccatcttcatgagatccaccatgataaacagcgctgccaggttaaataaaaatgtcgcgatccggcataaaatgaacgagacaaattccttccataccttcgccgggtttaaggtgtggctttcaaacacccaccatttgttcgtcacaaatgcgaacaatacggctgccacccaggcgatcgtctgggccgggaccggatccatcttccacatataatatagaagattcgagatcgcgtagtcgatcaccgtcgtcaggactccgaagatcagataagcgatcccttccctggcgagaccggacttttttgtccccgtttcctgtccgctctccggcttctcatttttttcattcataaatatttccgtccttttccggaatcatcgttttcaaaacgtttctccgattttttcaggatttccctatcatattcgatagtctttttcattttagtataccaacgcaaaaaagtaaaggactgacagccgaatttctagctgtcagtccttcttttgttacttttcatgggtaggaattttctgaactgaaaattccgtatgataccgttatggttgcggattttgccgattcggaatgctaagcatcggcaaaatcctgttacagggcgcgggcatggagtgcccgtgtactgtaaccttcttttaaagcgatttggaatggattttgctcgtaacttgccatgcatccgaatgtaagctccgtgggaggttcctgtaggtatccggctgctgaacagttacgacgttttattctgcgagcagcttctcaacactcacaagttttacgcacacgcagaagatctctgccgcctgtctgaggtcatccagggatgggaaggacggcgcgatcctgatattggagtcgtgcggatcttttccgtatgggtaagtcgctccggcaccggtcatcacaacaccggcctctttgcacttcgcaacgatcgctttcgcgcatccgtcaagagagtcgaaggagacaaaatatccgccgttcggttttgtccacttcccgatctccagaccgccaagttccttatttaagatctcatcgactgcctcaaattttggtctgaggatctcagcgtgcttagccatctgcgcttttaaaccatcgatatttttaaagaagcggacatgacggagctggttgatcttgtcatggctgatcatctggacattcatctgcttcttcagcgcatcgatatttgcctttgaagtagcgatcgcggagattccggagcctgggaagctgatctttgaagtcgaaccgaatttatataccatgtccggatttcctgctttttcacactcagaaagaatgtcgaggacatgatccgggtgatccgggtgcagatgatgaacacagtatgcgttgtcccagtagatacggaaatctttcgcagccggtttcaggtttgcaaatcttctcacagtctcatctgagtaagactcaccgctcgggttcgcatagagcggaacgcaccagattcccttcacgctctcgtcattatttacatatttctcaacaagatccatatccggaccttctcctgtcatcggaatgttgatcatctcgatcccgaagtattccgtgatcgcgaaatgcctgtcatatcccgggaccgggcagaggaatttcaccttgtcaagtctgcaccacggcgtacttccgcatactccgtgcgtccaggaacgactcacagtatcgaacatcagtgtcagactcgcgtttccgtacatcacgatattctcggccggcgagtccatcatcgcacccatgagctctttcgcctcctgaatcccggtcaggactccgtagtttctcacatcaccgtccgatgtcatataatcactgctgctgtttaaaacgtccatcataggaagagaaaggtccagctgctctttgcatggctttccccgcgccatattcaggctgagattttttccctgatactccttatacagcgcttccagctgctcctttaaagacgcaagttcctgttttgacatttcgcgatatggtttcatgtcagtttcctcctcatgattcaacgatatatttcagattatcttttccctgagcacttattataattcattaaaaccaatatttcaacttataaaataaagttttgcttctgtttttttatttttttgaacctgaccccataaaaatcttagtcattgccgcctgcagcagctccctgccccccgttttcagctctttccgtgcttcggtccgcgctccgcgaagcaactcctgaccgtctcattgacttttctttaacaataacgtattataataagatataggatgatgattccatctgcttcgaattctgaaaaggagaatggctttatgacaaataatatgcggacgcgcgatatccggcgaatgatcctgatcggactgatcgttgctctcgtgtcccagctttactggaatatctttataaataatttccggatctcttcttccgtgatcatactgcccgttcttctgatgacacttggaaaaagtctttccacaccgctcacctgcgctgtgaccgcagtcatcgtgttcttcttccgcctgtttccggcgctccacagcgggaccagtctcctcgtctcagcgaaaagtgtttttccgaatgcgatcttctatttctgctacggcattattttcgcagccatggtcccgggaaaacataccgtctcctacagccgcctgtttccggccgttttttttgctgatttcggttccaacctggtagaactgtgcatttccgagagtatggcacactccatgactccggacaaggcaggatatctcttcctgatcgcactgttccgtacctttcttaccggtctgatcctgatggcggaaggtcactaccggacactcttaaaaaacgaagagcacgagaaccgttaccgccgtcttttccttatgacaacaggactgaaaaatgagatctacttcatgcggaaaaattctgaagagatcgaatccgttatggcaaacgcatataaattgtatgagaaattaaatgaaatggatgtgccggaagacatgaaacatatgtctcttgctatcgcccgcgatgtccacgagatcaaaaaggattatatccgcatcatccagggcatcgaggaagaaatttccgaagaatatgacgaaaagcagatgagctttcaggatatcttaaagatccttgaagacacaacttaccatattctggaaaataagaatgtccatatccagctggaattccagtgttccgataattttatgactgaagaacactatgagctgatggccattctcaaaaatctcgtgaataacgccatcgaggcgatcgaatctgaccggaaagtcggaatgatctatattgaggaacatctgaaggacggaaattatatcttccgcgtcaccgatgacggtccggggatctcctcccgtcaccttccgaacatcttcaagatgggatactcaacaaaatttgatcagaaaaccggaaacattttccgcggcgtcggcctctatggagtaaaaatgaccgtggaagaacaatttaaaggaagcatcgacgttgaatcggaacaggggatcggaaccaccttcaccatcacgattccggtcacttcccttgtggaggaaacattatgaaaatctatattatagaggatgacctgtctgtcatcaatattttagaggacatcatcgagacacaggatctcggagaaatctgcggagactgcggcggggaaccggcaaatctcgcagacgtgctgcgcgctaagccggatgtcatcctcgttgactttttcatgcccgttaaggacggtgtagaattcgtaaaggaactgcgcgccgtcaacacctcgatcaagtgcatcatgatctcccaggtatctgccaaagagctgatcagcaaagcttacagcgcgggagtcgacttctttatcagcaaaccgatcaatctcattgaagtccgttccgtcttaaaaaatgtagaacagcagatcaccaacgaacgtacactcgcaaacatccgccgcatgttcatgaacgagatcgaacatcctgccaaagatgacaagccgaaagccgacaactacggccggaaattaaagtacatcttaaaccgcatcggcatgtccggcgaaaaaggatgcccggatatcataaagatctgcgaatatctccacgacaaccacattccggtctccaacctgagcgttgcccagatgtgtgaggctgtcagcgactcgccgaaaaacatggagcagcgggtccgcaggacgatcgcggccggaatgtccaacattgcccacatggggatcgaggatttcatgaacgagacctacacactctactccggaaccctgttctccttcgaggacgtaaaagcggagatggactatctccggggaaaacgcacatccggcggcaaggtcagcatcaaaaaattcatcgacgggctgatgctggaagccgaacgatagtttttcatgatccaggtacatcttccgcaaaaacggatcgtacctggttttttctatttctgatgcgtctcttcattcctcggaaatccacatccggaacaatgccctttccatcttcacattccttatatcggattttttcacatattttaccttgttgtgtataaaaatattgttcaggaattacaaattttgttaagtaatttttgtaactttttgtaactttgtgaagttttttgaagggacatccttatactttgtacatacaaaaaaggtatggaggtatacaaactatgttacaaatcgagctcaacatgtatcaagcagttgcagttgctgcactggttctgcttcttggacgtttccttgtaagcaagatcccattcttaacaaaatactgtattcctgaaccggttgtcggcggcgttgtttacgctgttgttcacctgatcttaagatccgcagggatccttgaaatctctttcgacaacacattacagtccttcttcatgactgtattcttctgtagtgttggttacaccgcatgtttccgtctcttaaagaagggcggcgttcaggtactcttattcctgttagtttccattatcatggttgctcttcagaatggtcttggcgctgcacttgccggtgctttccatctcgacccgagacttggtcttgcggttggttccatcccgatggtcggcggacatggtaccgcaggcgcattcggaccggttcttgaggaagccggtgtcgcaggcgctaacgcggttgcgatcgcatccgcaaccttcggtcttgttgccggctgtgtgatcggcggaccgctcgcttaccgtcgtatccattccctgaacttaaagtccacagagactgctaccggcagcgatgagattacagttgataagaacgaagttaccggcgcgatcgattccagaagattcctggacagcgcattataccttgcaatcgcaatcggtgccggcacgatcgtttctttattccttaacaagttaatgacattcccgagctacatcggagcaatggttgttgccgctatcatccgtaacgttgttgacgcaacccacaaagatatgccgatggaagagatcagcacaatcggaagcttctctctttccttattccttggtctcgcaatgatgggattaaagttatggcagcttgcagagcttgctcttccgatgatcgtaatgctcgcggcacagacagttctcatggcagtattcgcttacttcgtagtattcaaccttctcggaaagaactacgacgcagcagttatgacatccggcttctgtggatttggtatgggtgctacaccgaacgctatggctaacatgcaggcgatcacctcaaagtatggtccggctccgaccgcatacttcgtagtaccgttagtaggaagcttgttcatcgacttcttcaatgcgcttatcattacgacatttatgaacttcctgtaagatccaattttggattataaattataactcttgaaaaagggcccgcaccggaatcctggggtatgttccggtggccgggctcttttttctgtcgaaatttaattgtaaatttttccgagagaccagaatctctctttatcttcctgaaaacagctctatcccatcgatcatctgcagttcttctctcacacactgaaaaaatcttcggatctgatcatccatccggttctcttttgtgagtccatagatcgtcatgtcctccggtccgccttccatcggacagatccacacgtcttgtctcttgaatcgccttgcaacaagaagcgggatcaccgcccatttttttccattcagaaaatattccagaaattccatcttatccgctgtgagactcggatttgcatccggcggaaaccatcggctgtgccagatatcatattccggattccacggcagccggatctgttcttccggatccagcatatccggagtcactcgcctcgtttctctccaactctcaccaccggcaaacacgaacggctccctgaacacaggaaacggaactattcttctggaatttaaaaaatccgagaccagagccacatcaacatttccattttccacatacccataaatatcagaagaacgccccgtcttaaattcaatgctgcaggtgtcccgagcggacatcatttctttcaatacagccggcatcagataaaaagcaatgctgttcactgtgctgacccgcagaagcggacttttctttcttctcggtatctcctccgcctccctgtaaagtgtcagcagacgttccgcgaccggaacgaattcttttccattctctgtaagttccacgcttctctgaccgcgtccacgctcaaaaaggctgtatcccagttcctcttccattgatttcattctgcggctcatagccggctgtgtgataaaaagccgttctgccgctgctgagatactgccgtactggagaactgccaggaatgcctccaactctgtttttgtcataatgatctccgttttctccgattttctttactgcaaatgttttatcctgttcaaaatatatcattttgattatattttactttttaattattcatttttcaattaatattttctgtgatacactgatttctgtgaaggtactgaaccatcagatttggcaccagccggagcaacgcacagaatttggagtacgcagtgcggaacaatccggtatcagaagattatatttcaggagtacataaccatgaaccagacctctttgctttccggcaatatccggcagcagatcttaaccctcgccgttccactgctgcttggaaacattttacaacagctttacaacactgccgactcactgatcgtgggcagatttctcggcaccaatgcctttgcctctgtgggaatatccggcagtcttatgaacctttttatcttcatcctcgacggcttctgcgctgggatcacggtaatactcggtcagttctacggaagcggtgacagaaaaaaataccgtgaagaggtcttcaccgctcttcttctcggcatgatcatcgcccttctcatcgccggtgtgtgcacaatcttccttgatccgatcctggatctgatccatactccggaggaactcgtctcctacgcggaatcctacctgtttatcattctggcaggacttccgttcacctgcctttacaacctgttttccggggttctccgctcgatcggtaacacaaaagcggcactcatcttccttgcagccgcgatcacgatgaacatcgctctcgattttctgttcattggcattatcggcatcggcacagccggagccgctgcggcaactgtcctgtcccagctcttctcggcagtctgctgcttcctctacctgcgtgataattacccgggactgctcttccagaaagaagatttaggagttcacacggaactcatgtcgcagtcgctccatttcggtctgatctccgccctgcaggcctccagcctgtatatcggcaagatcctcgtccagggcagcgtcaacacactcgggacccccgggatcgccgcatacacggcagcaacaagaattgaaggctttgccaactccttcggtgacagcggcggcagtgcgatctccgttatggtctcccagaacctcggtgccggaaatcacgaccgtgtaaagaaaagcctcaaatggggcatgctcctgaactggaccgtcgggatcattgtttccctcctgatgttcatcggctccgaccaggcactccgcctcttcctcggctcttccgatgaactcgcactccactatggaaacggctatatccgcctgatctcgctcttctacatcttctgcttcaccggaagcgcctatatgggctattttaaaggccgcggtcacatgctcctcgccttcttcggaaccaccggccacatcctgctccgcgcagccctctccgccctctggatcggaaaaatggggctctccgccgtcgcagtcgcaaccggaatcggctggatgctctgcgtaacgtatcttacgatcaactatgtgagaatctatcttacagagaaaaactaaaccatcaaacctacacgcctgccagcggtgagattccgggcgggagtgccttgatccgaggatctggcactcccgcccggaatttcaaattttttcaatatctctcttaatctccttgcattctcttttctccagtgctataatgttcaatatcgtacgaaatatttaatttttgaacaattcaggaggtttccactatgagctccaaacaacccaatacgccactaaaagaccgcattgactggacaaccgtgatcgtcccgttcctcgcgatcctggccctctgcatctgcttcatcctcgtccccgacgcatcaaaaagcgtcctcgacacgatccgattcatcctcggagacacattcggactcttctacctcgcagtaggcctgttcgtcttcctgctctccctgtatctggctttttcaaaattcggaaacatccgtctcggaaagccggatgagaagccgaaatacccactcttcgtgtgggccagcatgatgttcacctccggtctcgccgctgacatcctgttctactccttctgtgagtggatcctctacgccaacgacccgcatatctccgagatgggctctatgcagacctggtccagcacctacccgctcttccactggggtccgatcccgtgggcgttctacctggtgctcgccgtgtgcttcggcttcatgcttcatgtccgcggatgccataagcagaaatactctgaggcatgccgcgcacttctcggaaacaaagtcgatggactcccgggaaaactgatcgatctcctcgccctcttcgccctgctcgcggggacaacgacgaccttcgcactggcaactccgttaatgtcccaggtcctcacgaccctgttccatcttccgtcctcgaaatggatcacgatcgcgatcctggccgtcacctgcgtcttttatacatacgccctgctgcacggcatgaaagggatctccctgctcgcaaagtcctgcatgtacctcttcttcgccctgctcgcctatgtactgttcctcggcggagagacacgctatatcctggagaccggttttgccgcagtcggaaacctcgcacagaatttctttagtctcgcgaccttcacggacccgcagcgaacaacctccttcccgcagaactggacgatcttctactgggcctactggatggtatggtgtgtggcatccccgttcttcatcggaacgatctcccgcgggcgcaccgttcgccagacgatcctcggcggctatgcatgcagcgtcagcgcaacatttttaagcttcattattttaggaaactacagcctcggactccaggtaagcggaaaacttgacgtgatggcgatctacgcagccggcggtgatctctacacgacgatcatctccattatccagaccctgccgctcgctccgctcgtcctggtgctcctgatcgttgcgatggtggccttctacgcgacgagcttcgactccatcgctctcgtggcttcttcctacacttaccgccagatcacaggcgatgaggagccgcacaacgccgtaaaggcattctgggcgatcatgctgatcctgctcccgatggcgcttgtcttctccgacagctccatggccaacctccagagtgtctcgatcatcgcggcattcccggtggcctttgtcatcctgctgatcatcgcgagcttcctaaaagatgcatcggaatatctgaaatcatgatatttcaccaccgatcctgaacaagcgaaaacacgcttcgcgagtttccccttgttatcgcgacagtcgccaaggtctcacgcaagcatggactttggctcgttgttcgcgtaaatcatcgcaagtgcgaatgtatgtctcatctctatgaactgcatccgcacttttttcttaaacaatttgtaatccaactgccacatttttaccccaacttgactggaaaatcccattgtcataaaatggaattctggtataatagtacttgtaaagtttaatgtaacgattcagtaggtctgcgcatttactgcgctgactgtaagaaaacatcagcttgaaggcaaaaatcccatcggcgttgccgacctggaatggatttttgcgcgtaacatgccatgcatccgaagggaagctccgggggaggttcctgtaggtgtgaaggcactgaacagttacagtttcattttgatcatgatttccatgaggaggatttttaatatgaagaagaaaaatttctgcgttgcagtgctttccgcatccgcagtgctcgctctcggcgcttccttcagctcttttgctgcctggaaagctgtcaacagtgagtgggtctacactgacaacaacggcaacaacgtgacaagtgcctggagaactgataacggcgagtcctattatctcggcgatgacggctatatggtccgcaacacactgctggaagacaacggaaactactactacttaagaaacggcggccagatgttaaagaacggctggcgtttccttgaaaacccgagttggcagggtgacgataaagtcggcgacgcaagctggtactacttcgacagcaatggacgtgcgctccgcacaacaggcgatactgtaaagatcgctgatatcggcggaaagaagtatgcgtttgatatgtatggaagaatgctcacaggctggatcacagctgccggtgagaatatctccgatgattccgactggtcaacagctacatactacggtgactcggaaggcgacggaagtctcgttacaaacgcctgggtatacatcagcgttaaggacgatgacaacgaggacgataacgagccgacttaccacttctacttcgcctccaacggtaagaagaccgtcagcacagagaagactatcggcaatgtaaaatacaccttcgatgacagaggtgttgctcaggattcctgggtacacaacagcgacaagggtacttggaaatattacggtgatgaagaggaaccgaagcttcataccggttggttccaggctgttccgtctaaagagttaaacagcaatgaccacgaaagtggtacgactcattggtattatgcaaactccaagggcgagatcactattcctactgccgacggcgaagttggagttgctaaaacaatcgatggaaaatcctacttattcaacgaggacggagagatgctcacgggattaagaattcttacatacgatggttctaaaatcacgaagatttcttctgaagttgactctgttgaccgtgtaaaagagatgaattccaatactcagaaattagtttacttcagtgataacggtgcagctaagaccggcgttacaaccgtcagtctggatggctccaattatacatttaactttaagtccaatggttcaccaagaggtgttggcgaaaccggaatgtctgatggtttcatctatgtaaatggtttacgcctcactgccgaggaagattcaaaatatcaggcagttgaatacaaaggtacttggtatgttgtaaacgagaatggcaatctccagaaaaacaagaaaaacctgaaggattccgatggatactactattgcacaaaatccagcggcgaatccatccacggtgagacaccgttatctgaaaaatgcgagatcaagcactaatttcataactgaatacaacatagaaattcacagtatgttttaaacatttcccaataagttcctatgacctgcattaaggacatcttctccagaacggtgaagatgtccttttctacttatttttcttataccatatctttctccatcttgtgtcatcacaacattccagtccctcaatactttctatgccaccttatttttccctcccccttgacacacctccgccacagattcctcaaggtttcaccacaaagtattcacagcttaatcacatttccctgatatacttaatatgtcaaaaggaaataaaaacaaacggaaaactgaccggcactctttaaaatactcacattcacattttgtaactgtccgtaatattcacgggtaccgcagttctaccggatcaaaatcatcaaatacaggaggtttcatgatgaaaaagaaatttatgactctcgcacttaccgcagctatggctgcttccatgggaatgaccgcttttgcaggacagtgggttcagaacacgaccggctggtggtggcaggaagacaacggttcctacccggtatcccagtggaaatggcttgacggaaataaggacgggatctacgagtgctatgctttcgattccaacggatatatctatacaaatacaacaactccggatggctacaccgtcaatgcggacggtgcctggacgatcggcaactctgtacagttaaagtaccagaaagatatggacagccagaataactccggcaacgcttctgataacaaccagagcacttcctccgacgattccaccgtctacacaaacgaggatatggtcggaaccttcatgacaaatgacgagaacagagaagattacttcgagctcatggtcggtgcaggcgattccatcgcagctttctactatgacaacgacggtgacacccatatctacaattttgcgaaatccagtgatacaaaatatcgtgactcttccaattcccgcaatatgacgatcgtggactacgatactattattgtaaacgataagacctacatcagagaataatcctaccactatttgtgataccttcataaaaatttcatactcccaaaaatccggttcagatcctgagccggatttttacgttttatgtttctcctataagtgccctttttaatttacaggaacctacagggaatttcctaaaaaaagtacgccagacaatgaatttctccatcatctgacgcactttcttaattttctttatctgattcctttttgatctatcaccggctgcccggcgaatccatcgtttcgtatggatctgtttccgtccatccgtcattcttccggatctattctacgtcctgtccgcccttcacctgcggccgtccaaggctctcccacttcaggtaggcactgataaagccgtcgagtccgccgtcgagcaccgcatttacgtttccgctctcgaagccggtccggtggtcttttaccatcgtgtacggctggagtacataggaacggatctggcttccccatccgatatctttgatatcgccgcggatgtcggagagcttctctgcatttgcctgctgctttaacatatacagtttcgctttcagcatctgcattgccttgtccttgttctggaactgggaacgctcattctgacactggacaacgacgccggtcgggatatgggtgatacggaccgcagatgacgtcttgttgatgtgctgtccgccggcaccgctggaacggtaggtatcgatccgcagatcatccgggttgatctcgatatccagatcttcctcgatatccggcataacatcgcaggatacgaaggaggtctgtctctttccgttcgcgttgaacggagaaattcttacgagacgatgaacgccgcgctcggactttaagtagccgaaagcattctcaccgttaatctggatcgttaccgacttaataccggcttcctcgccgtcgaggaagtcgaggacctcgacctgatagccttttctctctgcccagcggcagtacatgcggtataacatgctgcaccagtcgcaggactcggttccgcccgctccggcattcagtcttaagattgcattgttattgtcatattctccggtcagaagtgtgcgcagacgaagcgcatcgagctcagaagtaaactcatcgagcatctcctggatctccggaatgatcgccgggtcattctcctcgtaccccatctcgatcatcagtccgatctcctcatactgattctggagcttgttgtactctgcgaccgtgtcctttaagtttttcgcttctttcacgagtctcgtagatttctctgcatcctcccagaagctcggctcttccatggtcttgtccaactcatcgatccttctgatctttgcctccagattcagggaatcacgaacctcctttaacggagtttcatatgtggacaaggtgtatttaaactggtctaactcaaccattgactctgtcctttcttataatgatttaacaaggtcagcgcaaaagcttgcgctgaccagtaacatttcagtatctttccggctgccgtctctatgccagcggttttcttccgtgacactgcttatatttcttaccggatccacacggacacggatcgttcgggtagatcttctgggtctggcgtctctgcggagcttttgccgcggaatcatcacggtttgtacctgtaaccttggctgccggctctctctcgaccttctcctctacacggatatggcagagaatacggagcgtgtcctcacggatcgccgcagtcatatcatcgaacatctcgtatgcgctcatcttgtactcaacgagcgggtcacggttgccgtatgcctgtaagccgattccctcacggagctgatccatatcgtcgatatgggacatccacttgttgtcgataacctttaagagtaccacacgctcgatctcacgaacctgctctgcatccgggaattctgcttccttggactcatagaacttcgtcgcaagctcttttaacatgtgcttgaactcatctttattcatcttcttgatctcttctgtcagctcgatcggctttaacggaatgatcggaagaagaagatcatttaattccttgaatccccagttctccggagtctgctcgtcgctgatggacatgtccacagcgccctcgacaacgtcgttgagcatcttcatgatcacttcacgcatgttctcaccgtcaagtacctggcggcgctcagcgtatacgacttcacgctgctcattattgacctcatcgtactttaagagattctcacggataccgtagttgtttgtctcgatcttctgctgtgctttctcgatcgcggaagacagcatcttgtgctcgatctgctcgttctccggaacaccgagtgcattgaacatgctcatcagcttgtcggaaccgaagaggcgcatcaggtcatcctcaagggagatatagaagcgggactcacccgggtcaccctgacgtcctgcacgtccgcggagctggttatcgatacgtctggactcgtggcgctctgtaccgatgatctttaagccgccgagtgctttggactcatcgtcaagcttgatatcggtaccacggcctgccatgttcgttgcgatcgttaccgcaccgtgaacacctgcgtccgctacgatctcagcttccagctcatgatacttcgcatttaatactttatgcggaactccgcgcttctttaacatctggctcaacatctcagatgtctcgatcgtgatcgtaccgacaaggaccggctgtcctttctcatgtgcctttacgatctcctcgacaactgcgtggaatttctctttctttgtcttgtatacagcgtcatttaagtccttacggataaccgggcggtttgtcgggatcacaataacgtccatgccgtagatattacggaactctttctcctcagtctgggctgtaccggtcatgccgccttttttcgcgtacttgttaaagaagttctggaatgtgatcgttgcaagagttctggactctctcttaacgtttacatgctccttcgcctcgatggcctggtggagaccatcggagtaacgacggcccggcatgatacgtcctgtgaactcatcgacgatcaggacctcatcatccttgaccacatagtccttatcgcggaacatgaggttgtgtgcacggagtgcaaggataatgttatgctggatctcaaggttctccgcatctgcaaggttgtcgatgtggaagaatgcctcgaccttcttcacaccctgttctgtcaggtttacgactttctccttctcatttacgatgaaatcaccggtctcagtgatctcctcgcccatgatggcgttgagtttattaaactcaccggattcctcaccgcggaccagctgctttgcaaggacatcacaaacctcatagagctttgtggactttccgctctgtccggaaatgataagcggggttctcgcctcatcgatcaatacggagtcgacctcatcgatgatgcagtagtccaggtcacggagtaccatctgatctttgtagatcgccatattgtcacgaagataatcgaagccgagctcattgttcgtcacataagtgatatcgcactggtaggctgcttttctctcctcggaagtcatggagtttaataccactccgacctttaagccgaggaactcatgaacctgtcccatccactcagcatcacgctttgcgaggtaatcattgaccgttacaatctggacgcctttaccggcgagggcatttaaatatgccggacaggtggaaacaagagttttaccttcacctgtcttcatctctgcgatacgtccctgatgaaggacgataccaccgatgagctgtaccgggtaatgctccatatttaagactcgctttgcagcctctctgacagttgcaaatgcctccggcagaatatcgtcgagcgtttctcctgcagcaaggcgctctttgaactttctcgtctgatcctttaactcgtcatcagacatcgcctgcatggtcgggcgcagtttctcgatcttatcgatgatcgggtaaatatactttaattcccggtcactgtgcgtaccaaatattttttcaacaaaattcattctgcttgttctcctatataaataaatatccacatgcggctgcccccaggctttcacctgaaaatccagccacatacactgtttcaatctctatccgatgccttttcttctatgttgcggcacttttcacatgaccgcatacggctgcatcgtacaatccttaatattttaacaccttccgggcttttattcaatgacttcatttaattttaacaattcgtacataaatcgttacagtacacgggcattccatgcccgcgtactgtaacaggattttgccgatgcttcgcattccgaatcggcaaaatccgcgaccataacggtatcatacggaattttcagttcagaaaattcctacccgtgaaaagtaaccataaatcttttcacggacggtactttataaatttacaaattaatgtcgcctccagcaaacaagcacgactcccaagcatgttgtcgcggctgaatacctctacgagcagcagaccagcgagctcccgaaaccataccagcacatgcactcgccgcggtttactaccactgtggcagcggaccggtgagattccgggcgggagcacattgatccggggagctggcttcctcttagctcgcgggtgactgcgttggagaacaaggaacacttgtctgagtgaagcgagttgtgtccctcgttctctgctcttagcagtcgcacgcaagcttagaggaaccctccctggatcgccggtgcttctgcccggaatctcaccgcccgcagatactccccaacgcccgcaatctcttctccccaaattcctgccaaaccattttccacttaaaaactgtgcccctttcccacacacttccaaaaattcagatattttttctcctacccattctgcccaccctctccctctcccgcatcctcttcccgcagcttttcctccatgattcccccatttcccccagactgtacaacttgcacaaaccatacattcgattctccggttatccactttatccacactaatccaccaaaattatgtggaaagttgtccacctcgaaaaatgccgatttcacgctatttcgcagttatacaccaagttatccacattatccacaggttttttcctccccaccggtggattttacactctctttatatttgttttatttttgtgaacatctcataaaatttacatttccgacaacttttttgcccgatcccattgacaaacccggaagactttatctagcttttgagcttttatacacctttttttaccttttgaaattttctcattttttgtgtattttagttgtcttttacagaattttgtgttatacttaagccatcccaaacaaaggagttgattttatgcgttacacaatcagcggaaaaaatatcaacattacaccaggcttaaaagatgccgtggaaagtaaattaggaaaactggagcgctatttttctcctgatacagaagtacaggtaacattaagcgtagagaaaggacgtcagaaaatagaggttacgattcctgtcaaaggcagcattatccgtgctgaacaggattccaacgatatgtacgtatccgttgatcttgtagaagagatcatcgagcgccagatcaagaaatataaaaccaagatcgtcgataagaaacagagcgcattagctttcagcgaagctttccttcaggaagaagcagagcaggaagaaaccgttaatatcgtaaagacaaaacgcttcgcgatgaaaccgatggatgctgaagaggcatgcgtacagatggaacttttaggacacaatttctttatgttcctcaacgcagatacaaacgaagtaaacgttgtttacaagagaaaaggcaactcctacggactgatcgagccggagttctaaatgctctgaaatttcataagaatgaatcaccggatagcggcaccgatacggatcatcgtacagtgaccggttctccggatcagtagaaaaacaggcggtacctgatctgaaatcgggtatcgcctgttctttgtcttcttttatctcttcttttttgcacacgccgcgcacgcctcacatgcgctcttcgcgactgccatcccgccgagggatgtctcgcgaagctccgacgggatcgaacgtccgaccgcatacatgactccgatcgtctcatcgatcggggtgatgctccggatcccggccatggagagttctgctgatatcagcgcattcgaagcgcccatcgcattccggttctggcatggattttcaaccagtcctccgatcggatcacagacgagtcctaaaatattcacgatcgcaaaggatgccgcatcgagacactgtgccggagttcctccgagaagctccacggccgcggacgccgccatcgcactcgccgctccgacctccgcctgacagccgccctccgctcctgccgttgttgcatttctcgtgatcaggtagccgactgccgccgcattgaacagcaccttgcagatctcctcatccgtaaatccgaaattttcctgcagcgaacagaaaactcccgggatcactcccgaagatcctgcggtcggtgcagccacgataagtcccatggatgcgttgacctcaagaactcccaccgcgtaagcgatcgccttcgacactacatccccgcagatattctttccgttctcccggagtgtgtgcagcttccggctctccccgccgatcatgccgcccatgctgacgatgttctccttcaacggctttttcgccgacgcctgcatgatcgaccatgcctttttcatcttttccttcgtcttttccggatcctgctccaggaaggtcgtctcccgctcaaacatcgcctcggagatcgttttcttttctttctcacagtactctaaaagttctgctccatttgtaaaattcatcgttttccctcccgtcagtccagattgatcgccggaaccaaaagtacatttttgaccgcctcaaagccgcgcagagcgtttaccacctggtttgagaccgtcgtgtccacttcaatgatcgcataggccatcttgcccttgctctccctgtagaggcgcagggaaccgatatttaagtcgtatgcacttaaaactgccgtcacgaatgcaagcgttcccttcttatcgatatgctggactacgatcgtactgtaatttccggtgagatccacatcaacgccatttaaccgcgtaatgaccgcatttccgccgccgatggactttccgcgcagggacatctcattcccgttctcatccttcacatagatgtccaccgtgttcggatagatctccttgtccgtaaaattctcctcaaaactgaactggagtcccgcctccttcgcgtactcaaacgaatcgcggatcctctcatcatccggatggtaccctaagataccgccgaccagcgcccggtccgtaccgtgtccatggtacgtgcgcgcaaaagagccatagagaacaaagcgcaccgacaccggtttctccaccatttttccggcgataaaggcgatcctcagcgctcccgccgtgtgagagcttgacggtccgatcatattcggtccgagaatatcgaacgttccgatctcattcatacctgtttcctcatttcctgtatttttcgcaaaacggccatgatgctgcatggaaaatacgcagcgctggattataaaacacagctgccgttttgcttttctttttctacatactgcctatccactattatacacaaaaaggagctgtttttccacagctccttatcgtttcttttttatggttcctgctgtaattcttcgcttgttcttctctcggttacagactacactgcatttcctctattcccgacaactcccagcggcaagtctccgggcaggagtgccttaattcaggaacgtaaccgccttcgccggcgttctgtaatacgcgttggaaataataataccggtctttgacgtgctggcgtgaatgatctttccattgccgatatagagcgcaacgtggttgatcgtctttccgctcgcatagaacagaaggtcacccggctggatctcagacagggagatctgctttccgttcgatgcctgatctctcgaagtacgtccggtggaaactccaaaatgttcaaagatccgcatcgtaaatccagaacagtccgctccgtttgtcaggcttgtcccaccgtatacatacggattcccgaggaactgtttcgcataagccacgatcgctgtgcggactgcagaatcatataccgcacttcccggtccgttctgggtgctctgatagctgccggaagttcccgtgctgctgccggtagaagtactgctgccattcgaactgttgctgcccggacccgctgtgtttcctgtattctggcttgtgctgccctgactgctctggttcgtctgctccttcgtcgttccgttgtccacattcggattctgcgcgatcataccgatcgaggttgacggagtgtccttattttccgtgctctgtccggattcctttttcagttcctcaacttttgcgatcgcatcgtccgcctctttcttgatccgggcagcctcctcagctttctgcttttcttcctcaacgctgaccgcctgcttaaactctaccctctgggtaacataatccttatggacatatccgctcaaggattcatcgacctggatctcgataaaatcgccgtcttccttcacttccagatattccgaatctttggaaagtgtcgtgaggactgcgctgttcatattcggctgttcgcggagatttaaaccatccgcgctgactgtgacatatacagttcccacattctttgcgatcttctcagcctcagcaccggtaataaaatattctgattttatgtaacctttaacggaaccggactggatctgataccaggttcctccctctccgtccaccgttgcaaggatcgtcgccgcacagttattgtagatctttccgacaatactgctggaggtgttcgcctcggaacggatatttacatagttgctcacgtgggagatcgccacattatcgtaagccgactgtttatttcctacggtcgtgatcccctctctggcgctcacctgcaccgaaagcgtctcagccgcataagcagcctgcggcatcatgagcgccacgctcagcccgcagaccgcgatgattcttcctgctctgttcattctttttcttttctcctgtcaattaccgacaaatctgttttccattctctatctgtcaaaagctgtcgatatgctcaattctgtcaattttatcctcagccggcctttccagacttcggttttatttgtcgtgcagcacatctgctgctctctggcttttatatgccggttccgtaccagctgctgctctcctgccgccattgtgatttttttttattcctgcccgttcagataagcttccaccgatgcgacgcagttcgcgccgtccgcaaccgccgtcacgatctggcggagcgcctttgtacggacatccccggccgcgaagattcccggaacatttgtctttccgtcctcaccggctgcgatatgtcccgcaggatccatctccacggatcctctgaatatctcactgttcggggtgatcccgaccgcgacgaacacgccgtccacagccaggtcattcttctccccggtcttcttatttaaaattctgagtgtttccaccttatctgttccgacaatttcttccgggactgtatcccataagatctccacattcggaagctccatcaggcgcttctgcaggctctttgccccgcggaactcgtctcttctgtggatcacatagactttctcgcagagtctcgcgaggaagatcgcatcctcaagggcaacatccccgccgccaatcaccgcagtcgtctttttccggaaaaacgcgccgtcacaggtcgcgcagtaggaaacaccttttcccgtaaactccgcctctcccaggatctcaagctttctgtgatgcgccccggaagcgatgatgaccgctctcgcaagtctcgtctcctttttgcagacaacctgatagatcacaggcgggcgctccgccccggcttctgctgccgtcaggagttcctgctcctcttccttcccggatgcgtctgcggactccgcactttcgatcttcagtacggtatcttttgcgaattccaccccgagcttatcggcatgttcccggaatttcattccgagatcaaagccgccgatccccggaaatccggcataattgtctacctcatatgttgtaagcacctgtccgccgctcatcatctctttttcgatcactagtgtctcaagctccgcgcgttttgcgtagatcgcagccccgagtcccgccggaccggaaccgataatgatcagatcataaatctgttccatgatgcctccaatctcagtatttacacctttttcctatcgtcttctgtccgcaccacgcggtcaatcagcacacaatacatcttttatagtatagcaccatacatctctattatacaatctattttcccggaatttaagtggcattcctgtggcaaaatctgccatcgaacagctacgagaaaacgcagccatacgggagagtatgactgcgttttccatattctgatactcctgtttctttacctgcttcgtcctttccgcgttctttgccggtcatcaacggaatgtagcgaacaaaaacctgtgaaattaagcctgttttttcttgcggttgtagttaatcaggctgccacagcggatgatttccttttcctcgtcggtcagtgcctcaatggcgagagtaatggacttggcattttcacccataacgtaggcagggatattggtcatatcgccttccagcgccttacggatattgggaacaaagatgtagtcatcatcggtaaagctctgttcatcccgggtgatgaagggaatcatgccccagttgatgcagttggagcggtagcgcttggtggcgtactccttggtaatatttgcgccacctaacagaacccgctggcaggaagctgcttgctcacgggcggaaccgtcgccgggctttacggcgtaaatggtgctggacaagtcaacggattcgtcggaaacatcctcaaagccagacatggtacgaatctgagtgagaactgcctggacttcggcaggacacttgccactttttctggccttttcatttgccatgacagccttggccttagcaacatagccgggaacacggcgactcagagtgaactccgccagacccatggggttggagcggaaggagccggtttcaccggagggaatcagctcatcggtcgtggtgacaggatcggtgatgtaggcgcagaccttcagcagcatatgctcgttcagttcaggcatctcgggccagtccttgatattggggccacagaccagtttttcatccagattgcctttgccaaaaccctgatagacgcgatgctcgtaagcagtgggatcgtagtcaaattcggggcagtcaaattcgtagcccacctcgtcggcggcggtaatgcgaccaccattggcagcggacacggcgatggaacgggcatccatcagggcaacggaggaaatctgaccattgccgggcttggagccttctcggttggggaagttccgggtagtatgccggatggccagctgaccgtgagcaggggtatcgcctgcgccgaagcaggggccgcagaaggctgtccgcaccgtagcaccggaagcaatcagcttctcaatagcgcccttgcgcagcaggtccaacatgactgcctgcgagctgggatacacacccagagagaaggcatgattgccggtgctcttgccgtccagcagataagcagcttccataatattggagtacgtgccgccggcacagcctgcgatggtgccttgatccgcgtacagcgcaccatcacgaaccttctcccacagatttaggtgcagattggggttcttaatgagctttttgcaatcatcttccaccatgtggagaatgtcgttcatattggcattcagttcccggatttcaaaaccgttactgggatggaagggcagagcaatcatgctgtggatggtggaaagatcaatgtagatgcagccgtcgtaataagcgacatcggcggggtccagttgcttaaactcgctacctctaccatgacgattcaggtaagcctgggtgtcagcatcggtgcgccagatggaggacaggcaggtggtctcggtggtcattacatcaatgccgttgcggtagtcggtggacatggatgagacgccggggccgacgaattccataaccttatttttcacaaagctattcttaaacactgcggatacgattgcaatggcgatatcctgagggccaatgccagggcgaggctttccgtccaaatacacgcagaccacttccggataggcactgtcccaggtctgctccaggatctgcttgaccagttcgccgccgccctcgcccaccgccatggtgcccagcgcgccgtagcgggtgtgggagtcggagccgagaatcattttgccgcctccggctacagcttcccgcatatactggtgaatcacgcccatatgcgggggcaaatagatgccaccatattttttgcaggcagtcaggccaaacaaatggtcatcctcattgatcgtaccgcctacggcacacagactattgtggcagcaggtcagcacgtagggcagaggaaacttatcaagacccgaagcgcgggcagtctgaatgatgcccacataggtcaggtcatggctggtgattgcatcgaacttaattttcaggttgtcggcgttgccgcttgtgttgtgggactggaggatgccataagcgatggtaccctttttcgcatcttcttttgtgaccttgatctgtcccacgttttctttttcaggaaccaaagtcgtgccgttcagaagatacacgccggaatcgtacagtgttaccataattgctgctcctttatgttttattccggcgatttgacctcgccggtgttttttccttgcgcatttatcataacattttcttgattggaagcaaaattcataattaacattataactattccttttttgaataatagaagtttgcggcttttgtgcgacttgtacaaaaaccaaaggctgcttatccggtggcatctgccaaatttgtaggaaatgtgaatttcctcacaagaagagaaatcttgctcctatctcttaaaaatagcattcctatcaactattatttttaaaaaaacatgaattttacaaatgatttcttttacgctatagtggtctcagacaaaaacgaaacaaaaaacaaaggaggcaactttaatgaacaacgcaaggcacacccttcccgtctccattcttcggggcggcacaagtaagggcatatacattctggaagaggatcttcccaaggacaaggcgctctgggagccgctgttgctgaagctgatgggcagcccggacaagaaacagatcaacggcttgggcggcgcacagtccgtcaccagcaaggtagccatcatcaaaaaatcagaccgtgacgacgcagatgtggactataccttcgcccaggtcagcgtggacaagcccctggtaagctacaagggcaactgcggcaacatctcctccggtgtcggacccttcgccattgagaagaaactgattgaggcaaaggagggcatcacccccgttcgtatctacaataccaacacggacaagatcatcatcgccgatgttcacacccaaaacgggcaggtggtctacgacggtgacttcgccatcgctggtgtacccggcactgccagccccatcaagctgaaattcgtggagccagcgggtacccttggacaaggcctgctgcccaccgggaatcctgttgacattttgaatgttcccggttatggaaaaatagaagtttctattgtggacgccgccaatcccctggtatttgtcaaggcaaaggatttggggctcaccggcagggaaacccctgaggaactgaacgccaatgcggaaaaactggagcttttagaaaccgtccggggtctggctgcagtgaagctggatctgatagccgattacacccgttccgcatgggagacccctggcatccccaagatgacctttgttggtgaagctgaagactacattaccgcggagggagtctccgtgaagaaagcctccgttgatctgctttcccggatgatgtccatgcagaaggcacaccccagttatgccatgaccggagccatgtgcactgcggcagccgccgttgtacccggcagcgtggtcaatcaggtactctcacccgacactgatacccagttcatccgtatcggacatcccagcggtattctggaatgcggcgtggattttgaagaaaacagtgtttcccctgtaatttttgacaccttcggcttccgtaccgctaatttcctgctggacggaattgcccacatttaataaaggagaaagaaaagatggatttttctgttatcagccttattgtattggtggtcgtggtagccatcggcttcattaagaaagtgaatctgggtttcctgtctttgggcgttgcgtttattctaggtacttgcggcggcatgagcgccaaggaaattgccggaggtttcagcagctccatgttcgtcacactagtgggtgttacttttttgttcggtatggcctccgctaacggcacactggagctgttctctaagaaggttgtggctctggttggtaagcataccgtgctgattccggttctaatgttcttcctgtctgccttcccgccattggcccaggtcatattgccgctggcattctgatgaccacctttgccatgtatctggcctttgaaatggacatcaaccctgtggcaacagccctctttgccaaacttggcgccaacgcaggctgtgcctctcccctgtccctgacaggcgttctggcaaagagccttgctgagcctctgggctatgatggctttggcctgcatctgttcctgtccactctaatttccggctttctcttcacgctgattttgtacatcgcctttaagagttacaaggttaaggccgacaaccctttgaagctgtctgaaatttccaaatttaaccgggatcagctttgcaccatcgcggccatcattgtcatggttatctgctgcatcggcttccagcttgacaccggactgtttgccttcgttgccgcctccgtgctgattctgctgggctgcgccgatgaaaagaaagccattaagagtatcccctggggaactctggtgttcatctgcggcgtgggcgccctgattaatgtcatcaagaagctgggcggcatcgacctgatctccaacttcctcaccggcttgatgacggaaaaaaccgccacccccatccttgccgcaacctccggcatcctgagctgggtaagctccaccaccggtgtggtcatgcctgctctgttccccatcgccgcagatgtagccgccgaatttgcaggctctgtcaacttcgtggaactgatttccactgtcgttgcaacatctttcgctgctgcaatcagccctctgtctaccggtggtgctatcatcatgtcctcctactccgctgctcgggaaacctccaacgaagaaatgaacaagatgttcaagcagctcttcctgctgagtgtcgcaaatgtagcgctgaatgtgctgctgtccgctctgggcatgttcaacctattcggcctgttctattaagcatccatatccaaagcaaaacgcaccgcctgtcaacctgcggtgcgttttgcttttatgtaaaattcttcacaatggtgatgtattctcgggcatggtaaggcagatagctgtttttccggaacgctgcaacgaaatccaccgtggtgcatggctctcctacggagaaacagaccaccggatcggtttgagtgatgtgccgcaggtgggtctccgtcacaaagaaacagccgtagccctttcctgccagctgcacggccgctgggatattactggtttccagcctcacaatgggggtaaaatttgacttgcggcacaggtgatccactgtttcccgggtgcgctgaccgggaatctgcataatgaaaggcacatcctttaattgctgcaaatccacccaagggtatttacatccctcacgaatcacgccgctatgggcaagggggtgactcgccgccatgactaccagcacttcctcatgcttgataacctcataatcaatgtccgggcttttgatgggcagattgaaaaatgccagatcggtttcgccatttagaatcattccctccagcttgccagagtgttcctccatcacgtctaaccggacattggggtacatctgattgaataccggcagagtacacggaagcatataggctccgcgcatagtgggaaaggcaattttcaaagaaccgtggttattcttgatgatatcgttcatctcctgatccagctcttttttcaggttcagaatttctgtagccttaaccacatatcgctcccccgcataggtcagcacgaatttatgccccagcttgcggaacagcttctgccccatctggtactcaagagactgcaagaatttcgtcagcgtaggctgggtaatatacagcgcatcagcggcttttgtgatgttttggtactttgcaatagctaatacgtaggataagtccttgaaatccataaaacactgcccctttctcttttctgacagtataacgcgggatattccctctgtctatgaattttgaaaaaagtcaaagtcaagacatgcaccaagtgcgaccacgagagtctgcagtacgattactgcgctgttgaaaaataccataagttattttctcctgtttctgtgccatatcggcgattgttatttgctgcaatacagctgtgacatctatcgttctcatcttccttcacatgtgcacctattccggaaaacgagcacaaaaatagccagacactgatgtggggctcaatgtctggctatgtaaggctctttatttagatttcagttccataaatttgttagtcttatgacttccactgcttcttctattccatccaagtcaactggagattttgaaacaaacacatatttatggcagttcattccggttgcctttacctgctcaatttcttctcgaacaattcccgccggaattgtttcttttcgaaacttaacttcataaaagacatatccgttttcgtcctgtgtaacaacatcaaattctccgttccttttctctgccgggagatcatagtagtactttccgatcttttcaatcaccggagaaatctctccacccctgttctttcgaatcaagtactgcttacagatttcttcgaaatagtgcggaacatagaaggattcaaaatcctctcggatatatttttcataaaaaaacgacgggtccatgatctttctctgcgaggcataccgaaaaatataccgataataaaatgctgaaagtggatcactgatatggtagcttgcttttcttttattcccctcatcattaatcggtgttcttttctcgaccacttccatcttagagagtttttcaagtacatctactaatgtcggaccactggatacatgtgattgatcgaggatgtctttatacttggtatatcccctagacaaagcttcaaatacctcgtttgcgtttacaattttggagatttccgcatttaaatacatagaaacctcattttccaaacgcgcctctggagcaaccaaaagttccatcagattctcctcaacagagatggaatcattcactaaacgattgtaatatgggatacctccaaatacagaataaatctttactcgatcctcttcagaaaatgccggatagaactcggtagactcataataatccattggttttaggttaatcgtaagattaatgcgaccatacagcgggttaaaaggctccagcagatttctcatgatttctacaaaggatcccaaaataataaatgtgagttttgcagagtctctgtatttatcaatcagcgcctgcagaatgctgtccattcccttgatattttccctcagatatggatattcatccaggacaaaaatcatattctcctcacaagatctttgaaaaatgtactcaagaacctcctctatagattgatatccaagttttggaagatgtaactcttccgataaaatattgcagatcccctgtgcgttgctttcttctgccacctgcttgcactcataataaatgcttggacacgctgtacttttgagaagctgcttcaccagctcactttttcctacccgtcttcgaccatagatcagaacgttttgcatcgcttcctctttattcgttttggcaattgctcgattaagttttcccagttgttcctttcttccgataaatttcattttattcggtcacctccgactcggttttgttcgaatatattatagcatgtttttatattttttcaattcttattcggttcattccgactcggttttattcgaaaaaatgatgtgattaatatgatgcagaaaacgtagccatacgaaggagtatgactgcgttttctgcatccgcattctattttgccgcttccgctgccagctgtttctttaagaaagataactgtccgccgcttaatacaactgcgatctcattgtctgtgagatccagacgggcacggaaggtgaaattttttttcttgtccttgatgagaatagatcttgtcggaatctggtcgaggaggttctcgaactccagctcgtcattctggtcaaggcggtcatagtcggccggatcctcgaataacatcgggatcacgccgtggtttacaaggtttcctttgtggatacgggcgatgctctttgcaataacagctttaacaccgagatacatcgggttgatcgccgcatgttcacgggaagatccctgtccgtaattctctccgccaatgatgatactcttacccatggctttcgcccgtgctgcgaactccggatcataacggtggtagcagtactgggacatcagcggaatattggagcgcatgctggagaattccgcgctggccggggtgatatcatccgtcgagatgttgtcacgcccctttaagctgatcggtgcacagagatactgggtcggagcttccggcaccggaaggaacttgatgttcggtccgcggacgatctcaacctttttcgcttcctcctcggagagcggaggaatgatcatggaatcgtcaacaatgtactgatccggctctttgatctcgccgaggatcttcacgttctcgcccatgatgtcctctgcggtcgcaaatgttcccatgatcgcagtcgcagcggcactttccgggcttaccaggtagatcttcgcagtcggatttccagcacgtcccttgaagttccggttggaagtgcggacagcgactccgtctgttgccggtgtctggccgatcgcgcagcacgggccgcatgcgatctcaaggatccggactcctgctgcgagcagcatatcgatatagccgtcacgcatcagctcacggtaagtctgtttcgaagcgatcgcacaggtgcagctcacgtcatcgttgacatgatgtcctttgaacacgagagcagcttttgcgatatctgcatagctcgcattcgtacagcttccgataaatacctgctgaacgcgctttttctctgcatcctttagcggaatgacgttgtccggctggtgtggacatgagatcagcggctccagctcgcttaagttgatgtcgatgcattcatcatattccgcatcctcgtccggcagcatttccacatactggtcgccgcgtccctgcgcagtcatgaactttttcacctgcgcatccgccgggaaaatcgaggttgtcgcccccatctcagcacccatattggcgatcgtggctctcgccgggacctccagagctgccgcaccaggtcctacatactcatatacatttccaagtccgcctttgatcgtgacgagctggagcatttttaagatgacttccttcgggttgcatccgggttttaaggaaccggtaagatttaccttcacgacacgcggcatggtaaggcgcatcggaacaccggtcattgcagtcgcaacatccattccgccgactccgatacagagcatgccgatcgcgccgccgtgcggagtgtggctgtcaccgcccatgctgacctttcccggaattccgaatcttgcaacatggaccgcatggcagatcccgtttcccggcctggagacatggacaccaaatcgctttgccgcagactgtaagtagatatggtcatccggcgtcttattgtccacatagagcaggttgtggtccaggtagctgacactgcactccgtgcggatccggtcaagtccgatcgcttcaaatgccaggtatgtcataacggcattgatgtcgtgggttaaggtctggtccactttaataaaaacttcctcgcccggagtcatgctgccggaaacatagtgggactcgataatttttctggtcaatgattttcccatggtaaaacctccatcacaatcttcataactgctgttttcacttttttattttcttcttcatctgcacgatctgccgactctgactttctgaaattttgcggcgccgatcacgctcaaattacttttgatctggtctcatcatatcatcggcaaccgggaaaataaaattgaaaggtggaatgaaatgattcaaaagtggaatggggtacttgtaaaagcaaaatttttctctaaaaaacgggacaagctgccgattctgtcgtaaaataatactacgaatccatgaaacgattccgtaggtctgcatatttctcgccccggaatcgttaccatgacttaagggatgtgatttttccatgaaagactccgactggagaattctttatgaactgcataaaacatcaaatctgacgaaaacggcaaatctcctttttatgacgcagccgactctgacaaagcgtttaaaacagatggagaccgaatggggatgtaccattgtggaccggacgccaaaaggcctgacattcaccgcagaaggaaattttcttgccgcacaggcagaaaaatatctggagctgttccatgacacaaaggaagaattaaaaaaaatgcaggatgccgcactgacggagatcgtgatcggcgcttcctacacttacagcaaatactctctcgcagatgttcttgttccgtaccagatcgcgcatccaaatataaaattccggatcgtcaatgattccagtgatgctctttaccgccaggtcctggacggatccgtggatgtaggatttctgcgcggggattatgagggaccggtaaacaggactctgttaggggagacccgcggtttccttgtcacgaaaggagccgtggaagtgtctgcgcttcccggactgcaccggctggactataaaacgaacgaaaagacgaccaagatcctgaacagatggtgggaaatgtgctttgagagcgcttacccgtccggaatgatggtcgggcacatcgacggggcatggaagctgatcgatgaggggatgggatatgccctgagttttctgccggaaaactttgagaaccggtatcagctgacgctcacgccgcttacatggccggacggaacaccggtgacgagaaaaacatggtttgtgtacccgaaggagaaacgactgccggaaaagcttgccgattttataaaatatacggaatcgctttctgcgaaagtttccgaatgaccgtccgatctggctccgtaagcgtctaatcaccgcaagatgaaaaacgcctgacatgcgcgcattgtccagagaacaatgtacctgtactgacagccaaacttccccttgctgcttcattttcgtcttttattggaagaaggaatttctatgaaaaacattgactggaaaattttgaaagtattatatgaaaagcgcagcatcacaaaggccgccgacgccctcttcatgacccagtctgccctgacaaagcgtttgcagtccattgagagtgagtggggacgtcggatcgtggagcggacaagccggggtgtgatctttacggatgatggaaaatatctggtccagaaagcgaatatcatgctggatttccttcaggagatcgaggaccatttcgcggaccgtcatacaaagacagagctgctgaagctcggtgttccgaactcgttcgcaaagcgccaccttccaaaattacttgccgcctatcagaaaagcggagcgaatctctatattaaaacaatttcaaattccagcgacgtgatcttaaaggatctgatcgacgacaccatcgacatcgggctcgtctgcggcgatttcccatatctcggcgatcaggtctgcctgtttcaggaagcgctctacatcgttgccccgaaaggcgctacgttggactctattgaacatatgccactcatcgagaccttctataatccgatggtccgcatgatcatcaatcaatggtggaaaagtcagttcggaagcagtccccatgagaaacagcaggttccctactttgatattgccattgagatggcagagaatgggcttgggatctgctttgtgtttggagatgactggaagattgatgaagaaaagctgcagctgatccccgcctatgaccgggacggaaatccggtctccagaaaggtttccatgctgatctccgatcactgctataaaagcgagggaatttccgattttatccggtttgtggaaaactattacggggtgaactgactcttgatccgtccgcacggaaaatctgtatttcccggtaactattttgctcgtaattgtaaatgtgcggaaccgttccatttccggttcgtgatccggcgcgatattccataacggaataccgcgcctattcttttcctgaatttccatttgacatgttaataatttatcatataggtatcaccagacaggatccccccgatttttctctgaaaccgtcatccaggttatagagaacccccacatcggtacgcaggattccggaacgtgatcaagtgggtatctttgatcgaattatatatttatctcaggaggaaaaggaaatgagctacgcttatgtgggctgcagaacaacaaaagaacgaaatgcacgcggaaaaggcttaaaagttttcgagatcaacgacaagaccggagactggaacctgatccagtgtttaaagacggaggaggaaaatccatcctaccagacactcgacaatgagggcaattttctctattccgtacacggagacaagacaaaagtctccagctataaaattcttgaagacggaactttatctccgttaaatatgatcgatatcggcggaaaaaatccggtgttcatcactgctgacagaacaaaccgctttttagtcgttgctgctcttcagggcggcgctgtctatgtcattaagagaaatgaagacggaagcctcggcgagatcgtctctgagactcatcttcctggcaaaaaagagggaactgtctccttcgcacaccagtgtatctgggatcagacaaagacctacctttttgttgtgacccagggaaggattcagggatacggacaggttctcgtataccgcttcgacgcagaaaacggcactctcaccgagaccgactgcttccgctccagagagtacgatgagccgcgccacatcgcgatccatccgaacaaccgctacgcatacctgatcaatgaaaaaggcaataaaatgacatacttcggctttgatgctgagaatggaaagcttcatgcacgtcagaatctgccgacacttccggaaacctacacaggcgaaggacaggccagcgcatctctgctcgacaaaaacggaaagatcctgatcggttccaaccgcattcacgagtccatcgttctctaccgcatcgaccaggagactggttacatgaaggaactcggctactacccggcaatgggactcaccccgcgcttcatcaccttcaacccggattacagccgtttctacatggcaaacgaggacagcgatacgatcatcgagatgaagcttgactctgaacagggccgcatggaatacaccggccgcgtgatcgcagccgaaagcccggtctgcatcacattccgatagggaggtgcacatatgaatcttggtcttgtttcactgattgctcttttagcagccatcgttatcggctttgtccgcaaggcgaatgtcggaattttatgtatcggcttctccatgatcctcggtctcgtctacgggatcaaggccggagacatcatcaaaggcttcagttcctccctctgtatgcagatgatcggcatcacttatctgtttgccatcatcaacgaaaacggaactctggagcttctcgcaaaaaaaatggtagcgcttgtcggaccgcacaagacgctgatcccgttcgtcatgtacctgctcggattcctgatctgtgcggtgggaccgggagccatcccgtctctcgcgatcgttccggtcatcgcgatcccggttgcgatatccgcaggtgtgaacccgatcatgacggcaatcatcggcgatctcggcgttatgtccggacgtatgagcccgctgactccggagagtgccgttgtccgtgagcttatggaagcacagggacttaccggaaatactgttccgatcatgatgtgcctgaccgtgacagccttcgttgtcgcagttctcgtatatatttactacagaggctggcaggttgctccgcacaccaaccatcaggatgttcttccgaaattcagtaaaaatcagtggctatccttagcaggacttgccgctctcgcgatcggcgccctgttcttctcctggaatgtcggacttaccggttttactgtcggctccgtccttatcgttctcggatgcggtaatgaaaagactgcattcaaaatgatcccgtggaatgtcatcatcatggttctcggtgtcggaatcttaatgaacgtcatctcgatctccggcggcatcgacatcatggtcgatggtctggaatctgtgatgggaccgaaaacagccgcaacgatcatggcgatcgccgcaggcctcatgtccttcttcagctccggactcggcgttgtgttcccaacgctgatcccgacagccagcggactcgctgcgagcatcggcggcgtgactgccctggagctcgtctccgtgatcgtcatcggcggaactgtctccggattcactccgatctccacgaccggcgccctcataatggcgggtgttgcacagcaggcggacgcagacgaaaaattcccacagaacagactgttcgtcgagctgttcgcggtatccttcatcgcgcttgcagtgttggcagtattcgcttttatcggaatttacaagattattgcttaaatttagataattatggccttttaaataacaagcggaatgcctggtgagttttcatcgggcatttttcttaaggggttaccgatgaattttaggaattgacttgcataatattttggcatagtgaattgtcctgaatttataaaacttttgatctatttctgttataattgagatactgtcagcttacgctgaccagaatcatgcgccaagcctcacggatgttcgacttaaatttttgaaaggagaatcgcagctgcacatatctattccgctgcgaaacacatcatgattttcaacaaagaagaaagaacctactggatcgaaaactacaagaaattcccaacctcaaatatttcagacgcgatggataacctcggtctccgctccggaatcgtccttggactccgcccgttagacgtttaccagccgagaaccgcaggtttcgcgaagacactccgccagatgcgcagaaagacagcttttgacggaaagtctctgacaaaacaggcatccatcatcgacagccagaccgagtacggtgaccttctcgtcattgaagcaacaggactcaccgatgttgctaccggaggcgctatgctcgccacaagagcccagatgcgcggggtcatgggtgagctcacaaacggaagtctccgtgacatcgacgagatcgcagacctcaaattcccggtctacctcggcggcacaagcccggtaaagagtgcccgcatcatggagacggttgacgtggatgtgccggtattcctcggcggcgtccagatctgtccggaggatctggttttaatggaccgcaccggcgttgccgtcgtcccgagcgctcacttaaaggaagtccttctggaagcagagaagatcaaggcaaaagaggaccgcatcgagagcaatgtccgcggcggaatgagcttaaatgaggccagacagcagaaataaccatatcgaaaccgaaaaccgtgactgcatcgttcctgatgtgatcacggctttcttgttgggctcctttgaaatatgacaatccatacgctgaccgaactacaacggatttttccgctatcctattgtaattccggtgttattcccttaaaatatgcatatctgccgttttcatcaatcctcggaattcttatagtccgatcatttccggcagctgtgatctcatcaaaaagcaacgtaactattcagtaccttcatagttacgtgcaaaaatccattccagatcagcttcgctgatgggatttttgccttccagcctatgttttcttacggttagcgcagcaagtgcgcagacctactgaacagttacaaataatcactgcgttacaggaaagtgatacagaagtacagaaaatacaggaaactatgttgcgtatctgaaaaaaagatgataaactatttctaatattgccatattgctgtaaaaggcggtggacaataagtgtgtgtgaatggtctgatatccgaaaatgcatcggagtcggatctgcaatcagtgtgtgatggatgagaaagcagttattgtgctgcaatcgtatgacttctgtgccgcaaagctcaggcgcagaaagacccaagaaacaggaggtatgggatatgtaccctattttagaggcaaaaaagcttgcagataagatctatctgatggtcgtaaaagccccgagaatttccgcaaactgcaaaccgggtgagtttgtgatcgtgaagatggacgagaagggcgagcgcattccgcttacgatctgtgattatgaccgagagaaggagacgatcaccatcgtattccagacagtgggcgcgtccacagagcgcatgtccgcgttacaggccggagattccttccgcgacgttgtcggtccgcttggaaacccgtctgattttgtaaaagaagacattgaagaattaaagaagaaaaaatatctgttcgttgcgggcggcgtcggaacagctccggtatatccgcaggtaaaatggttaaaagaacatgggatcgacgctgacgtcatcatgggatccaagacaaaggatctcctgatcctggaggacgagatgaaggcggttgccggaaacctctatgtgacgaccgatgacggttcctacggacataaaggaatggttaccgaggtcatcaaagaactcgtaaatgagcagggaaagaaatatgacgtctgcgttgcgatcgggccgatgatcatgatgaaattcgtatgtcttctcacaaaagagcttgagattccgacagtcgtaagcttaaacccgatcatggtagacggaaccggtatgtgcggtgcctgtcgtgtgaccgtaggcggtaaggtgaaattcgcctgcgtagacggaccggaatttgacggacacgccgtaaacttcgatgaggcaatgaaacgtcagcagatgtataagaccgaggaaggccgtgcacttttaaaactccgtgagggcgatacccaccacggcggatgtggtaactgcagcgaatgatcggtgatatggaggaaatgacatggatggaatgaaaaaagtcccggtaagagagcaggagccgaaggttcgcgcaacgaacttcgaggaagtctgctatggatataatgaagaagaagcggtcgcagaggcgtccagatgcttaaactgcaagaacgcaagatgcgtacagggatgtccggttaggatcgatatcccggcattcgtaaaagaagtaaaagaaggaaattacgcagaggctgcaaaggtcatcggcagatcctccgcacttccggctgtctgcggacgtgtctgcccgcaggagagtcagtgcgagggccagtgtgtccgcggcatcaagggcgaggctgtctccatcggtaagctcgagcgtttcgtagctgactggtcgagagagaacggtgttgttccggagaagccggagaagacaaacggcatcaaggtcgctgtcatcggttccggtccgtccggtcttacctgtgcaggcgatctcgcaaaactcggctacgaggtaacgatcttcgaggctcttcacgagccgggcggagttttaacctacggtatcccggagttccgtctcccgaaacagggcgttgtacagccggagattgagaatgtgaagaagctcggcgttgatatcgagacaaacgtaattatcggcaagtctgtaacggtggatgagctgatggatgaagagggctacaaggctgtcttcatcggttccggtgcaggtcttccaagattcatgggaatcccgggcgagaacgcaaacggcgtattctccgcaaacgagtacctgacaagaagcaacctgatgaaggcgttccgcgacgattatgacacaccgatcgctgctggtaagaaagttgctgttgtcggcggtggaaacgtagcgatggacgcagcgagaacggctctccgtctcggtgcagaggttcatatcgtatacagaagaagtgaggcagagcttccggcaagagcagaggaagttcaccatgcaaaggaagaggggatcatcttcaatctcttaacgaacccgacggagatcctgaccgatgaaaagggctgggtcaagggcatgaccgtaagaaagatggaactcggcgagccagatgcatccggaagacgccgtccggtcgagatcgaaggttccgattatacgatcgatgttgatacggtcatcatggcgctcggcacttccccgaacccgctgatctcctccacaacaggcggacttgagatcaacaagcacagatgcatcgttgcagatgaggcgaatggccagacatcccgcgaaggtgtattcgcaggtggagatgccgtaaccggtgccgctaccgtaattctcgccatggaggcaggaaaagcaggagcgcgcggaatccatgagtatctgagcagtaagaaagcagaataaaaagaggcgggtcaagaccggaccggttt

SEQ ID NO: 2007 - DNA, 26533 bp, Unknown
  gut microbiota DNA sequence
cagaggaactgaatgcggagcacatcaaaaacaggacggctgccatcgatgaggagctggcggccaaagagaaagaacagggatcgatcaggcaggagagagaggctctcgggaccaggatccgggaagtgttagaacgactttccgatgcggagaacaccgtaaatacttccggcagccgcgttgacagtctcgaacagtccatcgaagagttaaagactgcaaggatcgaagcactgaatgaaaaatcagaactctctgtaaagaagcagaaggatgtcaccacgctggagcaggtccaggtccgcagatctgaggtagcccagaaactcttaaaagtaaagagtgatgaggaaaactgggataaccagatctcagagcagaacgagcgtctgactgccatcgatgcggagatcgaaaaactcctctcccaggcggaatccctggaggaagaggtgaaggcggcgaacgaagagatccgccgtttaaacagaaatttaagccacacggaacaggattaccatacggcccacacaaaactggaatccttaaggaaccttgcggagcgttatgatggatatggaaacagcatcaagcgtgtcatggaagtcagggaccgtgtgagagggatccacggcgttgtggctgatctgatcgatgttccgaaagaatatgagatcgccatcgagacagcgctcggcggatcgatccagaacatcgtcacagattccgagcagaccgcaaaagtcctgatcgaacacctgaaaaagaacaagttcggtcgtgcgaccttcctgccgttatccgcgatctcatccggggatggatttaagacgccaggtgcgctaaaagaaccgggagcgatcgggatcgctgcagatcttgtccgcgtgcgtccggaatatcaggcacttgccagatatctcctcggccgcgtcctcgtggtggatcacatcgacaatgcgatcgccattgcgagaaaataccggcactccatccggatcgtaacgccggagggcgatctcttaaatccgggcggttccatgagcggcggtgcctttagaaactccagcaatcttctcggaagaaagagagagatggaggagttggaggaggcatgtaaacgcgcgctgacgaccgtcgataagatccaggcggagaccgtgttccaggaaggcatattccaggaaaagagcggggagctggagtcggtaaagagtgctctccaggaaaaatatctggaagagaatacgacaaagatcgcgttaaaacagctggaaggaaagaaagaagaactttatgaatcctcctcggacatgaacctggaaaaccgtcagctggaagaacagatccatgaactccgcgcaagtctcgccgcgatcgcgaaagagatggagcggctggaacaggaaaacacggagcgggagacaaagatcgggacggattccaccgcgttggaacaggcaaaggccgaccgggatactgcatctgcggcgctctccgaagtccagctggaagcagcaaacttaaagcagcaggattccttcctcgaccagaacatccatcgtctcgaagacgaaaaagagcggctgctctccgaaagaatgtctctgcatgacggacacacggacagtaagcatgaggtggaaaaacgtctggcacagatcgaagaactgaaggaaaagatcaaagatgccggaaaggacgcggaaacgtaccgtcaggagatggctgctgcccaggaagaaaaagccgcgaaaaacgaggcacagaaaggcttcttcgaaaagcgggaagcgctctctgcgaggatctccaatctagataaagaactgatgcgtcttcagaaccagaacgacaagcttgcggaacgccaggattcccaggtggactatatgtggaatgaatatggtctcaccttctcgacagcggagcttctccgggatgaggccctgacgaatgcggcggatatgaaacgccagatcgctgaacggaagaacgcgatccgcggactcggaaatgtcaatgtcaatgcgatcgaggattataaagagatctctgagcgttacgagttcatgaagacccagcatgatgaccttgtcgcggcacaggatgccctttataagatcatcgaagagctggatatcggaatgcgaaagcagtttacagaaaaatttgccctgatccgggcagagtttgacaaggtattccgggaactcttcggaggaggacacggaagtctagagctgatcgaggacgaagatatcctggaggcggggatccagatcatctcccagccgccgggaaagaaacttcagaacatgatgcagatgtccggcggtgaaaaggcactgacggcgatcgccctgctctttgcgatccagaacttaaaaccgtccccgttctgtctccttgatgagatcgaggcggcgcttgacgattccaacgtcgaccgctatgcgaaatatctgcacaaactgacaaaacatacccagtttatcgtcatcacccaccgaagaggcacgatgctcgcggctgaccggctctacggaatcacgatgcaggagaaaggcgtgtccacgcttgtctccgtaaacctgatcgaaaacgatctgaaataattggaggattcatatggaagagaagaaaaagggctttttctcgcgccttgtggaaggtctcacgaagaccagagaaaacattgtatccggaatggattccatcttttccggcttctccgcgattgatgatgatttctacgaggagcttgaggagactctgatcatgggagatatgggaatccagacgaccatggcggtcattgaagacctgaaaaagaccgtaaaagagcagcatatcaaagaaccggagaaatgccgggaggcgctgattgccagcatccgtgcaaagatggaccttggcgagaatgcgtatgagtttgaaaacaggaaatccgttgtcctcgtcatcggtgtcaacggtgtcggaaagacgacgtccatcggaaagcttgcagaccagttaaagacagagggaaagaaggttgttcttgcggcggctgataccttccgtgctgcagcgatcgaccagttggcagagtgggcaaaccgtgccggcgtggagctgatcgcccagaaagagggatccgatccggctgccgtgatctacgacgcgatctccgcgacaaaatcgagaaacgcagacgtcctgatctgcgataccgcgggaagactccataataagaagaacctcatggaggagttaaaaaagatcaaccgcatcatcgataaggagtacccggaagcttaccgtgagacactcgttgttctcgacggcactacaggacagaacgctctggtccaggcccgccagttcatggaagctgccgacattacgggcatcatcctcacaaagcttgacggtactgcaaagggcggtatcgcggttgcaatccagtcggaacttgggatcccggtcaaatatgtcggtgtcggggagaagatcgacgaccttcagaaatttaattccgaagacttcgtaaacgcattgtttgcgaaacagccggaatgaccgatgcatttcaggcagaaaacagccagataaatgccggtatagcagacaactatgggaaagacagaaaaatgttccatcgatgagatcgatcaggaatgaatatgaaggagaatacaaatggaaatgcaggaactttcactcgaaaaatttgaagaagcatctgagatcgtaaaaaaggtcactcaggagacaaaactgatctacagtgaatatttttctgagcgctacgggaacaagatctactttaaaccggaaaacatgcagcgtaccggtgcatacaaagtgcgcggcgcttattataagatcagccagctctcaccggaagagcgttcccgcggtctgatcaccgcatctgccggaaaccatgcccagggcgttgcctatgccgcaaaacttgccggtgtgaaagcaactgtcgttatgccggtgacaacaccgctcatcaaggtaaaccgcacaaaatcctacggtgccgacgttgtcctctacggaaatgtcttcgatgaggcatgtgcccatgcatacaagcttgcagacgagcacggatataccttcgttcacccgttcaatgatctggaagttgcgaccggccagggcagcattgcgatggagatcatcaaagaactcccgactgtggattacattctcgttccggtaggcggaggcggactctgtacgggcgtctctacactcgcaaaactcttaaatccgaagatcaaggtcatcgctgttgagccgacaggagctgcctgcttaaaggcatccttagaggccggagaggtaaccaccgtctccaagatcaacacgatcgcggacggtaccgctgtccagacgccgggcgacaagctcttcccgtatcttcaggcaaacgtggatcaggtcatcacagtggacgactccgaactgactctttctttcctcgatatggcagagaatcataagatgatcgtcgagaactccggtcttttgaccgttgcggctttaaagcatcttgacttcaaaggcaaaaaagtcgtatccgttttaagtggcggaaacatggatgtcttaacgatggcgacagttgtccagaacggactgatgcagagagaccgtatcttcacggtaagcgtgatgcttccggataagcctggccagctggcagctgtttctgcactgatcgcaaaagagcagggcaacgtgatcaagctcgagcacaacgtattcgcaaatgtaaaccgcacagcgggtgtggaacttacgatcacattagagtccttcggaactgagcacaaggatcagatcatcaaggctctggaaacagcaggctactgcccggtaatctccaagacttccggaatttatatgtaatgataccagggattctcccgcctctgcgggaggtgtgatgaacggacctccggtcatggaacgcagtcaggcatatatcaatttgtcaaacttcgtgaaatgcccgacggtctgctgaataaggggaaaatgtatgtacagaagcgaaactcagactgctctcagcaagaatatcctgtattttctccgctggaccgcgatctctattgtaatgggaatcgtctgcggtctcatcgggaccattttcggatacggggtcatctacgctcagcggctgtttaaaacttacagctttatgctgtatctcatgcccgtggcaggtgttctgatcgtccttcttcaccagatgttccacgagatcggaaaccgcgggacgaacctgatcctggagtcgatctcatccaacgagaagatccatatgacgaccctgccgtgtatctttgtctccacgatcttaagccaggcggtcggcgcgtctgccggcaaagagggagctgccttacagatcggcggctgcatcggaaattatctcggggatctcttccatatggatgagagggacaaaaaagtcatgatcatgagcggcatgagcggctgtttcggggcgatcttcgggacgcctctggctgccgccatgttcgggatcgaggtcatcagcatcggtgtcgcttattacgcggcccttgtgccgtgcgtctttgcctccttcatcggtgcccagatttccggggcgctcggacttcacggggaagcgttccagatcctccatgttccggaattttcccttataccggcgctctacaccgtcggactcggactgtcctgtgcgcttttaagcgtctgcttctgcatcctgctccatgagacccagcatctctacaagaaaaagatcgacaacgtttatctgcgcattcttgtggcagcagtcctttccatcggactcgcgctggtgttcggcagggattactgcggagccggatttaatcttgtggaacaggcggtggaaggagatgccggatacctggcgttcttcttcaagatggtcttcacggcggtggccctcggcggcggctttaagggcggagagatcgttcccacactggcagtgggatccacattcgggtgcacgttcggactgctcacaggctttgaaccgtccctgtgtgcggcagcaggcatgctcgccaccttcgtcggcgtcacaaactgcccgatcgcgaccatgttcctcggcttcgagctcttcggctttgaggcgatgccgtattttgcggttgccgttgccatcagcttcacactgtcgggatattacgggctttacagcagccagaagttcacatattcaaagataaagaccgagttcatcaaccggaaagcccactgatcaaggtacggttccggggattcagttagaaaaaatgatcaaaagcaatcggatatttcggaaaatatttgcagaacccgatgaccggggattttcagatcggaaatcccgcagggtacccattgatcgggaccggatgtgaatattgtcgggatatccggttgcttttttactgccaaggtgttatgataaacgacacaggtctatttacatgcggtgctgtcacagaccgccggaggatggttgtacgatatcccaaacggcgatctctgagagttaaaagggaaacaggtcagacgcctgtgcgagcccgtcactgtagatccggagtgcatgaatattgtccgtgttatgcggacagtcactggcgaaacctgccgggaaggcgtttcatgcatgatgatggatgagccaggaaacctgccggatgtccgtttggaggggaaaaaccagccggggaccttaaaaaatcatttttcaagcgaggagaagagtaaatgagaaaagcaaacatctacgccgttatgacagcggcagccgtatccatggcgatcctttccggatgctccggaagtcagacagcagcgacaacagctgcggagaccacaaccgttgcagagacaacagctgaggagactacagccgcagagacagcagctgcagaagaggacgaggaaaactacaatacaggagacgcttccatggataacacaagaaatcaggatgagatcggcgagaaagaacttcttgttgtgagctttggtacaagctacaatgacagcagaagactgacagtcggcgcgatcgagaatgcgatcgaaaatgcattcccggactactccgtaagaagaggtttcacaagccagatcatcattgaccatgtaaagaagagagacaatgtttcgatcgataacgtgacagaggctttaaaccgtgccgttgacaacggtgtcaagactcttgttgtacagccgacccaccttatgaacggtcttgagtacacagatcttgtaaacgagttagctgataattccgacgctttcgagcaggttgctgtcggtgagccgctcttaacttctgatgatgacttcaaggcagtgatctccgcgatcacagacgcaacaaaagagtacgatgacggtgagaccgcgatctgcttcatgggtcacggtacagaggctgattccaacgccgtttaccagaaaatgcaggatatgttaaaggaagagggttttgacaactactatgtaggtaccgttgaggcaactccgtcctgtgaagatgtcatcaatcaggtaaaagaaggttcctacaagaaagttgttcttgagccgcttatgatcgtagccggtgaccacgcaaacaacgatatggccggtgacgacgatgactcctggaagagccagtttgaggctgcaggctatgaggtaacctgccttgtaagaggtcttggtgagcttgagccgatccagcagcttttcgtacagcatgcccaggctgcagtggatagtctcgcaaaataagaatgtttagatatgggcggtcgaggattcggccgcctttttatataaccgggaggtgcacttgcgggaaactccagcctgcgaaaggaacttcaggaaaccgtccaggatgccccgatgatttccggttacaaaaggagagaaaactttatgcgtaaattaaaacaattttcattagcactcgcagttgtctgcgctctgtccacagcctgcggacagtccgggtcgacagaaacgacagttgcttctgcagagaccacggcggaaacaacagcggaaactgcttcggccgatgagacaaaggcagccgttgcttccggcgaggagactgccgcagaacagacacttgacacgacgggactcgtcccggtatctgcagaggatctgaaagagggaacctacgagatttccgtggagtccagctcttccatgtttaagatcacatcctgttcgctgacagtcaaagacggcgccatgaccgcgaaaatgacgatgggcgggaccggatacctgtatgtctatatgggaaccggagaggaggctgcaaagaccgcggagacagaccggattcctttcgaggagaattctgacggaacacacagctttactgttccggtcaaggccttaaatgaggtgcttccgtgcgctgcattcagcaagaaaaaagagaaatggtatgacagggagcttgtctttgaggcatccgggatcccggcagacgcgcttctcaattcttccttaaaaaccgtccaggatctctcccttgcggatggaacttacaccgcggaagtctccctgagcggcggatccggacgtgcatccgtggaatctccggctgtgatcgagatcaaagacggaaaagcggaggcgacgatcatctggagcagctccaattatgactatgtgcgggtagaggaagagaaattcctcccggtcaatacagagggaaactccacatttgtgatcccggtagctggatttgacagcccgcttacgatctttgcggatacaactgccatgagcacacctcatgagatcgagtatgcgctgacctttgattcaagtaccctggcggagcagaaacagtaaatatgaaaagaagacaaattgatcccaggaagcagaaaagaaggacgcgggtgcgtgatacactttttagatctgttctggctgcggcaatcctcatgactgctgcgtttacctgctccggctgttcgaaaaaaacagaacccgggacagccgcaccgtctacaggggaaaaccacatgaccgcttccgtgtatggcagtgaggaaaatcttcaggctcagcaaaacaaagatctgtcggttcttaactgggaggagatgtccccgacaggctccatggatcttctctacgccgaccagttttcagcagactattatgaggacggcatcgccctcatcaccatcggggatgcggatcagtttctcctgctgccggaaggtgtgtccgcgcctgacggacttccggcttcgatcacggtccttcataaaccggtaaaaaatatctatcttgtagcgacctccgccatggatgattttatccgcctggatgccctggattccattgcactttccgggacaaaggagaccggatggtaccttccggaggcgaaaactgcgatggaagagggaaagattgcctatgcaggaaagtacagcgcaccggattacgaaacgatcgtaagcagttcctgtgagcttgcagtggaatccacgatgatctaccacaccccggaggtcaaggaacagctggaacgcctcggggtcccggtcctcgtggagcggtccagctatgagagccatccgctcgggagaatggagtggatccgcctctatggtcttctgacgggaaaagaggaggaggccgatcagatctttcaggaaaatatgaatgctctgtcggatgtcctcgccatgaaaccgtccggaaagacagctgcatttttctatgtgacaaattccggaagcgtcaatgtccggaagaacggggattatatcgcgaagatgatcgatatcgccggaggaacgtatgtgccggaaaatgccgggaccggtgagaatgcgctttccacgatgaacatggattttgagtctttctatgctgccgcaaaagacgcggatgtcctgatctacaacagtacgatcgacggggaacttaccacgatcgacgaactgtgtgcaaaaaatcagctctttgcggatttcaaggcagtgaaagaggacaatgtctggtgtaccgggaaaaacatgttccaggagacgatggggctcggggacatgatccgggacatgaatgcagtgttctccggaaaccgggagtatgcgttcacgtatctgcaccagctgaaataaaaaacaacgtaactgttcagtaccctcacagttacgagcaaaaatccattccaaattggcttcgccgatgggatttttgccttcaagcctgtgttttattacggtcagcgcagcaagtgcgcagacctattgaatagttacaaaacagcttaaaaaccgcggtcgatgaaaggagacatggaagctatggaagttcagacaaagcggatcatccgcgcctatctgctcctgatcgtgctgctcggaggactcggctttttgagcctggcggtcggcagcgtgcgggtatcggcagcagatctcctcgcggccctgacggcgaaagaggggaccgatatggtccggcatatcctctttgatatccggcttccgagaatgctcgctgccctgatcctcggcggagcactctccgtatccgggtttctcttacagacatttttctcaaatccgatcgcaggacctttcgtcctcgggatctcgtccggagcaaagcttgtcgtatctgtctttatggtcgtgttcctcggacaaggactgatcatgaattcctggaccatgatccttgcggcatttctcggcgccatggtgtctatgggctttgtcctggcggtctcaaaaaagatccctcagatgtccatgttggtggtcagcggcattatgatcggctatatctgttccgcggccacggattttatcgtgacgttcgcggatgattcgaatatcgtaaatctccacaactggtccatgggaagcttttccgggatctcgatggatggggtgaagatcagctcccttgtagtcacagcgacgtttcttggttccatgctgctctcaaaagccatgggagcttaccagctgggagaagtctacgcgagaaacatgggagtcaatatcagacggttccggatcgaactgatccttttgtccagcatcctctcagccacagtgactgcgtttgccggtccggtctcattcgtcgggatcgcggtgccccatgtgatccggcagctttttaagaccgcgaagccgatcgttgtgattccgggatgtttcctcggcggggctgttttctgcctgttcagcgatctgctggcgaggacattattcgcgcctacggagctctccatcagttccgtgaccgcagtgttcggagcgccggtggtgatcgtgatgatgataaagagagcaaagcgctgataccgggaaagtatggagcagcttgtagaccacagcttatcagcctgtgagcagcatgaaaggagaacgtatgaagacctacctgacagccgactgcctgaccgtcggataccgcggaaaaccgatcatttccgatatttccatgaacatccgccgcggctccatcgtcacgctgatcggaccgaacggggccggaaagtccacgatcttaaagagcatcatccgtgagctttctcctctgggcgggagtgtttatctggacggcagggggatcggggaatattccgaccatgagtttgcgaaaaagactgccgtggtcatgaccgggcggccggatccggagcttatgacgtgttttgatgtggccgctgccgggcggtatccgtatactggccggttcgggatcctgtccggggaagataagaaaaaagtccgggacgccctttccatggtgcagtgcgaagaccttgcggatgtcctgttccggaacacgagtgatggacagaagcagcgcgttcttctggctcgcgccatctgccaggaaccggaactcctggtcctcgatgagccgacctcctttcttgatatccggcataaactcgagctccttgatattttgaaacggctggttcacgaaagaaatatggcaatcctcatgtcgctccacgagctggaccttgcggagcggatctccgattacgtgctctgtgcggaacacgggacgatcggaagagcaggaaccccggaggaagtgtttgaaaaggagtatatcgcgaacctctacgggatccggcacgggagctatctgacttcgcttggatttccggagcttccgcggacagacggaactccgaaggtgtttgttatcggcgggatggggagcgggatccctgtataccacgccttaaacagagccgggatcgcgtttgcagccggggtcatccatgaaaatgatgtggagtaccagacggcgatggcgctggcggcagaggtggtctccgagatcccgtttgagccggtgggagagcaggcgtatcttcaggcagaaaaacttctggattcctgcgaagccgttctctgcccgctcacagtcttcgggaccatgaacagcaggaaccgcgagctttggcggtctgcgaaggaactcggaaaattacggcaaataaatcttgacaaatctgattccggtgatatactgatttacaagtgaaaaaaataacacgttgacaggaagagtacgttcggaaaatgctcagagagggatatgtttggtgagaatatcctgcacggaacgaaccgaagaccgccctggagtgtcccttaatcgggaacggtgattccgttatcatcaaatgaagtggtatagattttctatacaagcagggtggaaccacgggtaatctcgtcccttgactgtatttcgtgtacagtcaagggactttttttttcgcgaaacggaaaacagcataaaattttttccacaagaaagaggagaatgaccatgaaagtaacattaaaagatggctcttttaaagagtacgcacagccgatggctgtcatcgacatcgcaaaagatatcagcgaaggccttgcaagaatggcctgtgtcgcagagatcgacggagaagtaaaggatctgcgcacgatcgttgacaaggactgcacattaaatatcttcacagcaaaggatccggaaggtcttgcagcactccgccacacagcaagccatgtgatggctcaggcgatcaagagactctggccggagacaaagcttgcgatcggtccgtccatcgctgacggcttctactacgatatcgaccgcgatgagccggtaacatccgatgacctcgcaaagatcgaagctgagatgaagaagatcatcaaagaagctcttccgttagagcgcttcgagcttccgagagcacaggcaatcgaactcatgaaagaaaagaatgagccgtacaaagtagagctcatcgaggatcttccggaagatgcgatcatcagcttctacaaacagggcgagttcacagacctctgtgcaggcccgcacctcatgaacacaaaggaagtcggcaaggcattcaagctcatgaacatcgccggtgcttactggcgcggaagtgaaaagaacaagatgctcacacgtatctatgcgacagctttcgcaaagaaggaagacctggaagcttacgttaccatgatggaagaggcgaagaagcgtgaccacagaaagctcggcaaagagctcggtctcttcatgatgagcgatgcaggtcctggattcccgttcttccttccgaagggaatgatcttaaagaatacactgcttgattactggcgcgagatccataaaaaagcaggttatgtagagatctccacaccgatcatcttaaacagaagcctctgggagacatccggtcactgggatcactataagaataacatgtatacaactgtgatcgacggcgaagattacgcgatcaaaccgatgaactgcccgggcggcgttcttgtttatgcttccgagccgcgttcctaccgtgaccttccgctccgtatgggcgagcttggtatcgttcaccgtcatgagaaatccggtcagcttcacggtcttatgcgtgtacgctgcttcacacaggatgatgcacatatcttcatgactccggagcagatccgcgacgagatcaagaatgtagcaggcctcatcaaccaggtatattccctgttcggcttcaagtaccatgtagagctctccacaagaccggaagactccatgggaagcgacgaggactgggagctcgcaacaagctccttacagggcgctcttgatgatctcggactcgactatgtgatcaacgaaggcgacggcgcattctacggtccgaagatcgacttccatctggtagatgcgatcggcagaacatggcagtgcggtacgatccagcttgacttccagcttccgcagcgtttcgagctcgagtacatcggagctgacggtgagaagcacagaccgatcatgatccaccgtgtatgcttcggttccatcgagcgtttcatcggtatcctgatcgagcactttgcaggtgcattcccgacatggcttgcacctgttcaggtcaaggttcttccgatctccgagaaatacgaggagtacgcaaaatccgtcaaggcagctcttgacgcaacggatatccgcgccgagatcgatctccgttccgagaagatcggatacaagatccgtgaggcacagggtcagaagatcccgtacatgttagttgtcggacagaaggagcaggcagacggaaccgtatccgtaagaagccgcttcaaaggcgatgagggtgcagaggatctgaatgtatttatcgcaaatatcaaggctgagatcacagcacgcatcaaccgtccggttgaagtaaagaaagaagaagagaaataatctcgatccagagataaattgcaggccggtcttcggaattttccgtggaccggcttttttttgcttttttgtctgtccgcttgaacttttttctgaatgatggtatcataaagcggaatatgaccgttgggaggttttatcaattggcgaagaaaaagaacaggaaagtcgttcgttatcgccggcccctgaatatcaatgtgggcatgatcatttttgccctcattttcttatatatggcgttttatctctatacctaccttcgcagggacaaggtggagttttatgaagttgtggaaggcagtatcgtaaatgatacgaggcacaccgggatcattctccggacggaggagccgaaatatacggaccgtgccggaaacatcaacttctatatgcgtgagggaaagagagcagccgtcgggacaagagtctactcgatcgatgagaccggaacactttcggctctgctcgcggagaaaacagacggatcggtcgcgctctcaaaggagaatcttgcttctttaaaaaaacagctgtcgagcttcagccagacattcaccaacgaggatttccgtgaagtctatgatacaaagaataccttggattcagaagtcctggagtatgtcagcgtggatacactgaaaaatctggacagcgcgatctcagaactcggcgggaactttacccaggtgcggtccgatgtggccggtgttgtttcgtactccattgattcgatggagactctgacaccaaaccaggtgactgctgagatgtttgacaagagcagctataaaaaatccgggatccgttccgggcagctcgtggagacgggtgctccggcttataagatcattacctccgaggactggtcgatcgtatttccgctttccgatgaagatcttaccacttataatgggaagacatccctgacagtaaagtttacagggcgtgacctggagacttcgggggcattctccaccgtgactggaggagacggaaaaacatacggaaaactcgatttttccaaatatatggagcagtttgtatcggaccgctatgtggactttgagatcgtgacggatgaagtgcgcggactcaagatcccgagaagttccgtgaccgatgtgacgttctatgtgatcccgaaagactactatgtgagcgggaagaaagactcttccgacacctcgacagtctctcagagcggtttccggaaggagacatatgcggatggaaagacggtgggagttgtcactccgtgtacgatctactatgcggatgacgaatattattacgtggacgccggggaaaacagcgagctgaaagccggggacttcctaacgaaggatgattccggggagcgctatcagatcgggatgacccagtctgtacagggtgtctacaatatcaaccgcggttatacggtattccggagaattgagattctttcttcgaatgatgaatattacacgatcaaaaagggaacggactacggtctgtccgtctacgaccacattgtccttgacgcgaatgccgtgaccggaaacggaatgatcatctatcagtaggaggttttatcatgtcaattgcagagaatataaaaaatgtgagagaacgcgtgaatgcggcctgccttcgtgcgggaagagacccgaaggaagttaccctgatctccgtcagcaagacgaagccggtttccatgctgatggaagcttatgaggccggggagcgtgatttcggtgaaaacaaggtgcaggagatcacggaaaaacgtccgcagatcccggaggatgcgagattccatatgatcggacatctccagacaaacaaggtcggacaggtcatcgacaaggcggtcctgatccactcctgtgacagtgtccatctcgcagagaagatcgagaaggaagcggcgaagcgtgatatgatcgcaaacgtgctcctcgaggtcaacgttgcgagggaggagagcaaattcggcatgttcttagaggatgtgatcccgaacctgaaagagatccaggcattcccgcatgtctgcgtaaagggaatgatggcgattgctccgaacgtcgaagacgcggaagaaaatcgaaaatattttaaagaattatatcaattatatgttgacatcaaaagtaaaaacattgataatggtactatgactgcgctttccatgggtatgaccggcgacttcgaggtggctgttgaggaaggtgcaaccatgattagagtagggaccggaatctttggttccagatagattggagagaactagatatgagctttttaggcaagattatggatacgatgcgtctgaacgacgatgaagatgacgattacttcttagatgacgattatgaggatgaaaaaccggcacgaaagagcctttttaagaaacaggcagccgatgatctggatgattatgaggaggagaaaccgagattcttacctcgcgccacaaacaacaataaagtcgttccgatgcgtcgcggaaacgggatggaggtttctctgatcaaaccgacatccctggatgacgcaaaggagatctgcgattatctgcttgccggaaaggcagtagtccttaacatggaggggattcacaccgagaccgcacagcggatcatcgatttcacatccggatccacctattccatgaacggaaatctccagaagatttccaattacatttttattgcgaccccgcagtccgttgaactgtctggtgacttccaggatcttctttccggaggaaacttagatgtatccggactcaacattcatctgtaaaaaggatcgatatggaaaaggaagaacagctttttaaaaagcggatccaggaactggcgcagaacgcttactcccgcgatatcccgcttcacacagattttctgacacttgcagaacagactgtcttccagaatatgtcggctacgctgccgccggtgaagttcgtactttccggcggctttccgatgtctgaacggaaggttttatgttttctggcgtcctacgaggaggaactctgcgctccgccgtttgtgtgtttaaagatcgcgcccgcgaaccggcgctttgcggaggagctgacacacagggactatctcggtgcgatcatgaatctcggcatcgagcggtccatgatcggggatattgttctgcaggaggggaatgcctgggtttttgtcatggaaaagatgagcagataccttgcggagaacctcacgatgatccggcacacttctgttatcacagagatcacgtcggatttttcggatctcccggaaccggagacggaggagacttccggaacggtgagctcggtccgcctggactccgtcgtcgcactatgcgcgagactttccagaacaaaggcggcagtctatattgaaggtgagaaggtttccgtaaacggagctgtctgcacaaatgtatcgttaaacctgcggggaggagagatcctgtcgatccgcgggatcggaaaattccggttcggagagccgggaaatcttacgaaaaaggggcgtacatccgttgtggtgtaccgctacaaataggaggttatccttatgatcaaagaacatgtaaaccggatcccggtccacatggacgggaagactatttatgatattgtccttgaggactcgtttgattcacttgcaaaggagatctccgttctcggcaccgaaaagaagatctgcatcatcgcggactccaatgtcgctgacatctatctcgatgaggtgacaaagatcctttccggctgctgccgcgaggtgacttcctatgtgttcccggcaggggaagcgaacaagaatttaaagacggtccagggagcttatgaacatctgatcttaaaccactatgaccggaaagatcttctcgtcgcactgggcggcggcgttacgggcgatctctgcggctttgtcgcagctacatatctccgcggcgttgattttgtccagatcccgacaaccctgttatcccaggtggactccgggatcggcggaaagacgggggttgattttgattcctacaaaaatatggtcggcgccttccatatgccgaaacttgtatacacgaacgtgtccgttctgcgcacacttccggacaaccagttttccggcggtatgggcgaggtcatcaaacatggcctgatccgtgaccgggaatactttgactggatcgcggccaacaaagaaaaaatcctcgcaaaggatgcggatacattaaaacttctgatccagggaagcgattttatcaaacgtgaggtcgttgagatcgatccgaccgagcagaatgagcgtgcgaccttaaactttggccatacgctggggcatgccatcgagaagttaaagaattttacgatgctccacggtcactgtgttgcggtcggtgcccttgcagccatgaatatctgtaaggagcgcggtcttgtgaaccaggatgagatcgacgcataccaagctctgatggagtatttctccattccgatatctgtttccggtctcgatccggaggaggtgatcgcgacgacgaaaaatgataaaaagatggaggccggcgtgatcaagttcatccttctggaccgtgtgggacatgcctacatcgaccggaccgtcacaaaagaggagatggagcgcgcccttgcagccattttcagataggagtgttttatgaatacgatcggaaaacgctacggcattcttgccgtttgttctgccctgctcatcgccctggaccagtgggcgaagagtatggcttacagcacgctgcgcgtcaacggaccgctggtgctcatcaagggagtctttgagcttttatactcggaaaaccggggagcggctttcgggatcctccagggaaaacagtggtttttcttcctggtggctgcggccgttgtgatcgcggtccttgtctttgtggcaaaacttccgtccggaagccggtacctgcctctttatatcgccatgatccttctcctttccggagctgtcggaaacctgatcgaccgtgcggtgcggggattcgtggtggatttcttctatttcagcctcatcgacttcccgatttttaacgtggcggactgctacgtggtctgcgcggccggacttctgatcctgctgatcggctttttctacaaggaggatgagctttccttcctctcatcaaaaaaggagaatgagcagtgagagaagaatgttttgtgaccgaggagacggctggagaccggatcgacaagttccttgcggaacagtatgaagatctgtcgcgctcgtttctgcagaagctgttaaaatccggggaagtcatggtaaacgggcgcccggtgaaggcgagctacaaggcggcagagggggatacgatctccttcgaggtgccggaggctgtggagccggagatcgttccggaggatatcccgctcgatatcttatatgaggatcacgatgtgatcctggtgaacaagccgaagggcatggtggtccatccggcagcaggacattacacagggactctggtgaatgcgctgatgtaccattgtaaggaagatctctccgggatcaacggggttctgcgcccggggatcgtccaccggatcgatatggacacgaccggcgtcatcatcgcctgcaagaatgatctcgcccacaattccatcgcggcgcagctgaaagaacattcgatcacccgccgctaccaggcgatcgttcacggcgttttaaaggacgatgagggcgtgatcgacgcgccgatcggaagaagtccgaaagaccggaagaagatggcgatcaattacaataacggaaaatccgcggtgacccattaccgggtgatcgcgagattcaaggatttcacccatatcgagtgccggctggagacgggaaggactcaccagatccgcgtccatatggcgagcatcggacatccgcttttgggcgatgccgtatacggtccggcaaaatgtccgtacaagcttcagggacagacgctgcatgcggggatcctcggctttgtgcatccgcggacaggggaatatatggagttttcggcgccgcttccggagtattttgaggagcttttgcggaagctgcccagataacggatcctgagcgggatttgtcaatttcactcatttcacaggcagcagggtattctgctttctgcatatactgatacaaaaattcggaaaaattatggaataactcttgcatattgtctgaaatttttatataatacagatatcagaaagcttgatgacagaaaggagctgtggcatatgagtgataaccttattattacgatcggaagagaatgcggaagcggaggaagacatatcgggcaggcgttagcagaaaaactcggtataaaatgttatgacaaagagctcctgaatctggctgcaaaagagagcggtctctgcaaagagctgtttgagacccatgacgagaaaccgacgagcagtttcttatattctctggtaatggatacgtattcccttggatatacgaactctgcatatatggatatgccgatcaaccataagatcttccttgcgcagtttgatacgatcaaaaatcttgcgaataaagaatcctgcgtaattatcggacgctgcgctgactacgcgctggctgattatccgaacgtagtatccgtgtttattacagctgatgaggatgtgaagatcaagactttgatggagcgccataagatcacggaatctcaggcgaaggatctcatgatcaagaccgataaaaagcgttccagttactataactattattccagcaagcgctggggcgattccaagagctatgatctctgcatgaacagcagcaagatcggatatgacggagttgtgaagatgatccaggaatttgcgaagatcaagggcgcttataagaaatagtggttctgacggaagccatccggcgaacgtacagaaggatcagaatggacaaaaaagaagaataaagcgtaaaaaaaccaccggtccgggcgaggatgtatctgcctgaaccggtggttttttgtataaacttgttttacttattccaccgtcacggattttgccaggtttctcggctggtccacatcaagacctttctggacggaagcgtagtaggcgatgagctgaaggacaatggcgattgggaacacggtgaatttgtcatcttctcttggaatgcgaatgatcacgtctgcaatgccctcgtcgacagcggtatcttccgtgacgaggaggatcacataagcacctcgcgctttcacctcgcggatattcgagatcgtctttgcgaaaatatgcttctgggtcgcgatcgcgatgaccggaacatggtctgtgatcagagcgatggttccgtgcttcaactcaccggctgcgtaagcctccgcatgaatgtaggagatctctttcagctttaacgcgccctccagggagaatgcgtagtccattccgcggccgataaagaagacatccgggtagtttacgatatgggtgacgatctcattgatcgtattttcctcccggatcatggtctccatggaggtggcacagtttaagaggtcactcatgaactgctctgcatgttcttccgtgtatacgccgcgtataagcgccatacggcagaaaagaagatagagggcggcaatctgtaccgtgtaggctttcgtgctcgccacggcgatctcagggcctccatgcgtgtagatcacatagtcgctttcgcgggcgatcgtggaaccttttacatttacaaccgagatcacggtggagccgcattctctcgcgaggcgcagcgccgccagggtatcgatcgtctcgccggactgggagatcacgatcgtgagcgtggagtcatcgatcagcggctcctcatagcggaactcggaggcgatggacaccgtgaccgggatcctgagacgtggctcgatcagggctcttgcgaccatcccggcgtgcatggcagttccacaggcgatgacgcggatatttgtgatccgttttaagagctcatccgggatcttctcgtcggtgagatccgggagaccttttgtgagacgcggcaggatcgttttctttaacacttccggctgctcgtggatctccttcatcataaagtgagggaacccgtttttcatggcagcgtccgtgttccaggatgcctccaggatctcaggctcagtctttgtgccgtcaagctcgtagagatcagcgtggtaggcggtgagctgtacgatctttccttccggaacaacgaagtatttctttgagtacgggagaagtgcggtcaggtcggaagcgatcatggcgcctgaagccgtgtaagccgctacgagcggacttacgtttctcaccgcatagatctcgccgggacggtcttcaaacatgatacagaaggcgtaggagccttccagccggtttaaaaatttccggatcgacgggatcgggtcaccgttgtagatctcgtttaaggttgctgcggcaacttccgtgtccgtctgggagtgaagttttccttccaggtggtatttttccgtcagggcgtgatagttttctatgatgccgttatggatcatcgtcaccttccctgcaacatgcggatgggcgttttcactggtgacgccgccgtgcgttgcccagcgggtatgaccgatcccgcagtgggacacgaccggattttcctcgcacaccttgcggagagcggcaacttttccgacttttttgataaaatggatctttgagttctcatcaaacagggcgatcccggcgctgtcataaccacggtattcgagctgggtaaggccgtctagcaatactgtctgcgcatctaaaggaccgcagtatccgataattccacacatatatatcatctccatttcctgatgaaagaatctgttttcattgtttccaggcagagccaatttgataggattatagtattaaatgtcaggaaagtcaattggtgactggttttggtgtatcggcgggatgagaaaaattaaaaaaaaattaaacaattttccttcctctatatgttatacttacaccgttatatttacataatgcaggagatgtacgctcgaaaatgaagttcaaagaccatttagattttcataaattacctttcgataaagaaaagatccgtgaacaggtcgaaaagatcgcggcggactgtatgcgctgggtgacgcgcagacagaatgcaagaccgcttctggcgatggctttgtgcacctgtatcgcgttttccgcgatggtgccgtatattccggtggccgccccggctgagatcagtacagagaggatcacagaaccggagacctttgatatcctcgaggatccgacagagagagagactgaggagaccacagcggagatcgacccggatgctccggccccgtataaattaaatctcgcaaatatgtacgcagagggatcggagacaagctatgcggagatcctgatgaaggagttgatccagaaggattccaaatggtttgctgcgatctacgatatggcaaatacggcaccggtaaagctggcgcctgcctttggacgcaaggcatcctccgttctcggacagtacaatccgacatcaaagacccagaataaaaatgatccgtccacctggtatgtggaacattttaagaatgtaaagatcacgttctacaacggagacggagaggtcacatccgcggtctccaatgcccaggacattctttccatggcgagtgtatatgcttattacaacgggatcacggaccttgattcgatccgtgcctacgtcaatgatctctggacaaaatcacattcctaccaggcaactttgggaaacgtctactactgtgatggctgtgtggatccgaacgcgtccgcggaagagggagattctgagctggaaggagaggatacattcgtatccgggcggaatatcgataccgagatccggacagatgtaggagatgaggtcatcgaccaggccggagacacggtttccgtgaacggggagagctacagcggcagctcttcgtccgcctcctccgcgcagggggcgtcggaaggcaccacaacggcagttgagacaacaacggtaccgccgtcagctgcaaaccacacagaaggagctgagacaaaggagtcgaccacgagtgccctggattccctggctgagacagcggagagcgtgatccaggagacgaagaagaagacgacgatcgtccgtgtggaagattccactacagcggctgagacgacaaaagctccggagacaacaccgcagacagcggcaccttcgacacaggcggagacagcgccgcagacaacagcaccttcttctgaggcagcggaagagaccacggtaaaggttatccgtgtcagtgacaacggagattccgatgcaagctccgattatatcgtccatgcggccgcggaaactgcagcacctgcggagatagcagcatccgcggaaagtgaggagccagaaaccgatccggagctcatccctgtttctgatgaacaagctgaaacagcggagcagtacaccgtccatgcggccgcttcccatgcgctgatctgcccgggacatgtcgatcttaagatcacggcgatcatccggaccctcagcgagagcgcaaacctttacagcatcgatgatgcgggaaatgcggtgggagagactgcatcagtaaccgcagacggaactggatgggaaggctggaaccgcagaatgacttctttcgtaagccatatcaaccgtcaggactggacagcgacttacggattaaacgtagtcgtggagggaacgagagcgccgctttccactgctgagatcgacacctacatgagcaaacttccgaaagatctgtcggagacgagaaaggacattatccggtatgcactccagtctgtcggaaaagtcccgtattactggggcggaaaagccagcgcccagaattacaccggcaacaatttcggttctgtcacgatcccggatcacaaaggacgtatcttaaagggactcgactgctccggatgggtcaactgggtatactggtccgttacgggaacacacctgccgtatgaaggcacggagggcttaaagacgcttggccgtcaggtaaaacgtcaggatctgaagcctggtgacatcgtcgtgatcaccggatcaacgccgcacgtgatcatgttccttggattcacctcaaacggacagatccagtgtgtccatgagacgggttccgcgaacaatgttacaattggcgtgatgaacgcgaactggccgtattatagaaatctgctggattaatggaatgtagttctgggaattaaccgatttgtctggttctggggactaaaaagtaattttaaataatttgatctgtatgaaattgatttgatgattgtgatgaacatttttgtgcggatcatgtgcagcaccttctttacagcacatcaggggtctagaaagactggaatgcggctggagagaaggtgcttgctttatttagatttagtgtgctgaataaatgaatgatagatatattatggcatttttgttttgaaagctgtcaatgtaggtaaacttatcacaatgtcgtaatgaagaaacctagtgcttacggcaatttttgatttctttgtgtaaagtactatctacattttttgtgtacaatatat

SEQ ID NO: 2008 - DNA, 38290 bp, Unknown
  gut microbiota DNA sequence
tatcagcctggcgtgaacggttttttctttactatggaagtcagggaaaaaatatggtatgcttacagggaacatggaatttttgatatgtttatatttttatcaatagaagaacggagagaagatcatggcagagaaaatgagatatggcagtaatgagaatgagagtgggaatgttgatgacgagttcaacaatgcgaatgaggagctgaatccggaagatatttaccgtgtatatatggaagagatcgcggcgatcccaccgtgcagtgaggaggagaatgagaagctgctcggggagatccggagtgggaataaggcggcgagggagcgtctgatcgagggtaatctgaaaaatgcgctgttttttgttcaggattatatcaataagggcgtcccgatggcggatctgatccaggaggcgagtatggagctgatgatgctggcggatgaaggctttgaggggagctttgagaagcttttagagagccggattcgtgtccgcatggaggagatcatcaacgaccagaagaaggagacggatatcgaggaggagatgctggcgcgcgtcaatgttctccaggaggtttcaaagtccatggcggaggagcttgggcgtgaggcgaagctttcggagcttgcggagcgcatgaagatgacggaggacgaggtccgggagatcatgaaggtgacaatggatgcgctcagcatgagcaagatcaatcaggatctgcagagttaataatttgcagtgatacaggatggaaaagagttcatcgctgcgagagtatgctggatgcggcaactaataagcataagtaataaaataaattaaatatattaactttactaatcacacaaatctgtgctatgataatggaaaatggattgctccgcacgaggtggcgctgcagtcatgaaaaataacaaccatcggacaaagccgttttccaggaggagagactatgagcgtaaagcgcgtgtttgttgagaagaaaccggaatatgcaatcaaggcgagagagcttcgcgaggagatcgagagctaccttgacattacagaggtaacgggcgttcgtgtactggtccgctacgatattgaaaatatttctgaggatgtatataaagaggcactcggaacgattttttccgagccgccggtcgatgaggtgttcgaggagacattcccgcgtggcgcggatgacgtggtattctccgtcgagtatctgccggggcagttcgaccagagagctgattctgcggagcagtgtgtaaagttattaaatgagaatgaggagccggtgatccgctccgcaatgacttatgtgatctccggaaagctttccgctgaggagatcgctgcgatcaagtccttctgtatcaacccggtggactccagagaggcgtccgaggagatcccggagacacttgtgaccgtatttgatgtgccggaggatgttgcgatctttgacggttttaaagatatggatgaggcgactttaaaggaactctacagctccttaaatctcgcaatgaccttcaaggatttccttcacatccagaattactataagaacgaggagaagagagatccgtctgtgacagagatccgtgtgctcgatacatactggtccgatcactgccgtcatacgacgttctccacagagctgaaaaatgtgacattcacagacggcgactacaaaaagccgatcgaggacacttataaccagtatcttgcggatcataaagagatctacaaaggccgcgacgacaagtttgtctgcctgatggaccttgcgatcatgggcatgaaaaagctccgcaaagagggcaaactcgaagatctcgaggtttctgatgagatcaacgcctgctccatcgttgttccgatcgagatcgacggaaagacagaagagtggcttgtaaacttcaagaatgagacccacaaccatccgaccgagatcgagccgttcggcggcgctgcgacatgcctcggcggtgcgatccgtgatccgctttccggacgtacttatgtataccaggcaatgcgcatcacaggtgcggcagatccgacaaaaccgttaaatgagacattaaagggaaaactcccgcagagaaagatcgtcacagaggctgcccatggatacagctcctacggaaaccagatcggacttgcgaccggttatgtaaaagagctttaccatccgggatatgttgcaaagagaatggagatcggtgccgttatggcagcagctccgagaaagaacgtcatccgtgagacatccgatccaggcgatgtgatcatcttacttggcggacgtaccggacgtgacggtatcggtggtgcgacaggttcctccaaggtgcacacagaggcatccatcgaggtctgcggcgctgaggtccagaaaggtaatgccccgaccgagagaaagatccagagaatgttccgccgtccggaagtttccagactgatcaagaagtgcaacgacttcggtgcaggcggagtttccgtagcaatcggtgagctcgcagacggacttctgatcgaccttgacaaggttccgaagaagtatgcaggccttgacggaacagaacttgcgatttccgagtcccaggagagaatggcagttgttgttgacccgaaagatgttgacgcattcttaggctacgcagaggaagagaaccttgaggcggtgacggttgcgacggttaccgagagcccgagactcgttctcacatggcgcggaaagaccatcgttgatttaagccgtgcgttccttgatacgaacggtgctcaccaggagacagacgtgaccctggaagttccgaaccacgagggaaccccgtttgaaaagaaagaagtgggagatgttaaggaaaaatggctgaagatgctcggctccttaaatgtatgctcccagaaaggtctcgttgagatgttcgactcctccatcggcgcatctaccgttatgatgccgtatggcggtaaatatcagcagaccgagatccagaccatggttgcaaagcttccggtcctcgaaggaaagtgcgacgctgtgaccatgatgagctacggcttcgatccgtatctctccagctggagcccgtaccacggtgcgatctatgcggttctcacatccgttgcgaagatcgcggcagcaggcggcgattataagaagatccgcttcacattccaggagtacttccgcagaatgagcagcgagccgacaagatggagccagccgttcgcagcacttctcggtgcttacaacgcacagctcggcttcggacttccgtccatcggcggaaaggacagcatgtccggaaccttcgatgaggagagcggaaaagagatcgacgttccgccgacactcgtctccttcgcagttgacgtggcgaacgcaaagaacatgatctctccggaattcaagaaagccggaaacaagatcgttgtatttgaaatcaagaaagattcctatgatctcccggattacgcacagatcatggatggttatgataaacttcatgaggacatcaaggcaggccgcgtgatctccgcttatgccgctgaggcgaacggtatcgcagaggctgtcagcaagatggcattcggcaaccacttaggcgtaaagatcgagcatgacgtggatccgagagatttcttcgcaccggcatggggcgacatcgtatgcgaggttccggcagataaggtcggagagcttcagatgagctaccgtgtgatcggtgaggttaccgacaaggcagcctttgagtacggcaatgtctccatcacgctcgatgaggcattaaagacatgggatgcgactcttgaggatgtattcccgaccgagagcggcgtgaagaaggaagaagttaagaacgaagtatttaaggcagacaacatcgtgatctgtgaccacaagatcggaactccgaccgtattcattccggtattcccgggtacaaactgtgagtatgacagtgcaaaggcatttgagcgcgccggagcgaaggtcatcacgaaggtatttaagaacatgagcgccgaggatatccgtgattctgtcgagacttacagaaaatccatcgggcaggcgcagatcgtcatgttcccgggcggattctccgcaggcgatgagccggaaggttccgcgaagttctttgctaccgcgttccgcaacgaggcattaaaggacgagatcatgaagctcttaaatgagcgtgacggactcatgctcggtatctgcaacggcttccaggcactcatcaagctcggactcgttccggaaggaaagatcgtagagcagaagccggattctccgaccctgacctacaacacgatcggacgtcatgtctccaagatggtgaacttaaaggttgtctccaacaagtccccgtggcttgctgaggcaaagctcggcggtatctatacgaacccggtatcccacggtgagggacgtttcgtagctccgaaggagtggatcgacaagctctttgcaaacggacaggttgcgacccagtatgtggatcttaacggcaatccgacgatggatgagtactggaacccgaacggctccttcatggcgatcgaaggtatcacaagtccggatggacgtgtatacggcaagatgggtcacgcagagagacgcggcgacttcgttgcaaagaacatcaccggagaacaggatctgaagctgtttgagagcggtgtgaagtactttaaataattgaaatgctgatactttgaatgccccgggggatgcgtactccggggcatttgctgtggtgctgtttcctgtcacatcaccgcggtgactcagttggttgacagaaaccagggcgcgtactaaactgaagatatccgtggctggcggacagaatggccgaatgaagactgcttcgcaggacagtttcctgcggaaagatcaggaggcagccgcgaaaccatgatgacaaaattgaattttgggggtatctgatatggcatgcacaacaatcctggtaggaaaaaacgcatcatatgacggttcaacgatgatcgcgcgaaacgatgactccggttccggacatttcacggcgaagaaattcgtggtgatccatccggaggagcagccgaaggtatacaagtcagtcctttcccatgtggagatcgagcttccgggcaacccgatgaaatttacggcagtcccgaatgcgatcaaaggaaaggggatctgggcggccagcggcgttaatgagaagaacgtgggaatgacagcgacagagacgatcacatcgaacgcccgcgtgctcggcgcagacccgcttgtaaaatatcagccggcagaggacggaaaagaggaagctgtcggcgggatcggtgaggaagaccttgtatacatcacacttccgtacatcagcagtgcgagagagggcgtgatccgcctcggaagtctcctggagaagtacgggacttatgagatgaacggcatcgctttccaggatgcgggtgaaatctggtggctcgagacgattggcggccatcactggatcgcaaagcgtgttccggatgaccggtatgtggtgatgccgaaccagttcggtatcgatgagtttgacttaaacgatgcgttctctgagcagaaggagcatatgtgttcttcggaccttcgtgaatttatcgcagagaaccatctggacctctctttaaacggcggaaatggcagtcattttgatgcgagagctgcgtttggaagccacagtgattccgatcacatctacaatactccgagagcatggttcatgtgccgctactttaacccgcatacaaagaagtgggatggaccggatgcggactatacgccggagtccgatgatatcccgtggagcatggtgccggagaagaaggtgacagtcgaggatgtcaaatatgcactttcctcccatttccagggaactccgttcgacccgtatgcgaagagcggggacggcctccagaagggcaaataccgcgcgatcgggatcaaccgcaacgatttcctggctctgatccagatgcgcccggacgttccggcaaactgccaggcagtccagtggcttgcattcgcgtccaacgcgttcaatacgctggtcccgttctatgcggctgttgacgagactccggaataccttgcgaacaccacaaaggaagtttccacagagaatttctactggtcggcaagaatgatcgccgcgatggcggacgcatcttttgcgaaatctgcgatccacatcgagcgctaccagaatgcggtccaggcgaaaggacatgccctgctccgcaagtatgacgccgaggctgcaaagatcacggatccggcggagagcagaagacttctggagaaagcgaaccgtgagatcgcaaagatgttaaaggaagagacggggaataccctggatcatgtgctctttgagctcagcaattccatgaagaacgcgttttcaagatctgacgcataacaagttcaggccgaacgcatgtgagacttgacgcgcaattccggccggtggaagctgataaattcttctcagaacgagacctctgcagggatgatgcggtgtagatcaggccgcaggatcccgggcggaggtcttttgtcatatttttgtactttttgacgcttgacacgggaacctcatcccgttatgctacttaaggcagaaaatgctcagctttacatgccgcgcctttttgtgttaagataaacagaaagagcgcaaggcgcatggaagctgaatacaggataaatgaggttttaagatggaagaaaaagaggtacagggagcaccggtgcacaaacggcgtgtccgttacagcgggacacacccgagacggtttgaagaaaagtataaagagcagaatccggagaaatatgccaatacgattgaaaaggtcatcaaaaagggcagcactccggccggcatgcacatctcgatctgcgtgaaagagatcctggatttcctggatatcaagccgggaatgcaggggctggacgccacacttggatacggcggtcacacgacggagatgttaaaaaagctggaaggacaggggcatatgtatgctcttgacgtggatccgatcgagatcgtaaagacaaaggaacgcctaaaggaacgcggcttcggagaggagatccttacgataaaacagatgaactttgctgatatcgacaggctcgtcccggaggcggggctgtttgactttgtcctggcagatctcggtgtctcctcgatgcagatcgacaacccggagcgcggtttcacttataaggccgatggtccgctggatcttcgcctgaacccggaaaaagggatctctgcggcggagcgcttaaaacagatggatatggaagagatcgcgggcatgttcgcggaaaactccgatgagccttatgcggaggagatcgcacgggagatcgcgaagagaaaccggaaacgtcagtatattgagacgaccacggaattaaaagaagtgatcgagcaggtgctttcttttatcccggaaaaagagcggaaggaagccgtgaaaaaatcctgccagagatgtttccaggcgctgaggatcgatgtcaaccaggaattcgaggttctggaaagcttcctctcaaaactgccggggatcctggcaccgggcggaagagctgcgatcctgacctttcattccggggaggaccgccttgtaaaatattactttaaggacggcaaaaaggaagaaatctacagcgacgttgcgagcgatgtgatccgtccatcggcggaagaatgccagaggaacccgcgtgcaagatccacaaagatgcgctgggcgatccgggatggcgaaaatccgcacaggatgtaaagaaaaaacaggctcggaaacggaacttggaaatgagagaaggaaacggttcagcaaatcttagtattcatttggtggaatggtttccggaaaacagaatcagaaagagaaatagattatgaacgaaaagatagaagaaacagcagaggaatacaagagaaaagaagggagtgggctcgagcgcgcgggagccgcggcgatattcttgttgtcgccggtattatcctacatcatgtttgaactagtgacaggaaatcttgccacagtgctgccgaaaaatgcggtgctgaacatggtgtggatgtttgcgctgtaccttctggtattcggaatctccggaagcagccggatctccatccctgtatcctccgtgatcctttatgtgatctctctggcggaagcctttgtcgtatccttcagaagccgcccgatcatgatgagtgatgtccttgcggtgaagaccgcgatgacggtggccgggagctataactacacaccgacctttatgatgatcatctgcgggatcctcctgatcatgtggaatgtactggcgcagctcgtgccggtgaggatcagggggaagaaaaaaagagctgccgtgtttggcggatccgctgctgcggtcgcggtgtttatcggcggcttctacacggtccttgtcccgaaactgggactggaggtaaatctctgggacccgacgacttcctacgcggagaacggctatgtgctggcgtcggcggtatccttaaaatatctggtaaagaaagctccggagggctattcccaggcgaagatccaggagatctatgaaaaatatgtgggaaacgaagaagagcagaacgaggagacggcggccgcggtggaagcgggagatgcggtccagccgaccaacatcatctgcatcatgaacgagagtctctccgacctgtcggtggatggggaacttacgacgaatacagagtatttcccgttcctcaacagtctgacggagaataccgtaaagggaaaactctgcatgccggtgttcggcgcgatgaccagcaactctgagtttgagttcctgatcggtgattccatgtacctgatgccgagaggcagcgtcgcttaccagttctatgtaaatcccggcgtccgctccatggtcagcacggtgaaagaccagggatacacggctgtcgccatgcacccgtatccggcagagaactggaaccgccggatctgctacaataacatgggatttgacgatttcatggatatcagcgcctatgaggggcgggatgagctccgaaattatatcagtgatctgagcgattttaaactcatcacggagtatgtcgaaaagaaggcaaatcctgatgacaagttattcctcttcaatgtgacgatgcagaaccatggcggatatacgatcccgttcgcaaacttcgatcaggaagtatggcttaccggggacatggaaggaaagtatccggaggcggatatgtacctgtctcttgtgaaaaaatcggatgaggcatttgagtggctcgtaaattatttctcccagtgcgaccagccgacgatgatcgtcatgttcggcgaccaccagccagggatcgaggacgagttctttgacgaggcgatgggagtggagagcgcgaaggtcctgaacgagcagaagatgcgctggtacgagactccgttcgtgatctggaccaactacgaccagcctgcggaggatatgggacgcttaggtgcgatctacctttcttcctacgtgttaaagcgcgcgaacctctcactgactccgtacaacgagtttttactgcagctttccgaaaagctcccgatcatccatcatctcggcatctgggagtcggatgaaacttatcatagctgggaggacgtggagagcggagagtacgagtggaaggaacagctgatggagtacgaggaccttgtatacaaccacagcctggatccgaagaccgtaaatgagatgttttcgatttcgcagtaaaaactttatgccgaatgcatgtatgacttggcgtatcattctggtcagcatgaattcataagatttttcgaaattgctgagacaaatataaaacagagggcagcctgaaagagggctgtcctttttgcttacaggaaattccgatggaacttcctgtaaacaaaaaggcactgtgtgcctaagatgcgcactcgcgcgaagatgaaggttgtcgcaagcgatcgcgagagacgcccgaatgtactgaggcatattcttttaatttacgcgaacaacgagccaaagtctgcgcttgcgcgagaccttggcgactgtcgtgataacaaggggaaactcgcgaagcgtgttttcacttgttcaaaaaatttctcaaataggattgacaacttggttagttagtgctaatctttgttagtgagaactaacagtcaataaagatacccccacagggaatccgaaatgtgctgtttttgcggttgtgaagtcatggcatggctgtgataaaaaggaggcgtgatcaatgataaacggaattattatcgttgtactgatcgtggtcgcgatctttgcagtgaaagggacgatgcaccagttcgtctacggctgctgcggatcgaaggacgtggagaaaaagatcaaggtgcaggataaaaatacgtcggattatccgtactatgcagttgtcggcgtcgatggaatgaaatgcaaacactgcaagctccatgtggagaatgcgttcaacgagaaggacggcaactgggcggaggtaaacctcgagaagaaggaagccgatgttcggatgaagacaaaaatgacggaccgtgagatccgcgacaccgtgagcaaagccggatatgtgctccgcgatattgaatggaagcaggcgtaggaaattttttaattcggaatgcgaagtatcggcaagatcagattgccggatatgttgtgtacaggcagcaacgattttacaggaatgagagggatgccggatgtggcagaaaaaagacatcgtgaatgaattccagaggcttggaaaacgcattacaaaacagagaatggtcatccttgacgtgatcctggaacagaactggacagactgcaaggaagtttactatgaggctgtgcagagggattcgactgtgggactttccactgtctaccggacgatccggatgctggaggagatgggcgttttaaagcgtgtttaccagtatgtttttaccgatgaatcgggagaacaggtcgatggggagagtgagatcatcgcaccggaatttcacggaaaaagcgggctcagaaagactgaaaaagacgacgaaaaatgctgttccgtcagcgcgtcataaaagagataattgtcaaaaattgacaaagtttctcaattaaagacattatatttgactaaccgggaggcgtggtgttaccatgttggaaacgcagaaagaccttccgggttttcccgttgtgtataaaaaagaaagcaaggaagtgaggaacgatgaaacaccataaattttgggcgtgggcaaccgttttctgctttgctatggtcatgtataccggttataaacataagtgaccgggatgaccgtagctgtttcgtatctttacagttacagataaactggtgattctattttttatttacaggaggatttaaaaatgttagatgtaaagaaatgcttaaaattaaaaaatgtcgctgtattcgcaagtggtgttctctttggaacagcaggtatcaaggtccttggaagccaggatgcaaagaaattatatattaactgtctcgcagcaggtctccgcgcaaaagagtgcgtgatgacaactgcttccaacatccaggcaaacgctgaggatgttcttgcagaggcaaaggagatcaaccgtgcccgtgcggaagaagagttcggtgaggaagaagagacagcagaggatctcacagagactgcagaaaatacagaggacgctgaataatcatcatgaaaacaggaatcagatttacggtaaaacatgaaatcagaggccgtatccgaatccatctcaccagaggacgcctgtcgatcagacaggcggacctcttttccttttatctcgcatcccttccacaggtaacggcagcaaaggtatatgagagaatcggagatgcggcgatcagttatactggcacgaaggaagacctcattgcagagatcttaaaattctcgtttgacgatgagaaattaaatgaactcgtgccgacaaccggaaccagagcgttaaatcaggaattccaggaaaagcttgtgactaagtgtctcacaagatgcttcacaaagatcttccttccggctccggtccgcgcggtatggactgcgatccagtctgttccgtatatcatcaaaggagtcagaaagcttgcaggaagaaaactggaagtcgaggtcctcgatgcgaccgcgatcacggtttccatgttgagaagcgatttcaacacggcaggatccgtcatgttccttctcgggatcggtgagcttcttgaagactggacccacaagaaatccgtcagcgatcttgctggcagcatgtccttaaatatcgagaaggtatggcagaagacaggagatgcggaagtccttgtcccgatctccgatatcagggaaggagacctcgtttccatccatgtcggcagcgtgatcccgcttgacggcgtcgttgagtccggcgaggcgatggtaaaccaggcgtccatgaccggcgagtccgaaccggtccgcaaagagaacggcatgtacgtctatgcaggaactgcggtcgaggaaggaaatatcgttgtccgtgtcaagaaggcagccggatctacaagatttgagcgcatcgtcaagatgatcgaggattcagaaaaactgaaatcttcccttgagacgaaggcatctggtcttgcggacgctctcgttccgtggagtctcggcggcacgatcgtgacctaccttctcacgagaaacgtgacgaaggcgatttcgatccttatggtcgatttctcctgcgcgttaaagcttgcgatgccgctttctgttctctccgcgatgagagaggcgagcagctacaagatgaccgtcaaaggcggttccttcatggaagccgttgcagaggcggacacgatcgtctttgataagacaggtacactcacaaaggcacagccggtcgttgccgatgttgtcacctttgagggacgcgatcaggatgagatgctccggatcgctgcctgcctggaagagcatttcccacactccatggcgaacgcggttgttgcggcatccaaagaaaaaggactcatccatgaggagatgcattccaaagtcgactatatcgtggcccacggaattgcctcccatatcggagaggataaggtcctgatcggaagctaccacttcgtatttgaggatgagaagtgcgtggtcccggagggcgaggaagagaagtttgaggcactcccggcagagtactcccacctgtatctcgcgatcgctggaagactggcggctgtgatctgcatcgaggatccgctccgtccggaagctccggaggtcatgaaagaactccggaaactcggaatcaaaaagatcgtcatgatgacaggcgacagcgagagaacagcgcgtgcgatcgctgcgagagtcggtgtggatgaataccactcagaggttctcccggaagataaggcaaactttgtggaggcggagaagaacgcaggccacaaggtcatcatggtcggcgacggcatcaacgattccccggctctttccgcagccagcgccggtatcgcgatcagcgagggcgctgagatcgcgcgagagatcgcggatatcacgatctctgaggatgcgatgttccagcttgtgaccttaaaagcgatcagcaatgcgctgatgcagcgtgtccacagaaattaccgctttgtcatcagctttaacttcggtctcatcatcctgggagtgatgggggtactcgctccggcgacatccgccctgctccacaatacgtcaactctgtgcatcagcatgcacagcatgacgaatctcctgaaggatgaggagaaaaaacattaaactataagaatgaccgatctgcccgcggccggaaacatccggctgcgggtattttttacgcgaacaacgagccaaagtccgcgcttgcgcgagaccttggcgactgtcgcgataacaaggggaaactcgcgaagcgtgttttcacttgttgtgccgcgcctgtcaggagtccggctgtgttcgatttagtggttcacaagcggcggatttcatgctatactaatgcaggcatgtggcagaagtctgccatctgcttcttaaaaatgacaaaggaaggcacaaatatgaactatatgatctgtattccttcaccgagactcgtctcgagggaatactgtgaaaggatccacaacattctggcaagaatgtcggatcagtaccgggtcaatatcgttccggagccggtaaagatgcggcagggatcctgtccggatttctataagaaataccggatctacaaagatatcaaggatcgcgacggaaacggagaggcatatctgacctccgaggaagagaacatgatcttaagtgtctgcagaaatccggaggaagtggagctcatgaagagctgcacctacgcataccggtatccgacgacgctggtcctcaagagcttccgggaagataagaaaagataacgaagcgttggcaaacaggtaaaagtgtgatatacttattctaagtccgcggggcggctgggggctgcctggcgggaaggaaaaaagagagctgtggcgtctggaacgaaaaagtcacagaagatttacgaggagtgcagagaagatgaaaaacagaagagtttttttaaagctcagcggagaggcccttgcaggtccgaaaaaaactggctttgacgaagatacggtgaaggaagtcgcaagacaggtcaaggcgtctgtagatgtcggtgtacaggtcgggatcgtgatcggcggcggaaatttctggcgcggacgcacgagtgacgcgatcgaccgtccgaaggcggatcagatcggaatgctcgcgactgtgatgaactgtatttatgtatccgagatcttccgcaatgcgggaatgaagacacagatcctcaccccgttcgagtgcggaaatatgacaaaactgttctccaaggaccgtgcgaacaagtattttgagcacggaatggtcgtattttttgccggcgggatcggacagccgtatttctctaccgacacaacgatcactctgatggcaatcgagatggatgcggactgcattctcctcgcaaaatccatcgacggcgtatacgacagtgatccgaaggtaaatccgaacgcgaaaaagtatgacgagatctcgattcaggaagtgatcgacaagcagctcggagtcgttgacctgactgcttccattatgtgtatggaacacaaaatgccgatggcggtattctccttaaacgaaaaggatggaatcgcgaacgccatgcagggaaaaattaacggtacgatcgttaccgtctgataacaggaggaaaccatgagcgaagaattaaaagtatatgaagagaaaatggaaaaatccatcgatgccctcttaaacgagtacgcatccatccgcgcaggacgtgcaaacccgcatgtacttgacaagatcaaagtagattactacggaactccgactccgatccagcaggtcggaaatatctccgttccggaagcgagaatgatcctgatccagccgtgggagaagagcctgatccgtccgatcgagaaagcgatccagacttccgagcttggaatcaacccgagcaacgacggaacagtgatccgccttgtattcccggagctcacagaggacagacgtaaagaactcgcaaaggacgtaaagaagaaaggtgacggagcgaaggttgcgatccgcaacatccgccgcgatgcgaacgaagcgttcaaaaagatggaaaagaacgatgagatctctgaggacgatttaaaggatcttaccgagaaggtacagaagctgacagacaaggcgatcgacaagatcgataaggccgtagagaacaagacgaaggaagttcttaccgtataaaaacgaacagcctgattcctgagcagagggaaatttccggatggaagatcccaaatcgttcaggatgacggtacatgacagacagggacaggggaagatttcctgtcccttgtttttacattggttataaaagggagaacaaatatcatggaagagaatttaaagatccccgcccatgtggcgctgatcctggatggaaacggaagatgggcgaagaagcgcggacttccgagacagcttggacataaaaaaggctgtgagacactggagcaggtcgttgaggacgcagcacggcttggaatccggtatcttacggtgtatggattttccacggaaaactggaaacgtccggaggaggaagtaggtgcgttgatgcagctgttccgcttctatgcgaagagacttctcgcgatggcggaaaagaataacatccgggtccgcatgatcggcgagagaaaccggtttgcaccggatatcgtcgaggcgatcaacggtctggaagaaaagacgaaagagaatacaggaatgaccttcgtgatcgccgtaaactatggaagccgtgacgagatcacgagagccgtgagaaagatcatggcggactgtaaggacggaaagatcgcgccggaggagatgacggagcaggtcttcgcctcctatctcgacaccgcggggatcccggatccggatctcatgatccgcacgagcggggaactccgcctttccaactatctgttatggcagctcgcgtactcagaactctacgtgaccgaatgcctgtggccggacttcaataaggaagaattattgaatgcgatccgccagtataataagagagaacgccggttcggaggagttacggcggtaaaaacggagtaagaggtgagcttatgtttacgaccagactgatcagcggaatcgtccttgtgatcatcgcggcgtttctgcttgttgagggcagcacagtcctctattttggttccctggcgatctctttgatcggactttatgagctttaccgggtcatgaagatcgaaaagtcagcgccgggctatgtgggctatgcggctgtcgtggcctattactggatcatgggaagcagagagcagtatgtgacgttcctcgcgatcgtttccctcatgatcttaatgacgatctacgtggtgacgttcccgaaatacgggacggagcagatcacggtcgcatttttcgggatcttttatgtcgggatcatgttttcctatctctatcaggtgcgggagatgccggacggaaaataccttgtctggctgatccttttgagttcctggggctgtgatacctttgcctactgtgtgggaaagcttttcggaaaacataaaatgacaccgaaactgagcccgaaaaagacagtggaaggcgcgatcggcggtatcgtcggcgcagcagtgctgggtttcctctacggaaccttctttaagaacaatatgatccaggtgacgaacccgggtgtgatctcagcggctgcctgcgcgatcgcagcagtgatctccatggtgggagatctggcggcatccgccatcaagagaaaccatgatatcaaggattacggaaatctgatcccgggtcatggagggattctggaccggtttgacagtatgatctttacggccccggcgatctattttgcgatcacgttcatggggatccgctaggaaaggatgagaccggcagtccggcgagagagacagaagaccgccgcctgcggaaaacgaaagggttttaattatgaaaagaattgctattctggggtctacgggatcgatcgggacccagacgcttgatgtagtccgtgcgaacggcgatattgaagttgtcgggatcgcggcgggcagaaatattcaggcgctggagagccagatccgggaattttccccgaagatctgcggcgtctgggatgaggagaaggcgaaagaactggctgtccgtgtggcagatacagatacgaagatcgtctccggcatggaaggacttttagagatcgcagtcatggagggctatgagatcctcgtgacagcggtggtaggcatgatcggtatccgcccgacaatggcggccatcgaagccggaaaggatattgcactggcaaacaaggagacgctcgtgacggcgggacatctgatcatcccgctcgtaaaggagaagaaagtccgtcttctcccggtggacagcgaacacagcgcgatcttccagtgcttaaacggggaacacgggaataagattgaaaagatcctcctgacagcatcaggcggtccattccgcggctggacgagagaacagatgaaagatgtacaggttgaggacgccttaaagcatccgaactggtccatgggtgcgaagatcacgatcgacagctccacgatggtcaacaaaggactcgaggtcatggaggcaaaatggctctttgacgtcggaatggacgatgtccaggttgttgtgcagccgaagagcgtgatccattcgatggtgcagtttgaggacggcgcggtgatggcgcagctcggcacgccggacatgaagcttccgatccagtatgcactctattacccggagcgcagaccgatgaagggagatcgtctggatttctggacaatgaaggagatcgtcttcgacaagccggattatgagaacttccgcggcctggcgctcgcgagagatgcaggaaaagcgggcggatccgttccggtcgtcttcaatgcggcgaatgagttcgcggtcgcaaaattcctcgcgaagaagatcggataccttgagatcacggatatgatcgaggcggcgatggagcatcataaaaagatcgctcacccgtccctggacgaagtgctcgaggcggaagcggagacatatgaatttctgaaaaaacagtggggattcgtaactattcagtaggtctgcgcatttactgcgctgaccgtaagaaaacattggcttgaaggcaaaaatcctatcggcgtagccgatttggaatggatttttgcgcgtaactgtgaaggtactgaacagttacggggattctaacgaataatagaaagcaggtgaacaataaagttgaatcttggttatctggcagcggtggtggtccttggcggtatcatcctgttccatgagtttggacattatctcctggcgaggttaaacggggtcgctgttgtggagttttcggtgggttttgggccgagacttctctcctgggtgagcaaaaagaccgggatccggtactcattaaaacttttgccgctcggcgggtcctgcgccatgctgggagaattcggggaagatgaggatgaaaaggaagaaattccggatgtgaagggagtttcctttttcgataaaggaccgcttgcgaaaatggcggtgatcgcggccggaccgatttttaattttattctggcttttgtgttctcgtttgtgatcttatcctgggcggggatcgatcttccggtccttgcgggaacttccgagggaatgcctgcacagacggcaggacttcaggaaggcgatgtgatcacgaaacttgacggcagaaagatccatctgtcaagagagatctccatgtacctcatgtattcgggacaggattcggtgcaggtggaatatcaacggtacgatgagagctctgcctcctggacgacgggagatacggtgatccagccggagcttaaggatgggagatattatctcggcgtgatcctgcgcggataccggagtgcggcggaatccccgcttcagcttctccagtacagcgcctacgaggtgcgctactggatcctcacggtgatcgacagcttaaagatgatcgccggcggaaaggtttcgaccaacgatatcgccggtcctgtgcggatcgtcacgattatcgaccagacggtggaggagaatacgcagtacggctttgtgacgattgtgatgaacctcttaaatctcatggtcatgttctcggcaaacctcggagtcatgaacctgctcccgtttccggcgcttgacggcgggcggctggtgttcctgctttgggagctcgtgacgagacatccggtgagccagagagtcgagggcgcagtcaatatggccgggatggcgcttctcatgacatttatggtatttgtcatctttaatgatctgaggatcattttatagtttttgaaattgggagagaaatgtatgtttagagatcatacaagagtaattcagataggggacagaaagatcggagggggaaatcctgtcctgatccagtccatgtgcaacacgaagacagagaacgtcgcggcaacggtggagcagatccaccgcctcgaggaagccggatgcgatatcatccgcgtggcagtcccgacgatggaggctgcggctgcgatccgcgagatcaagaaacagatccatatcccgctcgtcgcagatatccactttgattaccgccttgccatcgctgcgatcgagagcggagcggataagatccggatcaacccgggcaatatcggggcgcgggagcgcgtaaaagctgtcgtggataaggcgaaggagtacgggatcccgatccgtgtgggcgtgaacagcggttccctggaaaaagatcttctggagaaatacggcggcgtgaccgcggaggcgctcgttgagagcgcgttgaaggaggttgccgttgtcgaggagctcggctacgataatatcgtgatcagcatcaagtcctccgacgttttgatgtgcgtggcagcgcatgaactcattgcgaaaaagacggattatccgctccatgtcgggatcacggagtccggaacgttgctttccggcaatatcaagtcctccgtgggacttggaattattctccatgaggggatcggcgatacgatccgtgtctccctgaccggtgatccggtggaggaagtaaagagtgcaaagctgatcctgaggactctgggactcagaaaaggcggcgtggaagttgtttcctgtccgacctgcggaagaacccagatcgatctgatccacctcgcaaaccaggtcgaaaatatggtatccggcatggatcttgacgtgaaagttgccgttatgggctgcgtggtcaatggtccgggcgaggcgagaagcgcggatatcgggatcgccggagggatcggcgaaggtctcctgatcaaaaagggagagatcattaagaaggtaccggaaaatgagcttctttccgttctgcgggaagaacttttgaagatgcaggagatgcagaaataagtatggaaaaaccattccttgaagttttcccggggcttcatattgcggatgaactgaaagagcttttgaaacttgtcatggtggaaaaggtcgccatgacaaaggacagaagctctattcgtgtttatatcagaagtcccagactcattcataaaaagaacatttatgccctggaagacgggatcgcgaagcagctgtttccgggaagaccgatcacgatcaagatccttgagaagtatcgtctgtcggcacagtataccccggagaagctctacgatgtctaccgggacagcatcctcatggagcttaagcattatggcatgatcgagtacaacattctccgtcgggcggacacaaaatttgtgaccgatgacaagatggttatgacgatcgaggacaacctgatctacagggagcggtcaaaggaagtcgggcgtgtcctcgagaagatctttacggagcgctgcggacttgcggcggaagtggagtttttatataaagaagcggagaagaaggacccgatggaccagccggtgttcatgaagccgggcggagagctcatcatgggaacccggagtgaggagaattacctggaaggcaccgcggaaagtgcgccgtgggacgaaggtccggcgaacggcggattcagcggaacgttcggcgacggcaatggagacgcgggggccgggatcacggcacagagcgctggaaattccggatccgcaggacggtccggtgcggcgggcggtggtaaaaatgcctccggagaaaaaacagcgtctggttccggagcagcgacgcagaagagagatgcggcaggaaagtccggcggaaaccagaacggaaagtctgccggtggtggacagaacggcggcggttttacaaagaagactttcggcgagaagggaaaaggcggtttttccggcggcttccggaaaggttccgacggaaggatcccgtaccggaaatcggagaatccggatgttctgtttgggcgcgattttgaaggtgatgcggtagatattcacgatattgacggtgagatcggcgaggttgtgatccgcggcaaggtgatccgtgcggagaagagagagctccggagcggaaacaaactcatgatcttcgatatcacggactttacggacagcatcacggtcaaaatgttcctcagggaaggccaggaggaagatgcgacagcggcgatcaaggaaggaaacttcatcaagatcaagggcatcacgacgatcgacaagttcgacggtgagctcacgatcggttccatcgtcggcatcaaaaagagcgaggacttcacgtccaagcgtgtggataatgccccggtgaagcgtgtggagctccactgtcacacgaagatgagcgacatggacggtgtctccgaggtgaaagacctcgtaaagcgtgccaagaagtgggggatgccggcactcgcggtcacggaccacggctgcgtccaggcgttcccggacgcgaaccatgcgctcgacaagggggataccttcaaggtcctctatggagttgaggggtacctcgtcgacgacatgaaggagatggttgtcaattccaggaaccagagtcttgacggcgagtatgtcgtattcgatatcgagaccacaggattttccccgacaaagaataagatcatcgagatcggtgccgtgaaggtgagaaacggggagatcattgaccggatggatgagtttgtaaatccggaggtcccgatcccgtttgacatcgagcgcctgaccgggatcaacgacgcgatggtcatgggcgcggacacggtggacaaggtcctgccgagatttctggagtttgtcggcgatgcggctttagtggcacacaatgcgtccttcgacgtgagctttatctcccacaatgcgggacttcttggactgccgtttgatccgacggtcctcgatacggtgacgcttgcaagagcgcttctcccgaacctgaatcgatttaagcttgacacggtggcgaaggcgctcggcgtctctctggaaaatcatcatcgcgcggtcgatgatgcggaggcaactgccggaattttcctgaaattcgtggaaatgctgaaaaaacagcacgatatgacgacgctcgaccagctcgaggagttcagtcatgtgagtgacgagacgatcatgaagatgccgacgtaccatgtcatcatcatcgcaaagaatgatctgggacgcgtgaatttgtaccgcctcgtgtcatggtcgcacctgaagtatttctcgagaagaccgaggatcccgaagagtgtgctgaatgagtaccgggaaggtttgatcatcggctcggcctgtgaggcgggagagctttaccaggcgatcctccgcggggttccggatgcggagcttgcgaagatcgtaaaattctacgactatctggagattcagccgctcggaaacgacatgttcatgctgcgggacgagaagagcacggtgaagacggtggatgacctcatggacatcaaccggaagatcgtctccctcggcgagcagttcaacaagccggtctgcgcgacctgtgatgtgcatttcatggacccggacgacgcgatctaccggaagatcctgatggccggaatgggctttaaggatgcggacgagcaggcgccgctgttcctgcggacgacggaggagatgctctcggagttcgagtatctgggcagtgacaaatgctacgaggtcgttgtcacgaacaccagaatgatcgccgatatgtgtgagccgattgcgccggtgcgcccggataagtgtccgcctgtcatcgaaaagtcggatgagacgctgcgaaatatctgttacaaccgtgcacacgagatgtatggcgagaatcttccgaagatcgttgtggaccgtctggaaagagagctgcactccatcatttccaacggattcgcggttatgtatatcatcgcgcagaagctcgtgtggaagtcgaatgaggacggatatctggtcggttcccgaggatcggtcggttcatcctttgtcgcgacgatgtccggtatcacggaggtaaatccgttaagtccgcattattcgtgcccgaactgtcattattatgattttgactcggacgaggtgaagaagtatgccggaatggcgggatgtgatatgcctgataaggtgtgcccggtctgcggacatccgatggtgaaggacgggtttgacatcccgttcgagacattcctgggattcaagggagataaggagccggatatcgacttaaacttctccggtgagtaccagagccgtgcgcatgactacacggaggttattttcggtaagggccagacgttccgcgcggggacgatcggtacgttggcggacaagacggcgtacggttatgtgaagaattattttgaggagcacggagagcggaagagaaactgtgagatcaaccggatcgttcagggttgtgtcggcgtccgacggacaacgggacagcatccgggcggtatcgttgttcttccgctcggcgagatgatctattcgttcactccggtccagcatccggcgaacgatatgacgacgaagacgatcacgacgcatttcgattatcactcgatcgaccacaacctgttaaagcttgatattctcgggcacgatgatccgacgatgatccgtatgctgcaggacctcacgggacttgatcctgtcaaggatatccctctggattcgcgggaggtcatgagtctgttccagagcacggatgcgctggggatcaagccggaggatatcggcgggtgtaagcttggtgcgctcggggttccggagttcggtacggatttcgcgatgcagatgttgattgacacgaagccgaagtatttttcggaccttgtgcgtatcgcgggtctggcccatggtacggatgtatggctggggaatgcccagacgctcatccaggagggcaaggcaacgattcagactgcgatctgtacgcgtgatgatatcatgatctatctgatccagcagggacttgaggaaggtcttgcgtttacgatcatggaggcggtccgtaagggcaagggattgaagcctgagtgggaagaggagatgacgaagcacggggttccggactggtatatctggtcctgtaagaagatcaagtacatgttcccgaaggcgcatgcggcggcgtatgttatgatggcatggcgtatcgcgtactgcaaggtgttttatccgctggcttattatgcggcgtttttcagcattcgcgcgagtgcgttttcttacgagatcatgtgtctcgggcgtgagaaattggagtatcatctggcggattataagaagcgagcggatacgctctcgaagaaggagcaggatacgctcagggatatgaggatcgtgcaggagatgtatgcgagagggtttgattttctgcctctggatatttatacggcgaaagcccgacattttcaggtcgtgggggacaagctgatgccttccatcaacagtattgacggtctgggagaaaaagcggctgattccatcgaggaggctgcaaaggccggaaaattcctctccaaggaggatttccggaacagaacgaaggtcagtaagacgatctgtgatctgatggaggagctggggatcctgaagggacttccggagtcgaatcagctgtcgctgtttgatttctaaatttcatagtggctgggggtacgcgccggtgagactccgggcgcgaacgcttagtgggattccgggagggttcctctatgctcccagaaaaatgctaagggcggaggcccggggacacaactcgcaacttgcgttgctcagacaagtgtccccgggcctccaacgcattttccagcgagccagctccctccatccaggcggtccgtgcccggagtctcaccggcgctgggtgttggcgggagtgagggatgaagggaaggttgtggcggaagctggacgatgcgcgggccctttgggcgccgcggcatcgcgaggttgtggatcgcgcattgttaagctgtggtttgatttttggggctgatatgatagaatgtaggtgatgacggaaagagtcggatattggagagagtattttttaggaaaattaaagatttatttaggagagtttttttaaggagaaaattatggcaaattataatgtttattttagtccgacaagcacgacggaaagagtcgtaaaacatatgggagaaagttttggcagtatggaaaatattgatctgtcgagacgggatatgaaaaattatgaaatggaacagggggatttttgtattgtgggagttccgtccttcggaggacgtgttccgggaattgcgaacgagagacttcggaaaataaagggtgaccgcacgccggtatttttgctggttacatatggcggaagagcgtatgaggatactctgatggaattgaaggatgtgcttgaggctcagggctttgtctgttttggggctgctgcgatggtggcggaacattcgatcgcccatcagatcgaagcggggcgtccgtcagcgcaggattacgatgaacttgatacgtttgcggctgaggtgaaggagcgcctgaaggggaatgtctgtcaggtcgaggtgccgggaaacaggccttataaggaatacaaggttctgccgatggacatccaggtgtcagatgaatgtatgggatgcggaagctgcgcggagagctgtccggttggagcgataccgtttgaggatccaaagatgacgaacggggaagtatgcatttcatgtatgagatgcgtggaaatctgtccgcagagtgccagaagcgggaatcctgaaaaggtccagatgatttcggagaaactgaaaatgatctgtcagccggataaggcgaatgagtttttctgatttagagatagttgggagaaatgttttgaagatatatgaattttcacagtgttgcaggtcggaaaaagcgggaaaagaaaaagatcatcggcatcaggtaggttttacatataagattgcagcaatgacaggaggaaaaatactatgattgtcaagaaggatacatgtaaactcgctctggtacaggcagcaccagtcatgttcgataaggacaagtgtgtggagaagatcatcgccctgatcggggaggcggccgctaagggagcggaactgatcgtttttcctgaactttttattccgggatacccatatggaatgacttatggatttaccgtcggaagccgtagcagggcgggaagagaggactggaagacttactatgacaattcgatcctggcggatggagcggagatgcagagtatcgttgactgcgcgaaggaacattcggtatatgtgagtgttgggtattcggagcgggacgctgtgacggcgacactttataattccaatatcatgatcgcaccagacggacagacgatgaatcacagaaagctgaagcctaccggcagcgagcgcgtggtctggggagacgcggataaagatttcttcccggtaatggagacaccttggggaccgatgggtaatctgatctgctgggagagctacatgccgcttgcgagagtggcgctttaccagaagggagttgcgctctatatttccccgaatacgaatgacaatgaggagtggcagaatacgatccgccatatcgccatcgagggacactgcttcttcatcaatgcggatatgtacttcacgaaggatatgtacccgaagaccgccagcggtgatgaggagattgcgaagttaaatgatatcgtgtgccggggaggaagctgcgtgatcgatccttacggacatgcggtgagtgagactgtgtgggataaagaggagatcatctacgcggaccttgacatgcagaaggtcccggcgagccggatggagcatgatgtctgtggacattacgcgagaccggacgtgttgaaattgagtgtggaggataaataatgaaagtattgatgatcaatggaagcccgcgggcgaatggaaatacatctattgcgttgaatgagatgaagacggtgtttgaaaaagagggagtcgacgcggagatcgtgcaggtcggcagtgaggcggtaagaggatgtattgcctgtaatcgatgcgcggagcttgggaagtgtgtgttcgacgatgtggtgaataagctggcggtgaagctttcggaggctgatggactggtggtcgcaacccctgtttattatgcgtctgcaaatgcgaccctgatcgcggttttggaccggctgttttatagtacatcctttgataagacaatgaaagtcggggcgagcgttgtctgtgcgagacgcggcggatgttcggcgacttttgacgagttaaataagtattttacgatcagcaacatgccgatcgcatctagtcagtactggaactccatccacgggcgcggaccgggagaagttgtgggggatgcggaaggtcttcagacgatgcgggttcttgcgagaaatatgacatttctcatgaagagcattgagcttggaaaagagaagtatggtcttccggagaaggaagaggtcgtgcggacacattttatcagatagagaagaatgatattggaaggaaattatgcgatgaatcggcagaaactggtaagtcagatcagaaggtatgtgccttataatgagcaggaagaggcggataaggctttgatcctaaactggatcgagaagaatgatgacgcgttccttcgggataatgtggtggcgcacatgacggcttcggcctgggtggtggataaggacagaagtaaagtccttatggtgtatcacaatatttatcattcctggtcatggcttggcgggcatgcggatggggagacagatcttctggcggttgcaatccgggaggtaaaggaagaagcaggaatttccgatgtgcggccagtgtcggaggagattttttcgctggaatcactcaccgttgacggacatgtgaaaaaaggacggtatgtgtccagtcatctgcatctgaatgtgacgtatcttctggaagcggattctgaggaacaggtgtctgtgaaggcggatgagaacagtggggtcgcttggtttacgccggaggaggcgttaaagaaatctacggagccgtggttcgtggagcgggtgtatgcgaagcttgtcgagaagacgatatcattgttgatgaacgagtagcagactggtgtaaatccggttttgttgctcgttttttatttcagtcgagaagactcccatcttttttagaaaatgattcggttctatgccccggatgggtgtttctttttatcgactagttataggttttccctatatgtaaccataaaatagaaagattatacagaactgccgtccggtggtagattattatcaaatatcctatgggaatagtaggaatatgaactctctatttacaagagaaaacaagacaggagtgaaaagatatggagagaggaattaatacacgatgtttacacttagaggaaacagaaggaaaaacagataattacggagcactgagctacccgatctatcagacagcgacttacgcccatgcaggtgtcggaaaaagcaccggatatgattacagcagacttcagaatcccacaagggagcagcttgagaaggtggttgcaagcctggagggcggcatcgatgctttcgccctttcgagcggaatggcggcgatcacactgcttatggaaatcttcaagccgggtgaccatattatcgctgaggcagatctctacggcggaagtgtccgtctgtttgacaatgtctcgaaaaagaacggatatgagtttacatacttaaactgttccagggatgacatcgaaggtgccataaaagagaacacgaaggcggtctacattgagacgccgacgaacccgatgatgaacgtatctgatatttccaagatcgcggagatcgcaaaaagacacggactctacctgatcgtcgacaacacattcctgtccccatattttcagaatccgttaaaactcggcgcggatatcgtgatccacagcggaacgaagttcctgggcggacacaacgataccttagccggatttatcgtgacaaacaacgaagaagttcaggaaaaacttcggtttatcataaagacgaccggagccgggctcgcaccgttcgactgctggctgatcttaagaggcatcaagactcttggaatccgcatggagcggtcccaggagaatgccatcaagatcgcgaactggctgaaggaacagccggttgtaaaacatgtatattatccgggacttcaggaacacccgggatatgagatcatgaaaaagcaggcaagaggattcggcgcgatgctgaccttcgatgtggacacagaggcacatgcgctgcagatcctcgagagtgtcaggatgatcaaatttgcggagagcctcggcggcgtggagacactgatcacctacccgacgacccagacccatgcggatgtgccggaggaagtacggctgaaaaatggaatcacgccgtgcacgctccgggtatccgtgggaatcgaggatatcgaggaccttctcgcggagttagcggaagtatttaagggattggaataggatcagaaacgcgaaaagaggagaggatttcggcatggcagagagaaatttgaattttgatgagatcgtcgagcggcgcggaacggactgcttgaaatatgactttgcaaagaggagaggaaagccggcggacgtcctcccgctctgggtggcagacatggattttaagacatcttcctacgtggaggatgcgctgatcgagcgggcaaaacatggaatctttggttacagcgatacccaggaagtatattttaacgcggtggcaggatggatggaacggcatcatcactggaagatcaaagaggactggctgatcaagactccgggcgtggtatttgccctggcaatggcggtaaaggcgttcacaaaggccggtgacagcatactgatccagcagccggtctactatccattttccgaggtgatccgggacaatgaccgtgtgatcgtcagcaatgacctgatcctgggggacgataaccggtatcatatcgatctggctgattttgaaaagcaaatcgtggaacatgatgtgaagctgttccttctctgcaatccccacaacccgtcaggaagagtgtttacgaaggaagaactgactgcaatgggagatatctgtgtgaagcacggcgtcacggtggtcagcgatgagattcacaacgattttgtgttccggggtgaacatacggtgtttgcgtccatcaagaaggagttcgaggacatctgcgtggtctgcacgtctccgagcaaaaccttcaacctggccagcatgatgatctcgaatatatttgtcccgaataaggagctgagacaaaaatttcagcatcaggtcgatgccgcgggaatcagccagctgggcgtactgggacttgtggcgacacagacggcgtatgagaagggcgatgaatggtatgagaacatgctcaaatatgtctgggaaaatatcgcctacgtaaagaaatatgtgaaggacaacatgccgggagtgaacgtcattgacggcgagggaacctacctcttgtggctggatttcggagggaccggaatcgatgccgatgagctggaccggcggatcatctacgacgcaaagctgtggctggacagcggaaagatcttcggaaagacaggaaccggattccagaggatcaatgtggcggcaccgaggaagacgattgaggagtgtatggagcggattaaaaaagtgctgtgacttagagatatgtgcgtatgcatgtcataaagaattcatttacgaattggaaaggtactggagtccggagtggcagtttaaaatgaaccgcctgcatttctcaatagcgaagttggttgccggacaggaaaaatcgtgatacattctaagcaggacgtatttctgtgaacggcacatactggatctgcgatgcatacggaatgtactgcggtccggaaccggcagaaaggcagcatccatattttcagcaggataaattataaaaatagaatggctggccgtatctcctttggggcaggaggacggtcagccgtttttgtgtctttacttctgctttcgtgatggtcttctcaatacacggacgctttctgtgatttttgcatatggatagttaattttggaagtgcagtgcaggaatcatgtatttgtttgcagcctataacatgtgagtgctataatgagaactggcaagtttaagcagtttaaaggcacgcaggagtgaaaacatcagaatgtgaagaaagagcttattcagccgctctacgattcgtagagtcatggaagatatgaccacataaacgctgcgtcggttttcagtcctgcatgcggatgatatgatggggatatcataaaaaggaggcgcaggatatggaagcgaaggaattgggagcgtttattgcggaaatcagaaaggaaaagcagatcacgcaggcggaactcgcaaaacggctgcatgtgacggacaaggcggtgagccgctgggagcggggcgttggatatccggatattaatacgttagagccgttggcggacgctcttggggtcacgctgacggagcttatgaaatgttcgagagataaggagaagagctctgacgaggggatcattgccagtattgagatcgcgaagagtcagagaaagaaagtgatcaggaagatcattggcggcggagcgttgtgcgtgttcggtgtgtgggcgctgctatatgcactgaagctttttatgacgcacacatggacatttatggtttcgggaagcgatggaccgacggctgtctttgtggcgggccggattgggaaccttccgccgacggtgactgggatcatcggagccgcggctttagtagttggaattgctgtgattgttcgggcaaataatccggatcaataggtagagagcatcggtgttccggtatcggtgtcttacttatatggaaaaagagaagaaaattgtctggaatacttgcaaattttttcaaaattatgtataatacctgacaaatagggagctcaaatggatgggctgagagtaggctttattagtcttgacctggaacctgatttggataatgccaacgtagggaaatacatgtcgcgaatgaatggacttgtgtgtcgatgctctctgttttgtgtgaactgggggcaccacttttcacagaatctttcaggcgccggataacaggataactgttgtccggcgccttttttgcgcactcgcgcgaagatgcaggttgttgcaagcagtcgtgcgagatgtctgaatgtgtcaaagtacattccaaattacgctatttcgaatccggagaatcttaccggtgacaggcggcgcagactttttacggtgttagaaaacgaaaggagcagatagatggtacagatcaatggagaggcgaaggaaattgccggaaaaacgcttctggaatacttgacagaaaatgggtttgaaccggagcgggtagtggtagaacgaaatcttgagatcattccgagcgaagcacttggtcatgtgatgatccaggatgaggatgtgatcgaagttttgcgatttgtcggaggtggctgaagaaatgacagaaatgcaaaaaaatatgcagagtctcatttccagagaagaactggagcgtgcatttgatgcaaggtttccgaaagagatacagagaaaactacggaatgccagagtagcggttgcaggacttggcggtctcggatcaaatattgcagtcatgctggcaagatgtgggattggaaagcttttgctggtggattttgatgtggtggatgtgacaaatctgaaccgtcagatgtattttatcccgcagcttgggaaaccaaaagcagaagccttgctggaacttctgtataagatcgatccttacgcatcctatgagactgtctgcgtaaaagtaacgccggagaatgtaagagaactattttccgaatatccgatcgtgtgcgaggcctttgatcgtccggatcagaaagcgatgcttgtacgggaactccttacccagtgtccgaatacgatcgttgtatcgggaaacgggatggcaggatatggagatataaatgagataaaaacatatcagatgatgcaaagattatatgtgtgtggagatcggaaaacggatgttttagatggaaccggtttgatggcaccgagagtggcagcatgtgcggcccatgaggccaataaagttctgcagttgatcctgcaggaagaatcaaatgaaaagagaggaaaagaagatggaagataaatttgtattaggtggaaaagagtttaagagccgttttatccttggctccggaaaatacaacctgaatctgatcaaggcagcagttgagcagggaggagcggagatcattacgcttgcacttcgtcgtgccaatacgcaggagagtgaaaatattcttgattacattccggagggagtgacactgctcccaaatacatccggagcgagaaacgcggaagaggctgtccggatcgcaagactgagcagggcaatgggctgcggaaattttgtgaaggtggagatcatgcgagatgcaaaatatctgttcccggataactacgagacgatcaaagcaacagaaatcctcgcaaaggaaggctttgtggttttaccgtacatgaatccggatctgaatgttgcgagagatcttcagaatgccggagcagcggcagttatgccgttagcggctcccatcggaagtaacaaaggacttgcgacgaaagccatgatccaggtactgatcgatgagattgatctgccgatcattgtggatgccggtatcggaaaaccgtcccaggcatgtgaagcaatggagatgggtgcagcggcgattatggcaaatacggcgatcgctactgcaggagatgtgccggaaatggcagctgcatttaaattagcgattgaagcgggaagaaaagcatatcttaccggaatgggccgagtacttgccagaggcggaagtgcttcggatccgttgacgggatttttacgatagggaggaccggatcatgaacgaggagaatcagatttattttgtagacagcgataagcttccgccggctgctttggagagaaaacaccggttggagcaggatccgtcattccgtacaaatcatatggagtatatggaaggaatgcaggttctggaatcggatatcaaagataaagtgctccgggcgatggaagcatacgattacgatgcatataccgcttccgatgtggaacgtgcactttcaaatgaatcctgttcgatcgaggattttaaagcgctcttatctccggcagcagcaccatatcttgagcagatggcgagaaaggcagaggagatcacaaagaatcattttggaaacacggtctatatttttacaccgttatacatagcaaattactgtcagaactactgtatttattgtggctttaactgttataacaacattcgtcggaaaaagctgacatttgaagaaatcgagcatgaaatgcatgtgatcgcgaagactggtatggaggagatcctaatgctgacgggtgagagccgggcatattctgatgtaaaatacatcggagaagcagtgaagattgcaagaaaatattttaaaaacatcggaatcgagatctacccggtgaatgaagatgaatatcgttatcttcatgaatgcggcgtagattatgtaacagttttccaggagacgtacaatacggataaatatgaaacgctccatcttatggggcataagcgtgtctggccataccgatttgattcacaggaacgcgcattaagaggaggcatgagaggagccggattttcagcgcttttaggtctggatgatttccggaaagacgcgctggctacggcactgcatgtttactatatcaaccgaaagtatccgcatgcagagttatcattaagctgtccgagactgagaccgatcgtaaacaatgataaaatcaatcctagagacgtgggtgagaaggagctttgtcaggtgttatgtgcatatcggatttttcttccgtttgccggaatcacggtatccagccgtgagagtgcggaatttagaaatggaattaccaagatctgcgctaccaaggtttcggcaggtgtctccaccggaatcggtgaccacgaagagaaatatgagggcaaagaggacgagaacgtcggagatgagcagtttgagatcaatgatgaccgatcgtttggaaaaatgtataaggatatggaacagggtggtcttcagccggttctgaatgattatatctatgtataagggatatgaacataccattgtgatcacaaatcgtatgctggtgcagggagatttctttcaacagatggagaaagtgatccggctgcatccgcatgcagtgatcttaagagaaaaagatctgccggatgatgcatatgaggtgatggcagaaaagctcctgaagctgtgtgctgcggaaaatgtgaaatgctttctgcactcaagggttttggcggcaaaaaggcttggatgcagccggattcatgtttcggtcccattccttgaggcaatgggagaagacaagcgggagcaactgagaaaggattttgaagagatcagtgtttcttgtcacagcatggaggatatggagcttgcggtcaaaagtggagcttctcagatcattcttggaacgattttcgaaacagagtgcaagaaaggcttaaagggaaagggagtagagtttgttagggaggtctgtgagaaatgtccggtgccggtatatgctattgggggcatcaatatggagcggctgccgattatcatgcaggcaggtgcagcaggcggatgtatgatgtccgggtttatgcgactatagaacgaaggctgtgccgcatggcataaggaagtcatacgatacaaagcaatgaattttgaacaaaggcacattcttttatacgtgagcacagaataacacgcttgacattttccaaatccatgatattatttacatataccccgtataggtatataataatgacaagtggaggaatgacagatatggaacaatataccgttaccggaatgagctgtgctgcctgccagacccgtgtggaaaaggcagtttccaaggtgtccggtgtgacatcgtgctccgtgagtctgcttacaaattccatgggtgtagaagggactgcctctcctgagaaaattattgcggctgtgcaggccgccggttatggcgcgtccttaaagggagcggaaacggaaaatcgaaacagctttaccgaaagtgccctgtatgatgagaaagcactggaggatcatgagacaccggtgttgaagcaacgattgaccgcgtctcttggtttcctttgtgttcttatgtatgtttctatgggacatatgatgtggaactggccgcttccggctttctttaacggaaaccatgtggcaatgggactcttacagcttcttcttgccgtgatcatcatggtgatcaaccagaaattttttataagcggctttaagagtctcttccatggagcaccaaatatggatacgctggtagcattgggctccagtgcctcctttgcctggagcacctatgccttatttatgatgacagatgctcaggtaaaagggaacgcggatgcagtcatgagctatatgcacgagttctactttgagtccgcggcgatgatcttaacccttatcaccgtcgggaaaatgctggaagcgagatcaaagggacgcaccacagatgccttaaaaggtttaatgaagctggccccgaagaccgctgtgatcgaaaaggacggcgttgagactacggttccgatcgcccaggttaaaaaaggcgatattttcgtggttcgtcccggtgaaaatatacccgtggatggtatcgtcttagagggaaacagcgcagtaaatgaatctgccctc

SEQ ID NO: 2009 - DNA, 6546 bp, Unknown
  gut microbiota DNA sequence
gctttgcccaacggggcaatcgaacgagaagcccccacttcaagcgtgagctaagtggtgggagtatgtcacgagacggatcatggtaagatccggacggaaaggaaaaagaaaaatggcttttatcaaaaatatcgaccatgaaaaagttttaaaccttgcttctcagatcacagcagcaccgggacagatcgccagcaagactctcgcccagaataaggcagtcagcttgacagtgtttgcgttctccaaaggtgaggagatcagcacgcacgattctaccggcgatgcgatggttcatgtgatcgaaggcgtcggtcagttcaccgtagacggtgtggaacatatctgcaaagccggagatgttctcgttatgccggcgaagaaaccgcatgcagtgtttgcaaaagaagatttcaagatgctgcttactgtgatatttccactggattgatcgttattctggattctctggaaaaaggatgtgccccgacaggtccgtgtgtcctgcagaaggaaagaaggaaaattttaggagaaaaaaggttgctgtaaccaaaaaagatccccgtgtgatcggaaagtcacacggggatctttgacatcagtggtcaatgaataaacattgcatctccgaaactgaagaaacgataccgttctttgattgcttcctggtacgcattcaggatatgttcgcgtcctgcgagagcggatacgagcataacaagcgtggactccggaagatggaagtttgtgatcaggcagtccaggatcttaaacttgtatcccgggtagatgaagatctcggtccagccgcttccagcctttaagatcccgtcatcaccggttgcggattccagggtacggcagcttgtggttccaacgcagatcacacgtccgccgtttgccttggtatcgttgatcttctttgcctcggactcctctacgatatagaattcagagtgcatgtgatgatcttcgatggtatcgacctttaccgggcggaaggttccgagacctacgtgaagtgttacatgagcgatcttaactcccatgtcctcgatctcctgtaaaagctcttttgtgaaatgcagaccggctgtcggggcggctgcggagccctcatgcttcgcgtatacagtctgatagcggtttttatcttttaactggtgcgtaatgtacgggggcagcggcatctggccaagcttgtcaaggatctcctcgaaaattccatcatactcaaactggatcaggcggtttccttcatcgacgacatcgatgacttttccttttaaaagtccgtcaccgaaggatacttctgcgccgactttcatctttttacccggctttacaagagtttcccagacattgtcggattttctctttaaaagaagaacttcgattccggcatctgttccgaccttatgtcccatgagacgcgccgggataacttttgtatcgttgataacaaggcagtcgccttttttcaggtaatgcagaatatcgcggaaatgacggtgttccatttctccggtctttttatctaatacaagcagccgggaagcagaacggtcctcaagcggatcctgcgcgatcagttccggcggcagttcaaagttaaaatctgttacattcatttctctatctcctgtctggtatccttatcaaaaagttccatgccattgtagcagaatcgggaagaaaaatcaatgaggcgcgcaggaatatggggaaaatcggtgatcatctgcaaaaggctcggacagcagccgggaaataaaaatatatcttgttgttttaaggttatggtggtacgataggaaaatcaaaagcatggtacatgcggcaatcggaaggagcagttgcaatgaaatatatcaatcagttagaacacagagatatcccctatgaacataatttagaccacggcggagtgccggaggagaagcggaatgtggctgcagcaggctgcggaccgagctgtctgtgcatgatggtggatgcgctgactctgtcaacctatgaactcacagactgcctgaaattatccaatgaggttggcgcgaaccgtgagatcggaacgagcctgaagatcctgggccccgtcgttgcggaaaggtttaacctgaattatggggaaacgagtgatctgaatgaactgaaggcgcacctggcaaaaggcggactcgccatcgcaaattccggcggagaccgggaagggtataccggggtgttcactcatggaggacattacatcctcgttgtatcggccgatgacaatgaggcgtgcattctggatccgtcctataaagaaggaaaatatgaggagccgggcagggatggaaaagcgagagtcgtagatggctttgtttactgcagcctgaaagttcttgcggaggactgcgcaaaccgtactccgtcctactatctgttttcaagaaagcattaaaaatatgaaaagcgcggcagccgggaaatggaattgggtaaaaaaatatacaaaaaaataattctcatccccttgcatgaatcagaaaattattgtatactattagagatgcatctgtagctcagtggatagagcagtggcctccggagccgcgtgcgtaggttcgattcctatcagatgcatttttttatgcgtccgtcagatcgggaaaatgtcctgaccctgatgggcgttttttcttgcattcatactccggaaacgatataatgggtccaaaaaggaaaataagcgttacagtgcgtgctcatggagcgcccgtgtactgtaacaaataagctgcagttgagaatacaaaaagggagaaagagattggaaggaacgattcgtttaaataaatatctgagtgatgcaggcgtctgctcgagaagagaggcagaccggcttgtggagaatggaaaagtcatggtggatggtgaagttgctgtgatgggaatgcagatccgcccgggacagaaggtggtctgtgacggaaagccggtgggagagaaggaaaaaccggtattcctgatcgtaaataagccccgtgggatcgtctgcacgacttcggataaggatcatgcagaaaatatcgtcgagtttttaaactatccccagaggatctatccggtcggacgtcttgataaggattccgagggacttctcctgatgacaaatcagggagatatcgtcaacaagatcctgcgcggcggaaatgcacatgaaaaagagtacgcggtggctgtcgatcatccggtgacggaagaatttttaaagcagatgtgcgaaggcgtccgcattgaggatctcgacgtgacgacaaagccatgccgcgcgtggaagaccggaagccacacgttccatatcgttctgacgcagggattaaaccgacagatccgccggatgtgccgtgcgctcgattatcatgtgatgaatctgaaacgcgtgcgtatcatgaacatccagctgggtacattaaagcgcggggagtaccgggagctgacggaaaaagagctgagcgatctgatgaaactggtggaaggttcgacgaatcttccggcgagagaagctgcgaagatcggaaaactggtggatccggcaaaagcggccggaaaaacagcccgcttcggatatcagggaaagaagaacgacaggaaaacgtttgtaaaaaatggtgagagaaagccgttcgagaagaatagcggaaccggaaaggtctggagaaatgtccgcgaggacagcgaaaagaagccggaaaagaaagcccccgcatccccggaaagctggaaaccgggtgcgccggagcgcaaggagcataaaatatggacgacaagatcaagaggatgaaggagctgatcccgcttctctctgaggcatcgaaagcctattaccaggagagccgcgagatcatgagcaacttcgaatatgacaggctttacgacgaactcctgaaactggaacaggagacaggtacggtgtttgccggaagtccgacccagaaagtcggatatgaagtcttaagtgaacttccgaaagagcgccatgagcggccgatgctttctctgaataagacgaaaagcgttgacgagctccgggaatggctcggcgggcagaaaggacttttgtcctggaagatggacgggctgactgtggtcctgacatatgaggacggggtccttgcgaaggcggtcacacgcggaaacggcgagatcggtgaggtcatcacgccgaatgcccggacgtttatcaatattccgacctcgatcccgtataagggtcagctgatcctgcgcggggaagcggtcatcagttattcggattttgaaaagttaaacgattccatcgcagatgtggatgcaaagtacaagaatccgcgaaatctctgcagcggttccgtacgccagctgaacagtgagatcacggcatccagaaacgtccgttttatggcgtttgcactggtgcgggcggatggcgttgactttaaaaattcgagaaaagagcagtttttgtggctttccggcctgggatttgagacggtcgagttcgtggaggtgacggcggagacactctccgatgcagtccgcggatttgcggagaagatcgaacattacgatatcccgtcggatggtcttgtactgctttatgatgatatcgcctatggacagtcgcttgggcggacggcgaaattcccgagggattccatcgctttcaaatgggcggacgagatccaggagacaacgctttcctacatcgagtggagtgcgtcgagaacaggactcatcaatccggtcgccgtgttcgaaccggtggagcttgagggaacgacggtgagccgcgccagtgtccataacatcagcatcatggaaggactggagctgggggccggggacaggattacggtctacaaggcgaacatgatcatcccgcagatcgcggacaacctgacaagaagcggtgtccgtgatatcccgaagatctgtccggtctgcggcggggcgacggagatccgcagtgtgaatgatgtgaagtccctctactgcacaaatccggagtgtcaggcgaaaaagatcaagagttttgacctgtttgtgagcagggatgcgctgaatatcgacggactttccgagatgacgctggagaagtttatcgcagcgggattcatccatgaattcgatgatattttccatctggaccgtcaccgcgatgccatcgtgacgatggagggattcggggagaaatcctatgagaatcttatccaggcggcgaagactgcgtcccatacgacgctgccgcggctgatctttggactcgggatcgctgggatcggtcttgcgaatgcgaaagtgatctgccgccatttcgattttgacctgaacgccatgcgcggggccgatgcggaggagctttgttccatcgacgggatcggcggtgtgctcgcggatgcgtgggtgaagtactttaagaatgataagaacaatgagatactggatcatctgctggcggatctgacttttgaaaatgaagtgagaaatgaggaacagacgctggccggaaagactttcgtgatcacaggctccgttgagcattttgcgaaccgcaaggaactgcaggagaagatcgagtctctcggcggaaaagccgcaggctccgtgtctgcgaagaccagttatctgatcaataatgatgtgacatccaattcgtcaaagaataagaaagcaagagaacttggcattccgatcctttccgaagaggatttcctgaagatgataggagaggaaaaaaatgccgattaaaatacagaatggattgccggcaagagcgatccttgagagtgagaatgtatttatcatggatgaggaccgtgcccagagtcaggatatccgtccgctggagatcctgatcttaaacctcatgccgttaaaggaggacacggagacacagcttctcagagcgctgtcaaacaccccgctgcaggtggaatgtacgtacatgacgatgtcgacccatgagtcgacgcatacctccgcgagccacttaaataagttctatgtgacattcccggagatccgcaagaaacatttcgatggaatgatcatcaccggagcaccggtggaactgatggagtatgaggaggtcaactactggccggagctgacgcagatcatggagtggagcaagacgcatgtgacatccaccatgcacctctgctggggtgcccaggccggactttactatcattacggaatcccgaaacacttacggaaagaaaaactttccggtgtgtatacacagaaagcgctggataagcgtgttccgttactccgaagctttgacgattactttaagtgcccgcattcccgctatacagaagtgtgggaggaggatattttaaagcacccggaactccggatcctcgctaaatccgatgaggcaggcgtctttcttgtcatgaaccaggacggaagccagatcttcgtccagggccacccggagtacgaccgtatgaccttaaacaacgagtatcaccgcgatctcaacaaaggcttaaatccggcactccc

SEQ ID NO: 2010 - DNA, 1242 bp, Unknown
  gut microbiota DNA sequence
acaatcaacgtcgaaatgttcggccgtgaaacaccggtggaactgagcttttctgaaatcaagaagatgtgaccgtaaacggacaaaagtcctgaccggtcgtccgtacctttttaggaaaacggactttgtgcccgcgtgggagggaaatccccgacattaccacattatttaggaggtgcctaattatggcaaagaaagttacaggttatattaaattacagattcctgccggcaaggcaacaccggctccgccagttggaccggctcttggacagcacggtgtaaacatcgtacagttcacaaaggagttcaacgctaagactgctgatcagggcgatatgatcatcccggttgttatcacagtttatgctgacagaagcttcagcttcatcacaaagactccgccggctgctgtattattaaagaaggctgcaaagatcaaatccggttctgcaacaccgaacaaaacaaaggtagctactcttacaagagcagaagtacagaagatcgctgagctcaagatgccagacttaaacgctgcaagcatcgaggctgcaacaagcatgatcgctggtactgctcgttccatgggtatcaccgtaacagactgatcgtaagcgactgaatggaggatggacctccatatacagcaacaatcacgtgggagggaggactcccgacactaccacaggaggttttttataatgaaaagaggaaaaagatacgtagaagcggcaaaagctatcgaccgcgctactctttatgatacagcagatgcaatcgcattagttaaaaagtctgctgttgctaaatttgatgaaacaatcgaggctcacttaagaacaggctgtgatggccgtcatgctgatcagcagatccgtggtgcagtagttctgccgcacggaacaggtaagactgttcgtatccttgtattcgctaaaggaccgaaggctgatgaggctcaggctgcaggcgctgacttcgttggagcagaggatttaatcccgaagatccagaacgaaggctggttagatttcgatgtagttgttgctacaccggatatgatgggcgttgttggacgtcttggtcgtgtacttggaccgaagggcttaatgccgaacccgaaggctggtaccgtaacaatggacgttacaaaagctatcaaagagatcaaagctggtaaaattgagtacagactcgacaagacaaacatcatccacgtgccagtaggtaaggctt

SEQ ID NO: 2011 - DNA, 48044 bp, Unknown
  gut microbiota DNA sequence
cagttagcggacaacttccagacgcttatggatgcaatcaacaaagctaaaccgagcacagtaaagggcgcttacttaaagagcgttactcttacttccacaatgggcccgggcgttaagttaaacgtagctaagttaacaaactagtcgattgtgtcattttaactgtcagacattgatctggttctgcgccccagcggcgtacagccggattgaccgtctggcagtattttaatgcaaaaaactaaaaaagtgattgacaatccaaatatattatgataaactattccggtattgaatgccgaagacagcaggtgccgtaaggcgtaaggtaaaaacacctgccgagggacgtacaaaactcacacagaattttgtaaacctctcggtctgcggacagagaggtttttctgataagcgaaaaaatgctgtgacggcgaatccaatactaaataaaacaggaggtaaaccattcatggcaaaagttgaattaaagcagccggttgttgctgagatcgctgaagtcctcaacggagcaaagtctgctgtagtcgttgactaccgtggattaactgttgagcaggatactgctcttcgtaaacagttaagagaagctggtgtttcttataaagtatataagaacacaatgatccgcttcgctgcaaagggaactgagttcgaagcacttgagccgcatcttgaaggaccgacagcacttgctgtttctaaagaagatgcaacagctccggccagagtattagctgagttcgcaaagaaagctgacaagcttgaattaaaaggcggcgttgtagagggaacatactacgatgcagcaggtatcggcgtgatcgcaagcatcccgtccagagatgtccttcttggaagacttcttggaagcatgcagtccccgatcacaaacttcgcacgcgttctcaaccagatcgcagagaagaacggcgaaggcgcagaagctccggcagaggcttaatcctcatcccggtcctgcaggcggagacacgcatcgcgtgatcccgtcaaaggcagcatagatgctgtataaaagttgtgaaaaacaaacgtgaaatataaattattatggaggtaaattataatggcaaagttaacaaccgctgagtttatcgaagctatcaaggaattatccgtattagagttaaacgaattagtaaaggcttgtgaggaagagttcggtgtatccgcagcagcaggcgtagtagttgcagcagcaggcgctggcgcagcagcagaggaagagaagactgagttcgacgttgagcttacagaagtaggcccgaacaaggttaaagttatcaaagttgttcgtgaagtaacaggtcttggcctcaaggaagctaaggacgttgtagacggcgctccgaaggttcttaagcagggtgcatccaaagacgaagctaacgacatcaagacaaaacttgaggctgaaggcgctaagattactcttaagtaatcaacttttatactttgaatgttttgatccgcaggaaggtgacttcctgcggatttttttagttcgagaacaaatgtaaaaactctgtaagattctgtattgtaagcaatttgacggtggaaagaccggcgcttatgtgttaaaatggatagcatgaaaatggcaatacctgcccattatacaggatcgggcgggtgaaaaggagaaagaatgattcaggaattagtaaagagatatccggtcctggatgccgtaaaggaccagattgaagaggcatacaagatcttagagacatgctatgagaacggcggaaaacttctgatcgcaggaaacggcggaagtgccgcagattctgaccatatcgtcggtgagctgatgaaaggcttcgtaaaacgccgtccggtatctgcagaactcgcagaggctttaaaacaggcagacccggaacgcggagcggaactcgcgaagaaactccagggcggacttccggccatcgcgctcacaaaccatgcagcgctttcctccgcattcgcaaatgatgtggacgggatgctttcctatgcccagcaggtaaacggctatggaaaagcaggggatgtgttcctcgggatcagtacctccggaaacgcggaaaatgtgatgtatgccgcagtgactgcaaaggcgaagggaatgaaagtgatcggactcacaggaaagaccggcggaaaacttgcaaagatcgcagatgtcgcgatcatcgtaccggagcaggagacttacaagatccaggaactccaccttccgatctaccatgcgctctgcctgatgctggaagacagattttatgcggaatagtaccgatatgataatacatgtctgcatgatgttgaaaaatcctatgaatgtctgcggacgatatccggatgtgcgaatgggcagacagcaggaatcatgccggagaagaaccgcaaccgggggggaattatgaagagacgggaatgggcctcgttaattattctggcgctggcggcggtgcccgcgctcttagttgcgatcggacaggtttatgtgacaggagtggatgggatccggcttagaagaccggagacgatcgaacttctggcagagatcattgtgctgtttttcctatatctgttcgcgatatggaaaatcgatcgaaaccggctcagagcaggagcagctctcctgatcacagccggattcctctggatccatcaggcgttcacggcgatgttcctgtccggcgcctatgttctggtccttttgatgctcggcgcgcgccttcgcagagggatggacagaaatcatgtctggagagagtatcatgtgatcaccggacttgcggatttccttctgggaagcggatgtatgatctttttattctgtataggatccctgcttttcgggtgcgggatccggagcttccgtttacttacggtgatcattgccggatttctgatcggtttccggtttatggaattaaggacggcaggagatgacggaaagccgtggagacagatcccgaaggagacgaagatctctctggaaatgtccgcctgcatcgcgatcattcttgcgatggtcctcctgcaggccggaagaatgaacatctgcgccgattacgactcgctccattatggcctgcggagtgagtatgtcctggataacggcggcgggatctatgaaaatctcggaatggtcaacgtggtatacacatactcgaaaggtctggagacactgcttttaccgatctccggactgccgtcctacggctttttcctgagtttccagatctggatgacgcttgggaccctgatcaccgcgggccagatcgtggaactttttgtcggaagaaagcatgcggtgggctgtatgacgctgctctcctgcatacccgggatcatgaacatgtccatcactgcaaagacagactccatgacggtatttatgcagcttgtcatgcttttgtttctgcttctctatatcaggagaaagaagggcgcctacctggtgctggcggtggatgcctacctgatgacactcgtgttaaagccgacggcgcttgtattttccacagcggcggcaggaaccgccggactttacatcctgctcacaaaacagctgagatttaagttccgcggaagtttccttccatcccttggctttatgatcccgatgtggcttctcatctggtaccggacatggctgcacacgggacttccgctgacatccgtgttcaactcgatctgggcggccctcggctttaccgtgcggtatccgtaccggtttgagagtctgccgtcaaacggcggggcactgatctccctggcggggctcaagcacattttaaagaggatttatggcgttctcatggccccggtgggcgaagatatggcgcatgtgcggatcgcctggggatcgccgctgctcctgatctttcttctgatggtctgtctgccggtgctggcggatgtgaagagatcgggacggaaagaaaaaagctccctgatctgcctggcgctggtctttgtgacgaatgggatcgtgagtctcgcggcgctttatcttttatggcaggtggatggaaactatttcctgctcctctatgcactttcagcgatcctggcggtgatcacagcaggaaaattaaagagcggtttcctccgcggaacgatctgcaggatgctggtcccgttccttctttttaatgtgacgatcacagccgtgagcaactggggtggaacgctgggactgacaccggtgaaaatcttccataaaggatattatgatcatatggaagaatcccatgaactgctcgtctcatacggaaatgagaagatctgggacgtgctggcggaaaatccgagaaaccgcgtcgtcgtattcggggaacagccggagatgctgcgcttcccgtgcagcacccagagctatacggacatcgagggaagcggcggaaatttcaatctgtcatccagcccggagacactggcagagttctttacattcgcgggagtggatcatatctatctcggaagcggatacttaaagcccggaacggacggattccgaaatgtgacagggcttttaaaacaggggtatctctcagacctcctgtatgaaaatggaaacgggcttgcagtattctcaccagaaccgagagaactctccgcggaggagagcgaggcgcttctggcggagtttaccgaaaaatactggcccggagaacagcagtaaggggataagacatgaatttacaggagaaaacctcagaggcgtggaagaggtggagcccggagcttctgatttttgcgctccttctgggatttggattttggatcaatcgtggagtggaattaaagggactttatatggatgatctgtacctctggtcctgttatggggaccagtcgtttacagagtatgtattcccgatgggcagcagccggttccgcttcctgttttacctggcatcctggctggaacttttctttatcgggggacatgtggaatggatggttccgttcaacatcatcctgaacgcggggatcgcgtacagcatttatcggatagcagtgtcattcagtgatgggagaaagatcttaagctttgcagccggcattctctacctgtcttcgagaatggcatattatcagatcggacagttctacggtctgatggaaagcctggcactctgggcggcgctcgggatgctgtggtttctgtaccggtacgtgaatgagaaaaaagcgggggcgtttctcgcagccaacgttctgtactttgtggtcagcttcattcacgagcggtatatggtgctgctgccgcttcttctcttaacggtgatcctcggctttggaaaaggtctgggaacgaaaactgcggccgcggaaccggagaaaaaaagcgaaccggagcgcgcggcagagccgggacgcagccgtgggagaggacagagccgcggagcgcagggtaagaaagatgcagcagcccgcgcggaagcagcagacacagaaagcagtttccgcctgccagggatcctgctcatcttgctcccgatcgtggtatttggagtgatccagatgatccgtctccgcacgatcggaacgctgtcaccggcaggaaccggaggaacggatgtggcagataccttccagctcacggatgcgatcaaccaggcgatcagccaggtgggatttgtgttcggaagaaactccggaccggattatctctgcattgagccgtttgtggacagcccggacgggatccggaacctgatcctggcagcggaagccgttctcggagccggtgtgctggcggccgttctcggtatggtgagagatcgggaagagattgtctgtcatttaaagaacacgatcctgtttcttggatttatcgcgctctgcatcggcagctccagcgtgacgatccgtgtcgagatgcgttgggtctatgtggcctatgcggcggcgctcctgttctttgcttatctgtcccgtgtgatgggaaaggcggggatcctggtacttttatacggctgtctgatcttcccggttgagacatattaccgggacaactgggataacctgtatttatgggcaccgcagagccagtacaattctctggcggaaaagacatacggaacatacggggaggatatcttcgacaaagagatctatatcatcggaaaagatttcgagatcagtgattttaatgcagaaacattcctaaaagtatacgcaaaaggaaaaacaaaggttccgaaacttcagtttatcgacagcgatatggacctcaaggagatcacggacaatatggtgatcctgtgtgaggacccggagcacaatgcgtacaacgatgtgacagagatcgtgaagcggcagcgattcgacacgccgttcggaagctatgcggacgggtggatcgatgagaacgcaaagatcgttctgacaaacggggagagcagcaagctgaccttgaaatgctattaccccggcaaacttacaggcggcgagacctgtaagatcaaggtgaacggacggcagatggatgaccttgtatttacggacaatacgatgtactacgaaatcccagccgcaccgtatcagagatttacgctggagttttcgtgcaacttttatgtgaaaggtgcgcgggaacaccgcggggaagaaaatctggcaatggtcgtgaaggtagtcgaccagtaatcagccgcggcagcagctgcgcgatatccgagggaaccgcttatctgaaggtttcacgaaaaaagtgcagcggctgccggacatgatgatgcatggctgttacggagaaaaaaggagaatcagaaaatgaatggacagcagttggctcccatgaccgtgggatttgccattgcagtggtcctgatcctcgtgatcggatttttccggagaaagaggaacatgatcgcccatcttgctcccgtaaagcgggaattaaagaaggaaaagcaatggctgcggcgcggggagtataatgcggcaatggtaaaaggccgccagaatctggaattgttcttaaagcttgtggcagagtttaacgggatcgagcttgataattccgcccaggcgatggcgaatgcccggagcagttcagatggaagaggacagcgcgagacttaccggatgaacggaagaaagcgccagagagtcatgacattccagcaatttggatggtggctcgatgagaacgggtatctggaccgtgtcggaaagtgggaattaaatgagatccgcgtgatcggaaacaaagcggtacatgaaaattatgtttccaaggaagatgcctggaatcagtataactacatggaagatcttctgcggattgttgcggaccgccatgcgaaccgtcataaaaaacgggggccggagatcaaaaagagccagacaggacattatgggacaaatgtgagaaaaacatccggagcgcagacgaaagcacgcggtcagaatcagtcacagggacgcggacagtcaaaaggacatagccagaatcagactggacgaagccagtcaaagaacggtggacagggaaggccggaacgagatcaggcgaagagcggcgaaggaaaacatgagcacgttcagacgaaaagcaaccgtcagggacaggctcagaaacgcgaaaatggaaagcagtccaacacaaagcagtccgccgctaagaatggacagaatatcagaacgggtggaaatgcagaccgggatgcgaagggaaatagaaaagcggcagatcagccgatgtcgaaaaaggttccggaagagcggaaggtaaaaaatccacagaagaaagaatcgcaagtcgaagcgaacaaacttcagcagagcaggattgtgaagaccgaagcgaacaagcctcagccaggcaaagaagtgaaaacggaaacaaataaacgtcagcagaatgagaaagctgaggctgctgtgagtatcaaagtacagacagctggaaagtcagaagagagaaagccgagatccatcgtgacagtgcagccggtacagccggtgaccccagcggaaaagactgcaggaaaaccgcttccgttgatgccgttggagaaaaaaacagaggatgtacagcaggagaagttaagctcttccgcaaagagacgccagagaagaaagcgggcacaggcggcaagagaggcagccgggacgtctggaatgaatcgtgagtcccgtgagactgtgggaacgcagacaaagcctgtcaggcagacagaatcccgtccggctcgtcaggaagggaacaggacagaacgcagaccccgtcaggccgcaccggcgacatccatgaggatcgtgacactcagccagccggtgagcggacgtacagcagctgatcagatcatgaacgaaagtacaagatcagcagtatcaaaagcggataaacaaccgcagacggaaacacagaagacacagagtgagaacacggcgaaacaggcggcaagatgccgcagaccgagaagaagaccggcagcgaagaccgcagcaggcggaggagatcatgaagaataagaaaagttatatctacatcggacttccgatccttgggattctcttttatctggcatatttaaaacgatccgccatcgacatggtgtattccgactatatccggctgatcaattcctatctgccggacgtctggaatccggataagttctttgttgcggatcttctcacgagaattccggtaaactttttagaacgcggtctgaatgtgatgatcttcggctacagcgttaccgtggaccgcgtgatgggcgttctcggattcgggctttccgcactggtgatcggctggtacagcaggaaaaaagaactctgtccggtctggtatgcggctatgatgatcgtcatgttcagtctgaataaatgggagatgctgtacaacggaaccggatgggcgcatttcctggcatttggattgttcttctggaattatgcgctgcttgaccgggtatatgaaaaaggcttcaggaatgcaaagcggtcggagctggtattgctctttgtgctgcctttcgtgatcacgatcggggcagcaggtccgtactgcgcgatctatacggtgacgatcgtactcgcatatctttttatctatgtgcgggatgtcgtgtgtttaagacagaccggcaaacagtcagatcagaagaacagagcagaaacaggaaatgaagcaagttggaaaaaagataacggaatcatcgctgtaatatctccgaaacgttccgggatcggaacggcccgcatgatcgccctgatcgcggcagcagtcatcccgttcctcatctatctctggagcaattcccaggcggtgtatgagtattcgggtgcggtgaatgtgccgctctttacggctttccgacaggatccgaaattttttattaaatttctgcttaagtcttttgcttccatggtttttggagtagaattgattgacaggaactttgcgggaattccggggaaagtatggtgtgcggtcggtgtgatcgtactgatttcatacttcttcgcactgtggatgaatttttattaccggatcgaggaaaagacgatcctgccgctgatgcttttggcgggcggcggcatgaaccatctgatggtgctcgtgagcagatatatctttatgccgaacgataaatatggaatgagctccagatacgcattgcagtaccagatcggtatcatcgggatcttcctgacgtttgccctggcggcaaagtgcggattttgcaggaaaaaagccacactggccatgcctgtaaagactgtatctatcgctctcgcagccatgttcctcattggaaacgtgatgacgacgactgaggagttccgcttcggaaaataccggaaagaacataaccgggatgaagtaaaacagatcttattaaattttgaaaatgagtcagacaacacactggaggatgcgctggaatatcacaaaccgggatgccggtcagcgcttacgatcctgaaagaaaacggttggaatatatggaggtagacctatgaaagtagttatcctggcaggaggattcggaacaaggatcagcgaggagagccatttaaaaccaaagccaatgatcgagatcggtgagaagccgatcctctggcatatcatgaaatattactcccagttcggatacaatgagtttatcatttgcctgggatataagcagtatgtggtaaaggaattctttgcagactatttccttcacacatccgacgtgaccttcgatctcgcaaacaacagcatgaaggtccacaacaattactccgagccctggaaggtgaccctgatcgatacaggattaaataccatgaccggcggacgtgtaaagcgcatcagagactatgtcggaaatgagccgttcatgctgacctacggtgacggtcttgcgaatatcgacctgaaagcgctcgaagagttccacagaagccacggaaagatcgcaacgatcacagccgtcaatatcggacagcgtttcggcgtccttgacctcgaggagaacggaaagatcaattccttccgcgagaagaatgatgacgacggaagtctgatcaacggcggatacatggtcatgaacccgggcgtattcgactacatcgagggcgattccaccgtattcgagcaggaaccgttaagaaatcttgcaaaggacggcgagctgatggcataccgccatgagggattctggaagtgcatggatacccagcgtgagaaacagcagttagaggcgatgtggcagtccggaaacgcgccctggaagatctgggaataaggaaataaagatccgtaattggagaagatgagatgaatttaaaagaagtttttgacttttataaaggaaaaaatgtcctggtgacgggacacaccggttttaagggaacatggctttccaggatcctggtaaatgctggagcaaacgtcacaggatattctttaaatccgccgacagatccggcgttatttgacatggccggtcttgatggaaagatgaattccgtcatcggggacatccgggacctcgtccatttaaaacaggtatttgaggagacaaatccggagatcgtcctgcatctggctgcacagccgatcgtaagggattcctacaaggatccggtctacacctatgagacgaatgtcatgggcactgtcaatattttagagtgcgtccgcctgaacccgtgtgtaaagtcattcctgaacgtgacaacggataaggtgtatgagaacagggagtgggagtacggctaccgcgaggtggaccgcctggacggctatgatccgtattccaacagcaaatcgtgctccgagcttgtgacacacagctataaaaagtccttctttgcggacggacactgtgcgatctcgacctgccgtgccggaaatgtgatcggcggaggagactttgcgaatgaccggatcgttccggactgtgtccgcgcagcgatggcgaagaagccgatcatcgtccgcaatccgcattccacccgcccgtatcagcatgttttagagccgttagcggcatatctgatggtcgcaaaggcgcagtatgaggacgggaaatatgccggttactacaatgtgggaccggatgacaaggactgtgtgacgaccggtgagcttgtggacatgttctgcaatgcctggggaaacggactttcctgggagaataagagcgacggaggtccccatgaggcgaacttcttaaagctcgactgttcgaagttaaagactacattcggctggcacccgcgttacggcgtgaaggaagcgatcggactcacggtggagtggtgccaggagtatgagaagaacggcgatgttgtcgctgtgatggacagacagatcgcggagatgtttcagtagaggaatagacaggaaaggaaaaattatgtttgagaataagacagaaacagaggcaagaaaagagatccttgacctcgtagctgaatatgccgataaattccataaccagaaaaaggagttccatgagggagaccgcatcccgtatgcgtcccgcgtgtacgacagcaaagagatggtaaaccttgtggacagttccctggagttctggctcacatccggacgctacacggatgagttcgagaagaagcttgcggagtacctccatgtgcgctactgtgctcttgtaaactctggctcttccgcaaacctggtagcattcatgaccctgacctccccgctgctcggcgaccgccgcgtaaagcgcggagacgagatcatcactgttgcggcaggtttcccgacgaccgttaccccggcgatccagtacggcgctgttccggtcttcgttgacgtgacgatcccgcagtacaacatcgatgttacaaagctcgaggaagcactttccgagaagacaaaggcagtcatgattgcccatacactcggaaatccgttcgaccttgcggcagtcaaagcgttctgcgagaagcacaacttatggctcatcgaggacaactgtgatgcactgggatccagatatacgatcaacggcgaggagaaattcaccggaacggtcggcgatatcggaacttccagcttctacccgccgcaccacatgacgatgggcgagggcggagctgtctatacggacaacccgctgttaaataagatcatccgctctttccgcgactggggccgcgactgcgtctgcccgtccggacatgacaatatgtgcggacatcgtttcgacagacagtacggagaacttccgctcggctatgaccacaaatatgtatactcccatttcggctataacctgaaagcgacagaccttcaggcagcgatcggctgcgcgcagatcgagaaattcccgaccttcgtggagcgcagaagacacaactttgaccgtctgagagccgctcttgcggagacggaagaccgcctgatcctcccggttccggcggagaactccagaccgagctggtttggtttcctgatcacatgcaagaagggaacagaccggaataaacttgtccagtacatcgagagcaaagtcatccaaacgagaatgctgttcgccggaaacctgatcaaacatccgtgcttcgatgaaatgagagcggagaaaaagggctaccgagttgtcggcacactcgaaaataccgaccggatcatgagcgataccttctgggtaggcgtttatccgggaatgacagacgaaaagatcgactatatggcgaaagtgatcaaagaggggctgttacagtgagtgaagaaaaatcctttgacctgacgaaagtccatgaggtcaatttaaaacttttaaaggagatcgaccggatctgcagaaagtataagatcaaatatgctctggactccggtacactccttggcgcagtccgccacggcggatttatcccgtgggatgacgatgtggatgtcatgttcacgagaaagaactatgagatgttcgcgaaggtcgtaagacgggaactgccggaggacatgtccttcgtggagccgaatgaataccatggaggaaaggcattctacgactttatctcccgagtgacgtacaacaagagccagaaattcgaggactccggaaagatggagttttatgacgacaagatcagccgcctgaatgtggatttgttcatcgtggacggactcccggcaggaaagatcgcaaagaagctcacaaagctctcccactgcgttctctacggattcgctctgggacaccgctatgagatcgattacagcgactataagggcgttatgaagctctttgtggcggtccttgccaatatcggaaagctgatcccattcccggtgatctggaagctctggagtgctctgtgccgctttgacagcagaaaagagcgcccgctgtatttctacacgggttatgcgccaaactggttctatgtggaaatgaagcgcgagtgggacgacgaggttgtcgagatgccgtttgaggacacgaagttctatgtgccgtccggctgggacgaacttctgacacagctctacggcgattacatgaaacttccgccgaaggaaaaacagattccggaacattccgatatggagatcaagatttatgactaaactgctttcggtcgttgtatcggtatacaacgaggagctggcgcttcgtgaattttacgcggagacggggaagatcttaaaaacgctgccggcggactgggactacgagttcctgttcgtgaacgacggcagcagggatcagtccctttcgatcctccgggagttcgcggcgtcggacgaaaaagtgaagatcgtcaacttttccaggaacttcgggcatgaggcagcgatgatcgcgggactggactatgcgggcggtgacggtatcgtctgcatggacgcggacctgcagcatccgccggaatgcctgccggagatcgtggaaaagtttgatgagggatacgaagtgatcagcatggtgcgcacgaaaaataagacggcgggttttgtaaagaactttacatccgcagcgttctacaagctgatcaaccacctctcagacgtgaagtttgaggccaatgcctcagactttttcgcagtgagcaaaaatgcggcggaggtcctccggaacaactaccgggagaaggtccgcttcctgcgcggctatgtgcagagcatcggattcgagaagacgacgatcgagtacgaggcgagaccgcggtttgcgggggagagcaagtacagcatcaaaagtctgtttaagttttccatcaacacgatcctctgtttttcggacctgccgttaaaactcgggatctattccggtgtgatcacggcgtttttcggcctgatcatggtgatctatacggtctatacctgggaactgtacggggcgccgaacggttatgcgacgatcgttgtcttgatctcgttcatgttttccgtgctgtttgtgatcgtcgggatcatcggtgagtatatcgcgatcctgtttgccgagatcaaggaccgtccggtctatatcgtgagagatactgctaatttcgggaaaaaacgaaaacaggatacggttggacaggaccttcagtgaaaaaaaggagattttctcggcctgacaggcgaaaaagccccggaaacactggaaaaacattacaaaatcatgaataatttgtgtaaatttgagaaaaggacttcaaaaataaaaaggaatcgtatataatacgtgagtatgccgatttcccgggggattctgtacagcaggatgagagaccccgttgaattcagaggaggaattttattatgaaattattaaagagaatggctgtgctgtctttagtagttcttgcccttggcggatgtacaaagagcagcatttcaacagatgcaccggtgtccggaagtgaagagatcgatccggcaaagacagaggcagatgacgacgatgagacactgccgagagaccagaatttccttgtagaggacgagacagtcgagacaacaatgtacgactgggagcaggcacagagcgagtgcgacggactgttcaacgatacaactgcattcccgcagtctgtaaagatggagttcacttatgatgagtccgctttaaatatcggtctcacatggacagttaagaacgatacaacaaacgatgacgcgatggattacgccgtaactatggtaaaacagttcaacgacatcatcgcagcacagagcatggatctcgagaactccagcgctgattccttcggaacactctggaaccagttctcccttgacgtgaaagtcgttactgagggaggaaagacactcgtagataagagctacaaagccggcgagaagatcgacctcaagagcagtgagtccgcagcagcaggtccggaggacgttgccgacgattcaccgaagaagcttgacgagacaaaggctgcaaaataattgaccaaataattgaaataattacgaaaaggtaatcaatttagaatcagaagacggaggaatgttttctcacaaagtcggggaaaacattctgccgttttttatttacacgaacaacgcgccaaggtccgcgcttgcgcgagactttggcgactgtcgcgataacaaggggaaattcgcgaagcgtgttttcgcttgtttaagacatgaaaaaatgacaaagcgccgaagttctcatcatgggaacagatacggcgcttttggtgtgtttgtacatttattttgcacactgctttacaaaatactcgaacatcggaagagagtccacgcactccttcgggttcgtgaccggaccggtcatgcgctccggatgccactgtacggaccagatcggaagagattcatgctggatcgcttctgcgaaggtgtgaccgttggattcgccccatgcgatcgcctggaagccgtcgccgagtttgtcgagtgcctggtggtggtagctgtttacttccatggactctccgtagaggtttccgagaatggaatcactcttgatgcgcaccggatggcagactcccttggagtggtcgccgccgagctgagtcgggatatcctgggtgagtgtgccgccgaagtatacgtttaagatctggattccacggcagatgccccagattggttttttgcggtccacgaacgctttgatgatcttgtattcgaggtcatcgcgctgcggatctgtgataacgaagtcaaacattttctcctggccatagagctttggctcaacgtccttgccgccgcttaagagaagaccgtcagcaagatccgcatactcctcagcgcagtcattgttgacagcgaggatcgggataccgcctgcgcggcggatattctccgcatagttctggtttaatgcccatgtcggtgttccgttggctgctgcaccggttccaccggtcagtaagatcaatggtttcataatctaaccctccttttttcgtattgcccgcctgcctgcccccctgcaatgaagatttccgggaatatccggctgtttcatatacagacaggtcggaaatttgctctcccgcagttgtaaaaagttctgacagtcgcgagaaatatgatatccgggtcaaagaagtctggtcccggtatcatgagtatatgataattctgccggtttggacagagatcatccgcatgtatcataaaaattcatatcatcacgtccgctcagagccgccgtgggtatttcggattatccgacgtcgagtccgctgtggtacgaatagtttccgagctccgcgaggagcgcagatatatccggcggtccggcggggacattcgcgatcaggaatgcattcaggtagtagtagaccgcattgcatttctttaaggtctgctggtacagatccgggaaagacgctgtggaggcgatggagtgatcccatggattcgtccagacttcatgatccaggttcaggatctcatggacctttgcggagagcttatcggtcaccagctttttggatgcgatcggatgctttaaaaagatggattccatggatccgatcagatgcgtcttgtgacccgcgggatcggacaggatccggcttccgaagcggatcgcaaagatggaccgggcaaccattccctccgtcacctgaaaattgttcttttctgtgatctggtagtaggtgcggttgatgcacctgctcaggtatcttgagacaaactggctttcctgtgtgttcagacagagagaagcggcctgattgaattcagacggctttttgtgtttgaacttccacaacaggatcgcgtcgatatcattctcgagcgcggcatggagtccatgacattcggactttttcttatcggtccggaactggatccttccgtagacgaacgggtgacagatcgaatcggcgatatagtggcacatgaacccggcgagaaacgccgctgcctcctctttctgctgtcttgagcggatctcagagagttcaagaagactgttcttaaaaaagtcgttcacctgatactcgtgcatatgggagccgacattgcggtagtctctgtgacggaggatcgggacattatagaaaaagatatccggtccctggagtccaagctggtacagccagcggtatttggatatcacatgttttaaataattgttcgggaggtcattgtaggctttcacaccaaacagatagtgggtcgtaaatcccggcacagggatcatctcctttgaaagaaaatgccaaggtctcacgccagcgcggactttggctcgttgcctgtgtataaatgctgccaacggcagatactacagttattatatcatacctgtgttaaaatgggaataaaacgtagagagaaactgagaatggcgtgtgatgggaatgggagcagggaaacgtcatatcgtcggggacggagctttgagatgaacatgatcgggaaaattcatgggatcgtctggggaccgtggacgccggtcctgtttttgatggtgggctttgtatacagtgtgcggatccggttctttcagattaggaagatcccggactggtggaatgcgacgatcgggaatcttttgcatgacaggagtgagcacaggggatcattccggtcggcatgtacggcgctggcggccacgatcgggaccgggaatatcacaggagtcgcggcggctgtgatcgcgggcgggcctggtgccgtgttctggatgtgggtctccgcgttccttggaatggcgacagcctacggggagacagtcctggggatccggtacagggaaaaaggtcgggacggcggctggatcgcggggccgatgatgtatctggaaaaacggctgggatgtttatgggcggcagttctgtacggatcgttctgcattccggcggcattcgggatgggcagcatggtgcaggccaacgcgatcgcggagaccgtatcctatgtgtacgggatcccggaggcggcggtgggcgtgatcgttgtgactctcgccgggagtgtgctggcgggcggcggaaagcggatctttctcgcggcggagcggcttgtcccattgtccgccgggatctacacggcagcagcgctggcggtgatcgttttgtatgcaggacgtattccgggagtctttttggcgatcatggcggatgctttttcgttccgcagtgcagtgggcgggatcgcggggtacgggatctcgcaatgtgtcagctacgggatcgcgcggggcgtgttctcaaatgaagccggactcggaagtcttgcggtcttaaacggaagtgcggagacggcggcggaggagatccaggggcagtgggcgatctttgaggtgttttttgatacgatcgtgagctgcacactgacggcgctcgtgatcctctgtgtggcgggcagaggggcggcttcggagtctggcgcggaaaacggggcgtcgctcacgagtctctgcttctttacggcgcttggaagtccgggcaggtatctggtggcagtctgtgtggtcctgtttgcattttccacgatcatcgcctggtattatatggggcggcaggcggcggagtatcttggagggaagatatcgggcaggattccggcaatttatacggcgggatatcttctggcggcgtttctggggtgccttggggcgatggagacggtgtggcaggtggcagatatctttaacgggctcatggcggtgccaaatctggcggcgctggttttgcttgttggggagatcgatgcgccgggagagaaggagcgggatacgggaaagcgtgagacggcggaataaataccgtggtcggccgtggggcgcagcgggaggagatgctttgggtgaaaataagggatttcaggtgttcatatcttgttcaaaaagttttcaaatttcttttacacaattcacacgatttcttcatgttttatggatatcatataaccataaacagaaagacatctgatacagatgctgcttataagatttttttcataatactcgagctgataagtgattatcagctctcctccctttttcaaataatcattttgtagaagaaaagcactcggcggggtgctttttttcgtgtgtcggcaaatcttgaaaacagacagacagtcctgtactgccgtgtcagattccgtaaaaatatccgctgcgggttcacataaaactgtaagagaaaagataagattccttcatgtttttctgatatactcctttatataagataacgcaggcagctgcggcttcctgcgtgagcggcaggaaagccgccggaaggtgatctaaaccggcggacgtttggagaagaggaggaatcagtatgaaaaaaagaatgttgacagcgatcggattatcagccatgatagcagtttctcttgcgggatgcagtacgagtgtatcggtgccggatacggtgagagttgagaacgtgggagacagcgcggacggaaagataacgatggacggcagcgagaccgtgaagatcgtcccggacatggcaaagatcgtgttcgcggtgacgagtgaggcaaagaaggcggatgagtgccagcagaagaatacggaagctctgaactctctgactgaatatctgaaaggacaggggatcgacgaaaaatcgatcacgacatccgggtacagcctgaatccgcggtatgactggagctccgatacaagaaaactcatcggatatgagatgcagacggaagtgactgtctccgacgtgacggtggagcaggttgggacgctgctttctggcggagtcaacgccggtgcaaatgagatttattccgtatcctactattccagcggatatgatgatgcgtatgcggaagcgttaaagaaagcggtcgagctggcgagaacaaaagcacaggcgctcgcagaggccagcggacggacactcggagatgtggtcagcatcgaggaatattcggacaaccagtacggcagatacatagacggcggcgtgaacctgcagaaagaaagtgtgtcgatggcagcaggagcagagaatacggttgaggacatgaacgtgatgccgggagagatggaagttgatgcgaatatcaagatcgtgttctccatggttgattaagaagtagggtattggtgagggtacgcggtgagcatccgatcaggagcactcggtaattcaggaaagcttccgctaagcctccgtgtgactgctaaaggccgcgggctaagaggaaccagatccctgaattaaggcgctcctgctcggagtctcaccgctgctgtatggcatagagataaaatgttgccatgaaaaattgtggacatccggggccatgccctgtataatatagggtaatcggcagctggaagattcctggacggctgcagcaaaaaaagaatgaagacgcagccagcggaagaagaaaatctgttttctgagccagcggtcgtgtctgaggaaaaaggagaaagacaatggcagaaaagaaaaatccggtcattaccatcgaaatgacaaacggcgatatcatcaaagctgagctttacccggacgttgctccgaatacggtaaataactttttaagtcttgtaaataagggattctataacggactgatcttccaccgcgtgatcaaaggcttcatgatccagggcggatgcccggacggcaacggaatgggcggcccgggatactgcatcaagggagagttctcccacaacggtttccagaatgatctggcacataccgagggcgttctctctatggcccgcgcgatgaacccgaactccgcaggttcccagttcttcatcatgcacaaggatgctccgtacttaaacggtgagtatgcggcattcggtcaggttatcgacggtatggacatcgtcaacaagatcgctgaggtccgcaccgattacagcgaccgcccgatgaaggaacagaaaatcaaatccatcacagcagagaccttcggcgtagagtatccggaaccggagaagtgctgataaaaaaggagtgaggccatgcaggagatccgttacgcaatggtagacggtgaaaaagttcctgttctgatctcagatgaaaacgaggctctccaggcggcgaaagctgcaaggagagccattgttggattatggagagaagacgggaaggaaaatgaatggtgtgcggacacattgatcacagatgtcgaggatgcagatgaagagtttctggagcggatcgcaaggcgccatctgggactgccctggacgatctgtgagacggagcggctcattctccgtgagatcgcggagcgcgactatgaggagatcgtgaaaaatcatgtcgatgacggtctggatacggcggagaagatcgccggatacacgaagcgccactacgaagtgtttgagtttggattctgggcggtcgaggaaaaaaagagcggaaacctcgccggtgttgtgggattccggatcccgcaggatgatgcggccggggatgtggaagactggcttttgtcttttgacgatgaaaatatcctggatgacacgctggaactcggataccatatctttccggaatatcggagacaggggtatgcgaaagaggcatgtctggcggctgttgaatatgcgaaagaggaattcggaacagttcagtttctcgcacggatcgaaaaggataatatcgtgtcgaagaaggtggcggagagacttggattcgtgagggcggcgtgaggaaccacgcctgcgatcgaggcatgctgcggatgagccggggcggcaaattccgaatgaaatggcaggcgccgttcctgccgatcgtgaattcgaaatatagcggcaaataggaaaaaaagtcatttatttcgctcagatttctcttgtcaaatggtgtcataatcgtgtatattaaacattgtatacaaacaacataaatacaatgtgtaagcctgtttcggcaggaatttgatccgaatggcgcctttttgcgatgaatggagcgtaagcgaagatctgcgagcgtgagaggcggcatgatccggatcacacacatggaaaatagaaggtgacaagatgaaagaccatttagagctgaaagcctacgcaaagatcaaccttgggctggatgtggtccggaagagagaggacggttatcacgaagtccgcatgatcatgcagaccgtgaatctgtatgaccggatcgacatggaccggacggaggacggcgtgatcaagacggagacgaaccttccgttcgtgccggacggggaaggaaaccttgcgtggcgcgcggcaaagcttcttttagatgaggcagggatcaaagacggcgtgaccatcaggatccgcaaatatatcccggtggcggcgggcatggccggcggaagtaccgatgcggcagctgttttagtcggcgtgaaccggatgtttgatctcggatttacgaagaaggaactcatggagcggggcgtaaagctcggtgcggatgtcccgtactgcgtcatgcgcggaacggcgctttccgaggggatcggcgagatcttaacggagctcccgccatccccgaagtgccatctcgtgatcgcaaagccgcagatctccgtctcgacgaaagctgtgtacggaaaactgcgggtaaatgagcttgcaccggaggaacatccggatatcgacggaatgactgaggcgatcagaaacggcgaccttgacggcgtgatcagccgtcttggaaatgtcctcgagactgtgacgatcccggatcacccggagatcgcaaggatcaagagtatgatgatggagaacggcgcctgcggttccctgatgagcggcagcggccctaccgtgttcggtatctataaggacagggaactcgcggaaaagacctgccaggcgcttaaagaggcggatgacgggcgtctgacccgccaggtgtacctgactgaattctacaaccggaagaaagccagatagaggagtaaagacacgatgacaaatcattttgaagtaaatatggatgaatatctgccgctcagggatgtcgtattcaagaccctgcgtcaggcaatcttaaaaggagaactggaaccgggcgagcgcctgatggagatccagcttgcggagcggcttggcgtgagccgtaccccgatccgtgaggcgatccggaaactggagctggaaggtctggtcctcatgatcccgagaaagggagcggaggttgcaaagatctccgagagcaatcttcgggatgtcctggaggtgcgccgttccttagaggagcttgcgatcgatctcgcatgccagaggatcaccgaggaagagcttgatgagttaaacaaagcggaagttgactttaaggctgcgatcgagaacggagatgcgatgcagatcgcccagacagatgagagcttccatgagatcatctacaacagcacgaagaatcagaagctggtgcagatcttaaataacctgagagagcagatgtaccgctaccgcctggagtatatcaaggatgcggacaagcgccagatcctcatggtggagcatgaacacattttaaaggcactgacactgcgccatatccaggaggcgaagatggctgtgcgggaacacatcgataatcaggagatcacgattctcaagaatctgaaggagcaggaaaatgacattcaaagaaaagtaccaggcaggagaaattgaatttgaagcgatcgacgactatgtcgatgagtggaacaacagtgacgatgagcggactctggcgaaattcctcggtctcaacgcggacgaagaggacgcgtggatcgatgatggggatgaggctctgaaggagatgctggacgcaggaaagcagtaggcagctgcgtgaagcatgaaataatgctttttgacggtattttgcctgctgtgaggcggacagtattataatctggaatatcatttgcccgcagttcagaaatggttatttttcacgggtaggaattttctgaactgaaaattccgtatgataccgttatggccgcggattttgccgatttggaatgcgaagcatcggcaaaatcctgttacagtgcgcgggcatggagtgcccgtgtactgtaacataaattgtaaaaacttcctcttagttttcagaaaaaagtaaggaaaaaagggtcgaaatatggtaggatgatactagggtcaaaaggacgaaaatccgatgcaagcttgcttgcaagaggatttccgaccttgggacccgccaaaaacatgaataagcagccatttttcgtagaaaaatgtgcggattatgaatgttttcgagtattgtgagagcacgaagtgcggaacaatacggtatcataagaaacctaaaaaggaggacaaatcatggaacagatcgcaatccttgttgtggatgatgagaaagagatcgcggaccttgtggagatctacctggtcagcgatggatataaagtatttaaggcaaacaatgcgaaagagggactggagatcctggaaaaggaggagatccatctggtgctcctggacatcatgatgccgggaatggacggactcgagatgtgcagaaagatccgggagacgaacaacatcccgatcatcatgctgagtgcgaaatcaacggatcttgacaagatcctgggacttgggaccggcgcggatgactatgtggtaaaaccgttcaatccgcttgaactcacggcccgcgtgaaatcccagctccgccgttatacccagttaaacccgaacagcaataccggaaaggcggcaaagaacgagatcacgatccgcggactctcgatcaacaaagacaaccacaaggtcatcgtgtacggggaggagatcaagctgactccgatcgagttcgatatcctgtaccttctcgcgtcgaatccgggccgcgtgttcagcacggatgaaatctttgagaaggtgtggaacgaaaaagtatacgaggcaaacaataccgtcatggtacatatccggagactgcgcggaaagatgaaagaagacacgagacaggataagatcatcacgacggtctggggggtaggatacaaaattgaaaagtgactggagcagaaacttttacacgcagatcgcggtcaatatcttttacagcgctctgatcgcatgtctggtggacgcgttcctgatcatgaatatcaaccttctgctggcatatctggaccagaccaggtacgcgaatatgatgatcttccagatcttccggatggggacgatcacgacgatcctctatgtcctcatcgggatcggagtcttttccctcacgcttctgctgcttgagagaaagacgatgaaatacatcggaaagatcgcgatggcgatccagaacatctccgaaggcgatctgaatacccagatcgaggtcgtgggagacgatgaattctctgcaatggcatccaatctgaacaggatggaagcagatatccggaagcttatggataaggagcgcgaatcggagcggacgaagaatgagctgatcacgaacgtcgcccatgaccttcggacaccgcttacgtccatcatcggctatctggagcttctctcctccggaccggcgatcagccaggagatgcagaaaaagtatatcgatatcgcctatgtgaaggcaaaacgcctggaaaaactgatcgaagatctcttcggctttacgaagatgaactacggcaggatttccatgaacgtcggaaaagtggacatcgttaagcttctcgggcagcttttggaggaattttatccgagttttatggataaggacctgacttacgagttaaagagcaatgtcccgtcccaggtgatcacggcggacggaaatctcctcgcgagactttttgacaacctgatcaacaacgcgatcaaatacggggccgagggaaagaaagtcctggtccaggtgctcgcgaaggacgataccgtcacggtgtccgtcacgaactacggctatgtgatcccggcggaggagctgccgctgatcttcaataaattttaccgcgtggagcagtcccgctcatcaaagaccggaggaaccggtctgggactcgccattgcaaagagcatcgtggacatgcatggcggaacgatcagcgtgaccagtgacttgaacggaacggtgttcaccgtaaagctgaaggtggattttgatgtgaataaggaaaattttgcaggcaatgcttcacgctaggaatatcaggggaaatatatgaatcagacgaaaaaatatctgctttttgggtgcatggctgccgtccttgtgacggcgggcagctttcccgcttttgccgggaattcggaactctacggagtcagcctggatcaggaagaacaggcgaaagctccggtcgctctggacatcacggccgtgtatgggaagacggccaggctcgggagttttgtcccgttaaagatccgcctctacggccagtcggagagtgcgtttcaggggactcttaccgtgtcgacgctggagagcgacaacaacgggacggcggaaccgtatgaatattcctggtcggtcgaggtttcgcctgcggagacaaagaacatggagctctacgtcccgctgggacagaaaaacggcaggatctatctgacattaaaagacgcgaaaaacaggaccatgggggaaacctccatggattttgacgtttcaaaggaagagagccgtctccttgcgggagttatcgaaaacagaccgggaaacttaaactggctcgacggagtcggtttgaattacgggatggtccagtcgaaaacggtcgagatcgcgaaggaggactttccggatgacccgagaggactttcgatgttcgacctgctcattgtaaacgggatcgactgcgggactcttgaccaggcacagaaagaggccgtggcggactgggtgagcgacggtggtaccctgatcctcggaaccggaaaaaatggtgggaaaacactggaactcctgagtgaaatgcagacggatatcacgctggaggacgcgaagaccgtgtggatcggaatgggaaccgagtacgcggatcagaatccggcagaatctgaggtgcgcttaaactatgcgcaggcggagattccgggtgcttcggaccggatggtcacagacgggacctcgctcttaaagatcatgagctgcggaaacggacggatcggtgttctggggatcgatctttcggagatcaccggcttcgtgaaacgaaatccttcctacgcggcctggtttctcggggaggtgttccgggagaaagaactgaacaagatctattactattcctatggccgggatgccgactactggaatgcccagaatcttgtgagcggaggaaatgcgaagcggcttccgaaccttgtcctctatggctttgtgatctttggatatctggtcatcgcggggccgggtctctatctgatgctgaaaagaaaaggactgaacaggtattacggcggttctttgcttgtcttttcggcagcagcctgcgttgtgatttgggcgatgggaggaaagacgagattcacgagtgagttctgtacaagtgcgacgatcctggatgcggagaacgataccgtccgtgagaagacattcttaaatatccggacgccggacagcagcggattttccgtgaagctcacgccggactaccgggtctccccgctgacaaggagcggacggtatgatacggtccgcgtggagaactttgaaaagaacattcaggctgcaatcgggatccggaaagaggcggatgacaccgtgatcttcagcagaagatcaaaagcgtttgactcccggtattttcttctggaacgggagacagagatgcagggcaaaacggatgccagtctcacggtatcgggcggaaagatcagcggttatgttgagaatcatctgcctgtgaagctggaaaatgcggcggtctatctctacggacaggtcgtgatcctgggcgatctggagccgggacagaggatcgaactggagaatgagaatcttctggtatggccggtcggaatgacatggctgctcgcgaatcgggtctgcggctatccggaccgcgcggacgattcgaacgaggagtacatggaaaatattcagaaatccggtctcggaggatattttgcggatcattattattccagatataacccggaagtccgactcggcggctttattccgtcatcctacgcgggatcggccggaatccctgctgacgaccaggacggaaagacgttctatacggaaccggtgagttgtcagatgggaaaggacggggagatctaccgctgtggtcagatggcggagccgtctgtgagtaccggaatgggcgtcagttacggaaatgccatgctcctgtacggaacggatccggtgatcgtggaatatgatccgggaacggatattcagatcgggacatattccttcctgcctgtttcggagcagtttttcgaggatgcgagatattcctatatcggccgcttttccggagaagcgtcattttataatgagaagacgggaacctacgatctggtcgatatccggaaacaggattttacgagggaggaactgagcgattacattgccgcggacggaaagatcacggtccgctattccggcgggaatgacgcggaaaatggaaccagtcaggcacttccgctcctgatggtcacggggagggaaaactgatgctgaagatacagggactgaaaaagaaatttggcaattttgaggcgctctccggactcgacatggaggttgcggagggggcgctttacggctttgtcggaccgaatggagccggaaagaccacagcgatccgcatcatcacgggactcctgaatgcggatgaaggctctgtcctgatcgacggaaaagacgcgttctgctaccgggaccaggtgaaggacctgtttggatatgttccggatgaatttggtctgtatgacaatctgaaagtctgggaatacatggacttttttgcctcctgttacgggctttccggcctggtggcgagagagcggtgtacaaacctcctggaacaggtaaagcttgcggataaggaagactttttcgtggacagtctttcgcgcggaatgaagcagcggctctgtctggcccgcgcaatgatccacgatccgaagcttctgattctggacgagccgacctccgggatggatccgagagcgcgcgtggaattcaaggagctcttgaaggagctgtgcgcggagggaaagacgatccttgtgagctcccacatcctctcggagttggcgcagatgtgtaccgatatcgggatcatcgatgccggaaagatcgttctgtccggaaacatgggggatatcttaaagcaggtcaatgattcgaacccgatccgtgtccaggttgtcgagaatgtccgggaggcggtacagtttctcagggcagagccggaggtccggacgatcacggtggaaggaaacgacctcgtcgtgggattccacggcggaaaggacgcggaggcgatgcttctcgcaaaactggtagcgcacaacatcgggatctgcggattctggagagaacagggggacctggagagcatcttcatgcagatcacggatcatgatatggaaaaggtggtgatgacgagtgaagaataatccggtctataagagggaaatgctggtccggtcgagaagtttccggatcccgctcatcatcatgatctttaacgggatcctggctctggtggcgctcctgaacatgtaccagagcatcgcgcaggtaaaggtgagcggatccgtcacctatgagaattttttacagctctacacattcgtggccgccctggagtttatgatgctgatgtttatcatgccggcgctgacgtcggccagcatcagcggggagcgggaacgccacacgctggagctgatgtttacgacaaagatccgtccgatcgacatcgtgatcgggaaactcgcgtcggcgttcacgcatctgatgatcctcgtgttctcgagtattccggtcctgatgctgaccttcatctatgggagcatcagttcgcaggatctcttcctgctgctgttcagctatgtgaccgttgcattgtactgcggaagtcttggaatcttcgcttcttcgttgatgaagcgctcgacattttcgaatgtcatcacctacgggatcatgctggtcctcgtggtggggacgtacatgctgaatgtgttcctgctgaggatctcggagacagagatcaatatgatggtgctgggggcgggggagacgatccctgagccgacttccggggcggccgtctatctgctgctcgcgaatccggcgatcacgttcgcgcagatcctggaaggccaggttgcgggaggcggaggaaactttacgatccggaactttctcggaagtcaggctgggaatctgatcacggatcactgggtcttctttagcctcatcctgcagcttgtcctgtcggcgattttcatatggggagccgtctttttcctgggaccggtgagaagacagaaaaaggctgatcttcagagtacccgctgagttactttttacgggcggaacagtcagagagaaaaaattcatgtggaggtaacaggaatgttttatatcggatgccatctctcctctgcgaaggggttcctcgcgatgggaaaggacgcggaaaagatcggagcgacgacgttccagtttttcacgagaaatccacggggcggaagtgcaaagccgctcgaccatgaggatatccaggcatttttaaaattaaaggaagagctggggatcggaacactggtggcccatgctccatatacattaaacggctgctcggcggacgaaaagatccgtgatttcgcgaagcggaccatggcggatgacctggagcgcatggaggcgatcccgggaaatctctacaatttccatcccggaagccatgtaaaacagggcgtggaagctgggatcacttatatcgcagaaatgttgaatgagatcctgcgtccggatctccacacgacggtactcctcgagacgatggccggaaaggggagcgaggtcgggagaagctttgaggagcttcgggaaattcttgacagagtcgaactttctgataagatgggagtatgcatggatacgtgtcatgtctgggatgccgggtatgacattgtaaatgatcttgacggcgtgctggcggagtttgaccggatcgtgggtctcgaccgtctgaaagcggtccatttgaacgacagcatgaatgtgcggggagccggaaaggaccgccacgcgcggatcggggaaggcgagatcggtgcggaggcgcttgtcagggtgatcaaccatccggcgctgcgcgatctgccgttctgtctggagactccgaatgagcttccgggatatgcagaagagatccgctttctgaaagaacacagacaataaaaaggagaacatgggatatgggtattttaaaggttggtgtcggcgcgttaaagagcgtgctggaagattcctggcgcgagtatttctactgtccggcgatggaaccggatgtccttgtcaaaaaaggggaaaacagaaagtcaaatagaagctataacacaaaaaacagtgacaacctgatctccaacggatccatcatcgcggtcaatgagggacagtgcatgatgatcgtggatcagggagcaatcgttgaggtctgcgcggaagccggagagtttgtgtacgatacctccgcggagccgagtattttctacggaaatctcggaaagagcatcggggacagctttaagcagttcggaaagcgtttcacgatgggcggtgacacggcgagagaccagagagtctacttctttaatacaaaggagatcgtcggaaacaagtacggcacggcgaatgcagtcccgttccgcgtggtggaccagaacatcggtctcgacatggatattgcgatccgctgccacggcgaatattcctaccggatggtggatccgatcctcttttataagaacatctgcggaaacatcgaggaagattatacgagagacaagattgattcccagcttcgcagcgagctcctgacagccctgcagccggcattcgcaaagatttccgggatgggagtccgctacagcgcacttccggggcatacggtggagcttgcaaatgtgctccgtgagatcctctccgacagctgggacgatgtttacgggatcacggtgagcaagatcggagtgagctccgtgaaagcctccgaggaagacgagaagatgatcaaggagctgcagagaaatgcaacattccgcaaccctggaatggcggcagcgcagctcgtaaatgcacaggcggaggcgatgcagagtgcggcgaaaaacacttcgaccggtccgatgatggcattcgccggaatgaacatggctgcacagaacggcggatttaatgcccagggactgtttgacatggcagctgcccagggacagcagggtgcttccaatatggctgcccaggctccgcagacatccggcggaccggcaaagatggcgccgttatccggctggacctgttcctgcggtcaggagggaaataccggaaacttctgctccaactgcggaaagaagaagccggaggagagcggttcctggacctgctcctgcggacaggtaaatacgggcaatttctgttcaaactgcggaaagaagcgcccggacgctgtctggacctgctcctgcggtcaggaaaataaaggaaacttctgtgcgaactgcggaaaaccgagaccataaaagaatcagctcccggattgtttcggaatgacagtccgggagttatgccagatacagggggaaaaagagatggcacttgtaagttataaatgccccaactgcggcggctcagtggtctttgatccgaaaaagcagaaattctgctgtgagttctgcatgtcggaatttacggaggaagagatgaaagccgcggctctgagttcaacagagaccagcggtgtgcaggatgggggtgatacctccgggacagcgggaacggagtcacaggcagaaagcggggttaatgcgaaagctggcaccgaaacaggtgcagatcaaatatccgatatggcacagagtggccgtgcaggcagcacagatcagaaagaggacgctctcgtctacatttgtccgagctgcggtgcggaggtcgtgacggatgccacgacagcggcgacgttctgctattactgccacaatccggtcgtcctctccggaaagctttccggggaattcctgccggactatgtgatcccgtttgcgatggataagaaacaggcgacggggatcttccttgactggatcaaaaagaaaaaatatatcccggatgactttttctcaaaaagtcagatcgagaagttctccggcgtgtatttcccgtacctgatgtacagctgcaaggtggacggaaagatccaggcggaaggtgaaaaacagcggacctgggttgcaggaaatatccggtatacggagcataaaaaataccggatggagcgcgcaggggaactcgatgtcagaaatgtgacgagaaatgccttaaagaaaaataacagcgcactcgtggaaggcgttctgccctttgatatggaaaagctgaaactgtttgatatgggatacctttcgggattccaggcggaaaagcgggatatggagaaagaagctctgacgccggaggtggagcaggaagtaaagcagtacacggtggaacagctgaaaaacgacgtgatgggacagtactccgcagtccgcgtggatcagagtgacacaaatatccgggacgcaaagtggcagtatgccctgctcccggtgtggatccttacatatagggataaggccagaaaagacgaactctattactttgcgatgaacgggcagacaggaaagatctgcggaaagcttccggtcgcaaaaggaaagcttgtgaaactgttcctggagatctttgtgccggttgcggcgatcctgatgatcggagggtggttcctgtgatgaaaatgaagtggataactgaaaagacggggaagaacagcgggaaaaataggggcattctgggagcggcaggaagatcgctgaaaattttcctggcagcaggcgtccttgggatcttcctctcgggaactgccttcgcagcgtccggtgaggacgcgtaccgcatggcggagggaacggaaaactatgccgatgtctacgatatggcggatctttttacggacgaagaagaacaacagctctccggacaggcgcagacgctttctgagaagatgaagatggaggcggtcatcgttacgacagaggaaaattctgactccgcacaggtgtttgcggacggattttacacggagggcggctttggaacaggctctgaccattcgggaatcctgttcctcatcgacatggacaaccgggagctctatatttccacgaccggacagatgatccggtacatgacggacagccggatcgaggacgtcctggatgatgtttacgggtatgcgtcggatgccgattattacggggcggcttcagcatttcttgcagatacggaaacgtgttatgcgaacgggatctcgaaagatcagtacaattatgacacggagacgggaaagatcagccgttaccatcatctggaatggtatgagatcctgtttgcgatcggcattgcggcagtctgcggcggcgcggcggtggcctctgtgctcagaagctacagtcttcacggggaagataagcggatggctgcgaactttaagctctcttatcggcgtgacagccggtttaccatgggaaatattctcgcggatgccctgctgacttcgtatattacgcagcaggtgatcgcatcacagaaaaataaccgtccgggcgccggaggaggaagtttttccggcggcggcaggtcatccacccacagttacggtggaaacagccacggcggcgggggaaggaagttttaaggaatggagatcaggacgatcgggatcatcggacagggcgcgctcggcgtcatgtacggaaatcatctgacaaagaagctcggaaatgagcatgtattttttatcgcggacgaaacgcgtgtggaacgataccgcaagacgggcatgagctgcaacggggagaaatgcggatttacataccgttccccggcggaggcagtgacggcagatctcatcatctttgccgtcaaatttatgggaatggagagtgcgatccggaccgtgaagccgtttgtcggggagaataccctgttcttgtcggtgctcaacgggatctccagcgaggggatgatcgaggaagtctacggggcggatcatgtgctctatgcctgcgttcagggaatggacgctggaaaggatgggagcgcggtcacttacaaaaatatgggctacatcaccatcggaaataaggataagagccgcgatgagaagttaaaagcggtgacggatctgtttgaccggaccggactttcctaccaggttccggacgatatcctgagggaacagtggaacaaactcatgttaaacaccggcgtcaaccaggtgacggcagtctacggcgcaccgtacagcctgatccagaaagagggagaggcgcggaccatgatgatcgaggccatgcgcgaggttctccgcgtggcggacactcaggatgtggatctttcggaggcggacatttcctactggctggaccttcttgcaaccctgaatccggatggacatacgtccatgtgccaggacgtgctcgcgggacggccgacggaggtggagctgtttgcggggacgatgttaaagatcgcggaggaagagggactttctcttccggtgaacgcgtttttgtatgagcggctgaaggagctggagacagctgaagattgaaagtaaggagcgctgcgggaacgctccggcaggtctttgtgcctgcagtgctgaaacatggcaggaaggtgaaagaaggagaaatacatgacgatcatggtaattgacggccagggcggaaagatgggaaaaggcctggtggaaatgttgaagaaaagctgcccggaggacgagatcctggcaatcgggacgaacagcatcgctacggcggcgatgttaaaggcgggggcggatgccggtgcgacgggagaaaacccggcggtcgtcacaagccgcacggcggacatcatcgtgggcccgatggggatcgttatcgcggactccctgatgggggagatcaccccgaagatggccgttgcgatcggccagagcccggcaaaaaaggttctgatcccggtgaaccgctgccagcattttgttgtgggctgcagggacgtttcgatgggagaatatgtaaagctcgcggtggaggaagttctgaagatccggcgcggggagctgtaaataagcgctgataaaaagacgaagacacctgatttttgatgatctgggtggcttcgtctttttttattgtatagtttttccatatcatccagagctttttctgtgattgttgccagcgtgtccactgcgcatattcttctgcctgtccgcatacactgatgtgtatgcaggcgcatcaggcgcgtgcgcgtaaaggtgacggaaggagtgtctgccatgggaaaaaagatgcatccgggatcgggagctgtgatcggagcgcagcttgtgatccttttgatcctgacggcttccctgtgtgtccagagcaggaaagcggcggcggagaatacatatgcgatcatggaggagagcggcggggaaaagaaagactatatccattgggtggaatttaccgtcccggcggaagtcatgcagaaagcattccgcctggacatgggaagtatccaggaggatgtccatctgaaatgggtggaactgcttgcatatctcggagcaaaatacggcggggatttcgagcggttccggcaggcagatctcgacgcggtgacggaaaaactgaagtccgggatgacgatggaggagctcacgaaggacatgaaatactatgcctattaccgggaggcatacggtgcagtcctcgacgggatggtcggatattttgagcaggagacggaggcgccggaagacctcacacagagcggaacgggtgaaaatggaaatgcgaagaccgtctggctcagaaaatacggtctgaaagcattctcaccgatcgcgaaaaacttcccgtacagtgatttcgacgatttcggtgcatcccgatcctacggattcaagagaaaacacctgggccatgacatgatggggcaggtggggacgccggtgatcgcggtggaatccggatatgtggaggcacttggctggaaccagtacggcggatggcggatcgggatccggagtttcgataaaaaacggtactattattacgcccatctgcgccagaattacccataccagtcaaatctcaaagagggcagtatcgtgacggcgggcgatgtgatcggatacctgggcaggaccggatacagcaccacggagaacaccaacaacatcacaacttcgcacctgcacttcgggatccagctcatcttcgatgaatcccagaaagagggaaacaacgagatctggattgactgctacgagatcgtgaagttcctgcggctgaatcagagcgagactgtgaaggtggacgggactaaagagtggacgagagtctacgggatgaaagatccggatgtaccgggagaagaggaaaattcagagagaggtcatggataaaatcttaagaatctccccataataatcagagtaataaggcactgcctgtcaaagatgtgtacttgcgcaaagttgagatattcgaaaacagccgcgcgagagatccggatgtgccggaacacaaaactaacagaaaacgaaagggtgagattcatgaaagatcaggtctttggtgtccttcagaggatcgggagatcgttcatgctgccgatcgcgctgcttccggcggcgggacttttgctcggcatcggcggttcgttctcaaatgtcacgatgctcgaggcatacgggctgacgaggatcatgggaccgggaaccttctggaacgcactgttcatggtcatgagccgggccggggacatcgtgttcacaaatctcccgatcctctttgccatgggtgttgcgatcgggatggcaaagaaggagaaggaagttgcagcgttagcggcggtcatctcgttcctcgtcatgcatgctgcgatcggagcgatgatcgaagtaaacggcggagcggattccctgaaagagggcgccggcgccatggtcgcggggatccggtccctgcagatgggagtgttcggcgggatcctcgtggggcttgggacggcatggctccacaaccggtattataagatcgagcttccccaggtgctctcgtttttcggcggaacgcggtttgtcccgatcgtgtgtgccctgttttacgttctcgtggggatcctcatgtactttgtctggccgccggtccagacggcgatctccggagtcggccggttcgtgctccgctccggttacccgggaacctggttttacggctttgtggagcgggcgctgatcccgtttggtctgcaccatgtgttttacatcccattctggcagacagcggtcggcgggtccatggagatcggcgggaaagtcgtggaaggcgcccagaacatctttttcgcggaactcgcggaccctgcagcagcgagattttctgtggaggcgacaaggttcatggcgggaaagttcccacttatgatcttcggacttcccggcgcagctctcgccatgtatcaggcggcgctgccggaaaagaaaaaggaggtatcggggctgttcctctccgccgcactgacttccatgctcacagggatcacggaaccgctggagtttacattcctatttacagcgcctctgctctatgggatccactgtgtatttgccggtctggcgtacatgctgatgcacatgctcggcgtgggcgtcggaatgacattctccggcggactgatcgacctgtttctgttcgggatccttcaggggaatgaaaagaccggatggctctggatcgtggtgatcggtgtgttttatttccttgtgtattatgcggtgttcctgatcgtaatccggaaactcgattataagacgccggggcgggagagcgggaccgcggcgaaactttacacgagagatgatgtggagcagaggaaacaggacaaaagaaacaaaactgtttcaaaaaacgcgaaaaacgaaaaagatagagcaaaagaagcaaagaatcccgcagagacagccggagaaccgtaccaaagtcagaatgataacgaaaaaaatccggagagatccggggagtcgcgctctggaaaaatcctccggggactcggcggcatggacaacctcactgatgtggactgctgcgcgacgcggctccgctgtactgtaaaagatgaaaagaaagtggatgagacgatcttaaaagcgaccggggcatccggcgtcatcaaaaaaggaaacggcgtccagatcatctatggtccgcaggtgtctgtcatcaagtcggatctggaagaatatatggaagcgcgtgaacaggcgcaaaatgcgtcaactgtgatcagaagtcccatgaccgggaccgtcattcctcttgaagaggtcccggacgaggcgtttgccggagccatgatgggggacggtgcggcgattgtacctacagacgggatcgtgcaggccccggcagatggagaggtgacctttgtgtttcccacaaagcatgccgtcggattccggacggatgccggtcatgagatgctgatccatgtcgggatcgatacggtgtccctgtccggagacggatttgaggctttcgtgagcgacggggatcatgtgcgggcgggagagccgcttttaaaggtggatatccggaagatcggggaccgggttccgtccatggcatcgccggtcctcttcacggaccttgcggagaatatggaagtcagggtattgaaaaaagggcagatccatgcaggtgagcctttcatggaagtgcaccggaaagctgacgttggattttgctgatccggaatgcgaaaataaaaaggaagtgggttgattatggagaagtttcagtatacaattacagacgagatcggaattcacgcaagaccggcgggggaactcgcgaagctttcaaaagaattccgttcaaagatcaccttgaagacagacacaaaacaggcagacgcggaaaaactgatggcagtgatggctctcgggatccgtcatggtcagacgatcaacgttgagatcgacgggacggatgaaaaggcggcggcagaagcggtacggaagttttttgaagcaaaactgtgaggcagaaacaaaaagtatggaaatcattaaaggaaaatcaatcttaaataaagtggcgatcggaccgatcctctaccacagaaagacggagagccaggtcaaacgccgcacggtggaaaatacggaagtggagatcagccggtacgaagcggcagtgaaatgcgccgaggacgagctcaaggcactccacaaaaaggcgtgtgagcaggtcggagagaccggagcggcagtgtttgaggtccacatgatgatgctggaggacgcagactaccgggattccgttctgaatatcatcaaaaatcagaagacgaacgcggagtacgcagccgcggtgaccggtgacaacttttaccggctctttgcggacatggatgatgaatatttccgtgcccgggcggcggacgtaaaggacatcacagaccggctgctaaagatcctctccggcgatgcggtggaatccggtttcctgacaaaaccggtgatcctgatggcggaggacctcgcgccgagcgagacggtccagctggaaaaagacatgctgctcggatttatcaccgaacaggggtctccgaactcccacacggcgatcctcgcgcgcagcatgaacattccggcgctggtctccgtgccggtgaaagagtactgggacggaaagatggcggtcatcgacggcgagaccggaaccctctatgtggatccggatgagaaaacgctggcggatatgaagaaaaagaagctggcggaggaagagaaagagcgtctgctccaggagttaaaggataaagaggatgtcaccctggacgggacgaaggtaaaactctatgcgaacatcggggacgtctcagatgtcgcggaggtattaaagagcaacgcggctgggatcggtctgttccggagtgaattcctgtaccttgagaagaagacgtacccgaccgaggaggaacagtttgccgcataccgccaggtggcggagatgatggcgggaaaggaagtcatcatccggactcttgacatcggcgccgataagcaggcggactattttaaattaaagaaagaagagaacccggcgatgggataccgcgcgatccggatctgcctgacaagaccggagatcttccggacgcagcttcgggcaatctaccgcgcgagtgccttcgggaagatctcgatcatgttcccgatgatcgcgtccttctgggaggtaaaaaaggcgaaggagatcgccgcttccgtccgggatgagctgaaggaacagggagttccgttcggcgatgtggcgatcggcatcatgatcgagaccccggcggcagcgatcatcagcgaagacctcgcgaaagaggtggatttcttcagcatcggaacgaacgaccttgtccagtacacactcgccatcgacagacagaatgaaaaactggaccagttttacgatccgaaacatccggccgtcctgaaactgatccgctatgtggcggagagcggccacaaatatggatgtacggtgggaatctgcggtgagctgggtgcggagacagatctcacggaggaattccttaagatggggatcgacgaactctctgtgtccccgtcgttcttactgacggtgagaaagaagatcagggagatcgatctctcctgatgtctgagcgaataaaaatgaatactgcgggagagccggaaacggatccggtttcagagtccgctgatacaggagaagatatgcagacagaaaaaaatatggcaggtccttacgagatcatcgtcctggaccttgacggcacgctgacgaaccgggacaaggtgatcacaccgaggacgaaagcggcactcatgaaggcgcaggagcgcggaaaaaaggtggtcctcgcgtcgggacgtcccacgcagggcgtaataccgctcgcaaaagagcttcgcctggaggaatacagcggatacattctttccttcaatggcgggcggattatcaactgcaagaccggggagacggtgtttgcgagatcccttccggtgtccgcaaataaaaagatcgtcggacttgcggaggaaaatcaggtggatatcgtgacatacgagggcagcaggatcatcgcatcgaacccggaatccccatacacaaaactggagagccggatcaacgggatggagatctggaagccggagaatatggcggagtatgtaaatttcgaggtgccgaaattcctcatgatggaggacggggattacctcgcaatggtggagccgaaggtgaaggcggcgatgggaaagaatttcagtgtttaccgctcagatccgttctttctcgagatcctcccgaaggggattgacaaagcccagagtctggagcgcctgttggaagttttgggactcacgagagagcagatgatcgcctgcggggacggttacaacgatctcacgatgatcaaatacgccggtctcggcgtcgcgatggagaatgcggtccttccggtgcggaacgcggcggactatatcacggcatcgaacaacgatgacggggtggggctggttgtcgagaaatttatgctggtgtgagaaatgaaaaaaaggttcatgataccgaaatgcaaaattggctgctgatattccatcgggatatggcagccataactatttctgcttttttatgcagaaagactggactttttaaatctaacgtgttaaactgtgattagtgcgttgaacgaattgatccataaaaatgcagcaggaaaaaatccagactctgctgcaaatatgaagcagaaggggtaaacaggtactatgaataagaaaatcaagacagatgcggtcgatcatctttttgaggcaatcctgacattaaagacaccggaagagtgctatgcgttttttgaggatgtctgcacagtgaacgagcttttgtccttatcccagcgttatgaagttgcaaaaatgctgagagagaaacggacgtatctcgatatcgcggagagcacaggtgcttccaccgcgacgatcagccgtgtaaaccgttccttaaactacggaagcgacggatatgatatggtatttaaacgtctcggattcgaaaaactcgatgatgaggacgatgcggaaaaataagatatgaagaaaaagaccttcgtacaggagcggaatggggatttgcttccggacgaaggtcttttggtatattattctgcccgtaatccgccatgcatccgaagggaagctccgggggaggttcccgtaggtgtgaaggtactgaacagctgcattattttttctttttcggcggattctcagccctgagctcatcggccaggcgctcgatcatctgcttttttaagaacacatcaaaggcgagctcacagataaacccgaaaagctggagcgattccgcattttccggctctgcgctgccttctgcgccggaaggaaacgtctccttcgccttctcaaatttctctttcacatcttcctttaaccgatccatctgtccgtgttccatcgagaagaccttcgtgtagatctccgcaagggaagattcgtcatccgtatcgaaatggtgctctgtaacataggaaagaaccgtttcgatatccgtaaaactcagcagatttttaaaataatagataaataccaggagcaggatatgttcctgggtatactttttctttaccggggatggaagcaggttgttcttcgcatagttgttgatcatcgtttttgtcaggaccttgtcttccgggtagcgctttaactcaccgaggtgcttctccataaaggtcgtcacctgatccatgtaaaggtcgatctgcgggatctcgtctacatgaatatggtcgaggctgtccaggtgagcgagcagctcattcagtcgttcttcattcgttttcatggtgaaactcctttcatccatctattatatagtattaaaaactatatgacaaggggtaaagatgatttttgtgtgtgcgaaaagaaaaacacgttacagtacatggccactccatgcctgcgcactgtaacaaaaaacacaccaccagaaaaaatctggtgatgtgtggaaaccatgcattcgaaatcctgccgcctacctgctgtgttcctccaaaagtcccttttccttataaaaacgctctgctccggcatgcagttcgatcgggagatcgttgaacatgaacccggactgggcggtgtaggagagggcggggtgaaggtcctttaagcggtcacggttctcatagaggatcgaggtgatctcgtagacgaggtcttcatccagatctgcgcggacgcagaggagggccttgatcccgaaggttgcgatatcttcgtcctggcctttataagttccggacgggatcttatccatatagtagaacgggttcgagcggatgatggagcggagctcggagtccgtgtattttaaaagatgacatggaaccgtgtctgccagctccgcaagcccggagatcggcgccccggtaaatccatggatcgcgtcgagcgtcctgtttttaacctcgtcagcgcctgatccgagaccgcagttgacgaaggtggagttctggtcggtgattccgagagtgcccagggaaacctttgccgcgagctctgtggtggaatcctgggggccgacaccgagacggtttccttttaagtcgtgaacataaaagatcccggagtcatcccgcgccatccagttcgagagacttggatagagagccgcaatgactttcagatctttgaattcgtgatccttgaattcaccggtcccgtttaccgcggagaaggcaatgtcgccgctcacaagtccgagatcgatactgccgtcctggagagagtggacatttccggaggagccggtcgaggcgctgatattgatcttgatggaagaatcagcatctccgatcacgagggagatcgcctttccgaccggatacatcgttccgccgctatcggcagttccgatcgtaaggatctttaaagaatctgatcttgcttctgtctggcgctgcgctgtttcggatgattttccgcatccgccaaggacaagaccggtacaggcgaggaacaaagaaattgtgtgtaaaaatttgtgcatgaagtatatcccattccttgtattaaaacctgtaggctgtaaaaagaacctgacaggttttgtaacttttggaatgagtatagcataaaaaccatcgcagattcaatgttattttgaaaaaaacgggcaaaaaccgggcggaaagtgggggattccgcccggtgaaaagagggaggtcaaatgacctttagtgaatgtcacatgtatttctatgaacggaataagcctccgaagatagaaaggaagatcgggttgtagatatcgtcgatgataacggcaaaggacggatacaaaacccatgcgatggtgtgccagccgtactggtccatgatcgctttctcgtttgcgacggcattggaaccggaaccgcagccccagccgatgtttccggctgtcatgacagctgcgccgtaatcgcggccgaagagattgaaggatacaaagattccaaagagtgccatgaagataccctgtgcaacgagaacgattcccatctgacctgcaagcggagcaagctttgtaaagtctgtggtcatgagaacgagtgcaaggtaaagctcaaggaacatatgctcgatcgcttctacttccggaacatagaacttgatgccggcagcttccatgacgtttcttgcgatcgcacctgcgaagaggcagccgatgaatttcggcatctcgatcatcgggatgttgtcgagtaagcagtagatcggcataccgagtgctgcgagaagaagacataatgcaaacatcatgatcattcttgtgttgtcgagttccggaactttaccggttgcgtgtgcttccggcttgtcgttcggatcagcttttaagccgtgctttgcgatcagaaaagcagcgaccgggccgccgatgagggagcccatgatgtttcccatcgtacctgccgcaacaccgacaacggtagcgtctgcagcgccccattcttcaaagatcgggccaaatgcagaagcagtaccaacgccgccggacatggctgcggaagagcactgaagggccaggagcggatgcatgccgatcagctggctcagggcataacctaaaaggtcctggcaggtgatcaggaggcatgcagcgaatgcgatcagggcacagagttttccgcccgcatgtcttaacatctttgcactgaaaccgaagcccacgcagaggaagaataagttctggcagagatccttcatgatcgtcgcgtcgaaggagattccgacgattcctgcccccttgatgcaggatacgatgatcgagaagatcagaccggaaataacaggcgccggaatcgcgtattttctgagcgtctcagaacgggcaacgatggccctgccgaggaagatcacgatggccgcgaaaccgagagtacacaggtactcaaacttgaaagaggcgactgctccgtcggctgccggtttgtaggtaccgaaataactgatgatactttccataagagttcctccaatccttttttttctttcctgggcatatcattccgtccgcttctgagaccggaaggtttcctgtcttcccacagaggaaacggtcggatcacccggaagataaaactttagtaacttgaaaatcaggaaggaccgttgctaaaatttatgaaaaaagtataaaata

SEQ ID NO: 2012 - DNA, 8969 bp, Unknown
  gut microbiota DNA sequence
aattaactaaaatataaacaatatattacgaattatgaagatatgaagaagtgtattgaaaacagtacaatttgataatataattcaaaaaaaagaaagagtaacgcggactgcaccaagacaggaggcagtatgggcaaggagaaaattaaaataagatatatcattttcgtgctgataaccatgggcgtaatattttttggaaaatgaataggaaagtttgtttcatataacatatgaaaacaaaaggattaacgaatattgaaaaggagatgattccaatggatatgtcccatgtagataactagcactgcacactaagtaacgagacatactaaacaatgaaaaggagagcactctatgaaaaaaagatttctggtactctgcagcatgacactattcctcttgtctgcctattcatccacctcttttgcagatcaaaaggcgggggaatctaaaacctatacggtagatgatatcaataatggcttcaccaattatttagtataaattaaacataactttgaacttcacagcaagagggaaaaatgaaaaaaacaaagtttgagattttgatttttatatgtatgatacttttgggattagggtgttttcttattgccacgaaaaataaccaatataattttttcgaggatattttatcacgttatcccgaagagaatattgcaggaactcttatggtagatttaacacatgatggtaatgatgagttacttgttataagccaggatgccttggaaatcacattggaaatatatgctataatagatggcaatcctattgtaatatataaagaccatgcctctgataaccatgctggatggcgttggtactatttaactgttgttgaccataaaaactatatcctacagtatacacctgagatatggaatggcataggaaattaccattttgaaatattttcctttaatcagaagggccagaaagaaatattagagacacaggaactgccatatgattcgatacatacttcagaggataataagcaggatttattaatcaaaacacagaattttaaagccatctatgaaaaatggcaaaccaacagcataccattgattaccataggcagcgatccgctaaccggtgataatgataattatgtcctggagaaaaaaagtaatattgaataattcctattatagcgtaaatgtgtttaataataaaagctttgggaaatctaatagaagtagtttgcctttgtttggcataaagaccgattgccttgattactgatacggttttatcaccagcatacccttatgcggatgtcgtatttcaaagtgatacaaactcaggaagttattttccctgttataccggttgtattacattgattgatgcaatatgtcgtgcagtaagcagtaattctaatattaatacggacgatcatattcggcaaatggaacgacgtctattaaatcataaaattttcatatagggtattgaaagataatgtcgtattattagcactggcataatgcggcattatttttatattaggatacgaggaggactgacatgtttgcaaataaaaaggcaggaattataattccgaaaaaatagtagaaaagcgggatttccatgtgattgtgataagtgtcctacatctttgtgacatgtttacctacatcgacaatatattatggcattttttgttttgaaagctgtcaatgtaggtacttttgtcacaaagttgtaagggagaaaccttgattttataggactccttttttctttgtgacaaatttcacctacattttttgcgttgcaaatatcacaaagtcggcgtttttgcgttgcaaatatcacaaagctggtaaatgtaagtggacttgtcacaaagtcgtcatcatataggcgaaaatatcacaaagttggtattatgcaaatgattctcgatttttatacatctattattatataggtaaacttgtcacaaagtcgtcacttcttcacgattttcgcttactctgcttgcagatttggacaaatgtcatgcccggaaagcatcatattcatgtatgttctttttataattacctaagaacttacatcatgtaatctatggtgtctgaaaacatatcctgacaacgatgtgattgctcacagattttctatagtggatgataaaaaacaagcaccaggggcaacttctgtcttccggcgcttgttcttttttgggggggatgttgtaattttgtagttacgatttaataataggtaatatactctccaaaatggtagttaaaggactgcttggtgccgaggtttgtctcttcacgccaatcctgcttgagagaaatcagtccgttatcgcttccgtacgggtcagccagttgcggatcacatcaacaacagcgttatatggtgttctttctttttctgtatatcagctgtcttcatgaaaattattaggctggccggacaacttgctgatgacataagcattattgataagatagctgttgtgtttgcgcatgccatgatgattcatttctgcggagtccgcattctcgtatgtcaactgtttgatgttcagtgcataaaaatcgatgacgcactttaatggataattggaatcgtatgccacatcacgaatttttccaccttcggagtcggtatcaatctgatcagtagttgcagtcttgactcttccattttcatcaatcacacgcagaagataatgtcaatgtagatagacatggcacaaagtcgaattttatgtgggtagaacatgatacaaagtcgttaccactctgtcggctcatgaggcagggactcataatgagaggtgacgtatccattcattgttccttctttatccggatttaaagttatggatcagagaaattatgcgaataatccgccgcttacgaaaaagggaagggaaaactattgctttacagtattatagtgatataatgtaatatgtatgtaaattgaatacttcttaagttaaacggaaatgatatggatttactctggcatggccgctcgataagagaatgcattgttaatttgcagataaaagatttatcgtaagtggcttcattaaatcttgaccaaattgggccatttttataaacaaaaaatacctaagggggggggtataaggctagcgccagataaatcttaagaaaaagaggagggaattaaaaaaatcataagaaacttgtcctgagttgacgagagaaaattcaggactgaatacagcagaaaaaagaaagaagaaaaaaggattatgaaaaaacgttggctggcttttgcaatgtcgatcagcatggcatgtactttaatgtatggaaatgccgttgcagctgaggatcatacagaacggaggaatgtagcagcaacagatgaagacagcgcagaagcaaaaaatcccgaaactggagatttaagaatcgcaacgcctggaaatgccacagaaactaaggcaagcggaagtaatggaaccaaacaggaaacgatgcaaccttcgaacacaaagattgatccgttgatgcttgcaagaggtgctcaggtatccgatgcaatttatcttgatgcaggaggaaacgattctcaggctggtacgagcgcggacactgcggttcaaactttggagaaagcttatgaattggctgaaaatggaggtaccatttatttgctttctgatattgtattgcagtgcccggcgatattgactggcgataagtctgtgacactggaaagtatttctggtgatgaaaaacatacgattacatattcaagtgccattaaaccgaagccgaagcaagacaattatatgatcaagataggtgatgaaacgggtggctcagaccagacgaaaatggtatttgaaaatctgacgatagatgctgcggatcaggatatgcggtgtctgagagtttgctccggtgccagcctgactcttgctgatggagtgaccgtaacaaacggccgggcaatcaaccaagatggaactacaggatccaacgactggggtggcggcattgtcgtagatggcaaagcaacgctgacaatggaggatggatctaaaattacaaattgttccgcagaatggggcggtgcagtatatgtaagcggtgaaatggtaataaacggaggtgaagtaagcaataataaagccgttggagatatttacaatattaacggagtagacagatctgcaagtgcacatggcggcgccattatgattcgagcatgtaaagctgattatgacataacctacgataaaccggcgaagcttatcatgaatggtggagaaattaagaataatgcagctactgccgaagccagtgcgtttggaggtgccatatcgattcttggggcgccaaaagcatcgaacgttccaaatgtttttgaaatgtctggtggttccatatcagacaattatgctatcagcggtggtgctgtttctgcttatgttgcagatgcttattttcagggaaatgcagaaattcagatttcagatgatgctgctataacagagaataaagcaagaagtcgtggtggtgccatttatttagaaagcaataatgcagaaaactataccaataatctggaaataacaggcggtactatttctgagaataaagctacaaatattggaagcaaaggcggcggtatctatttatcaggacgcggtgacaagctctatctgacagacggtgcaattgagaagaatgaagctggttggggtggtgctatttcaatcaattccgatataactggaaagaaaaaagctgaagcatatgtacttggcggcacaattgtgaacaacaaagctaaggatggctatccgacgcaggatgatccgacagaacgtgtttattatggcaatgcaattgatcaagatggtgatctgtacctgaatggcgtaagtgcggacgtcaacggagatatccggattaaatgcgagggatttggaaacagaattttaacaaatcgttttgtaacattagtcggtgcatcggaagatatgcatgactatgaactttcatccacactggatgaatcgcgggatggaagagccgttgtagttccaggaaatattacatatgatggaacggattatgcagttgctgatgctgagccatatgtgtcccactttaagcagaatcataagagaatcgttaccaatacagactacttaaagcaggtcccgactgggacaccccatgataagagcctggttctgtacggaaagcatgctgtggagattaccccgatggacatcaccatttacgtcggcggtaatggctatgagggtgtaattggctctgatggtcaatttgctacgaacgatctgccggaaatcggattttatctgactcttccggatgaattaaatgaacagcttggaagtacggaagaaaagccagaggatcttagtgataaaattgcccttacttataaggatgattctggaagtacaacacggaactgggctttgcaactatatggaaaagaggatagcagcaagacaagtgttgatggacagcacgtttatatttataaactgatgccaagtaaaatagacgggacggatcagcagataccgcttcgcatgcagtttacggataaagctggtaacgttatcgtagattccaaattccctgtcagtgaaacggatcagttccgtgattataaagtcgatttctatttcggagagctggattcgaagctttataacgtcacaatccagattaacggaagcatacaaacatatccggttattttaaacagtggaagcttaagagtacgtggaaataaagatcagacatatcgggagatttcctatactaagctaggcgttgatccggaaaataaagacgttttgctggtagaagcggcgcagaatgatacgcagtactttatcaatcagagtggtgtcaatgcagacctgtcaggagtaaaaatgctggttgatcacagccttgatgatgcgctcctgactgcttatctggatcagaacaagaatgcggaaggaaaatatgcttatcagttcagatatcttgatctggttgatacacataatggcaatgcctatgtaacaatggccgatggccagaaaatgaacatttactggccggtccctgcagatgcaaaagaagattcagagttccatattgttcactttaaaggtcttgaccgggaaagcaatgcggatatcaatgatctactgacaacccgtattccggaagatgaagaatgtgaaacagcggtcattgatggaaagaaatttgtcaaatttaccgttgattcattttctccgtttgctctgttatatgaaaaagaatccggaacaacagacaccccagggacgacggataagcctggaacaacggataaaccagggacgatagatccgacaaaacctgcttctccaagcaatgcgaacaagcagactccgagtaattcgagccgctcggattcttcggatgattctgatgattcaggttcctcgacgaacagcagaaaatcccggacagtaacaacaaacgagacgagtacgaccacagaaacaacggaaacatccagtcaggaagaaacgcagacgcagacggacacagttaccgagacactccaggaaaattctacttcggatgaatcatctatcgattctacaccgaaaacaggggatgaatctatgacatggatgaatctgatactaatggaaggatccttgatcggcatgattgctttgatcattatgagaaggaaaaagcagtcaaaagaatgatgatctttaaaactgatcaggcgagtgaaacaaagacagcagaagaatcagaaaatccggaagatagatattaaggaaatcaaaaaaccaggaaaagaataagaacagggatgtcgagccggaaacgacccgtacatccctgtttccttattcttcgtcatccgggaatccaaagatgagggaaagttccacctcactggagtcggtactgatggtgatgtgatcagctgcagtgataaccgtgtgcatcattttttcgttggacgtaatatcaatggcgtgctggctgatcagcgatgccgtaatgtcgtgacatgcatcctgatcaactttcagtctggaaccggtgagtgctgcaaaattcttaaggatcggcaaaaaggctgcatcaaaccagtctttaaaatcctgagattaaaatcctgagatttctgaccagcctgttcctcacgcagactttgaaccgcgtccatggctgccgccgcttcatttggggacaggcgatccgcgatatccgcaaactcattttcctttaaaacattcgtataatcaaattcctgcatcatgttgttacctccttgaggtcagtataaaacatagtggatatatacacaatattgattttaagaaaaatcagctatgattgaccgtgggaggacttctacatggttgattacagtccattatgggatacgatgcgtgaccggaatattacacaatataagatattgcaggataaagtcctcgataatcatacgcttgacaggctcagaaaaggtcagaatatcacactgatcacgttggaacggatctgcggatatctgaattgcacaccaaatgatgtgatttgctttaaaaatgaagaacagaataagaataaatgaaaatcagcatgtctggaaattggatccgcggcatgctgattttttattcaataatggtgagatatcgggccggaacttctttgacaagccagactccgttcgcagacagataaaacggatatccatccgcagccatggatccggcatcaacttggtatatgaccggttttccgtgccggcttccgactgcctgggcagtatcgcgatcgccggaaaggtggacatacaatctggacttcgggaccagcccgattttgttaatggatccgacgtatttttcaccggtcccatgccacaggatatccggaggcattttctgttccaattccacatcaacaggaatggagtgcccctgattggcccggatccgtgtcttgtcatcactaaacgaatagcgtttcttggagtcagtctgtacgatttcttccagcatcgccatgtcgaagctttgtgtctttgcaatcccggtgattagttcatccacacgggcccatccgtgttcatccagttgaattccgatggattccggatggtggcgcaggatgcgtgcgatgaatttacttgtatttgtcatactttgctgatcgattgttcttttattttccatattctttatattttcccttttatgcctgtaacgatatcatgtaagtttactccatgattatagggcagattcagaggctcggaaagcccttttgcgttttttgccaaatttatcttaatcctttccataattctttcgcaagtcgcttccgaaaggatccacaacagacaagttattccagaaggtcaaaatgaaaaatgccatcgaaaacgacttaagcggaaatgtggaggatattgtggtaaccgtctgtgcgatccagtcgacagaagtgtcggatatcaatctgactccgggcagtgatggaacgcttgggaaagacgttttggaccagacctatacggtatattttaaccaggcaggtgaccagacggcaaggccggctgatgaaggagaccggtcccagactggaaagattggaactatcgtgtatgaactggacggtggaagtctgactggtgctttatctggatacggaacagcagattacgggtacacaccgccgacaccgacaaagaagggatatacatttgccggatgggagccggcaaacattccgatcagacaccgcctttcatttaccgatcgatttctaatcctgataaagagatacaaaattctgtgtctgaaaaaaatgttaaaaagcaaatgaaccggcacacattcgttcgtaaaaatttacata

SEQ ID NO: 2013 - DNA, 16295 bp, Unknown
  gut microbiota DNA sequence
ccgatcgtcgcactctgtacttcaactctctttaagccatcgaatacatagagcttaccgatctttactttcttcatcttgtccggatcatgatggtttacgatcacgcagtcctgatttaactttaaggaaccgctgtcgatcttaccgataccgatacggccaacgaactcgttgtagtcgatcgtgctgatcaggacctgggtctcagcatccggatcaccttccggctccgggatatagtcgatgatggtctcgaataacggactcatgtccacttccggatcatctaattctttctttgcaaaacctgcacgggcggacgcatatacgaacgggcagtcgagctgctcatcggatgcatcgaggtccatgaataactccagtgtctcatcgatgactgcctccggtcttgcctccgggcggtcgatcttgttgatgcagacgataactcttaagtcaaggtcaagtgccttctggagaacgaactttgtctgcggcatcggtccctcgaatgcatcgacaacgagaacaacaccgtctaccatcttaaggacacgctcaacctcaccgccgaagtccgcatggcctggggtatcgatgatgttgatctttactcctttgtagaatacagccgtattcttggaaaggatggtgattcccctctctctctcgatgtcattggagtccatgacacgctcttctacttcctgatttgcacggaatacgccgctctgctttaataactggtcaaccagtgttgttttaccgtggtcaacgtgggcgatgatcgcaatgtttctgatatcttcgcgtttgatcttcataatcaatcctctttcttcatctataactgtccgcacaccgatcattttccgacccgttttgcacagtcatcttatcttgtatctgttacatttcctgatttttgcgttaccgactcaaaattatagcattcatgaaatcaaaatgcaatacaaaatcatccaaaattcggggtgaattcgccattctttgtgtttatttctgagcaatttgcggttagacatctcttactctctggagagcgcctctgtttccgcctgagaaaacaggctgctaaaaagccgaagtctgcctatgttcagactgtgtgcctcctacggcatgcgagcgcgaaagtctacaccgtacagattgccgccctctatcttctcttctgccatttccgtgggaaatcagccctcagcctcttatgtcctggtgctgatggctggtctagaaaaggatcacttccttattaagtgtgccgtaccacacctcgtcgcccttttcgatcttcgcgctgccgctcgttccttccgtgatcttcttttccagaccgtcgtaagcagcaaccggtacgagaacggagaattccaccttatctgtatacacgctgtcgagcaccgtcatgttttcctgcccgagaatatactggatctttccgactcccgtgtaatcggtcacgattttcatctcaaaggcgcgcttcttctccacgatctcggaggccgcaagtccttccttcaccgcacccgaataagcccgtacaagtcctccggttccgagcagtgttccgccgaaatacctggtcaccacaacgcagacattgtggacatcctcgccgaggagcacatcgagcatcgggcgtcccgccgtctgggcaggctccccgtcatcgctgcacctggtcagttcgtggttcatcccgattgtaaacgcctggcagttgtggcgggcatcccagtatttcttcttcatctccgcgataaatgccgtcgcctcctcctcggactccaccggctttaagttcgcgataaagcgggatttcttcacctcagtctccgccgttccgcctttatacaaaatttttacgctgtcagcagccatatcttatctcctttttcaaaagtcagctcagccattccctgcttcctgcttcctgttttcatttgcatatgacagaaaatttccgccgaaatgtacaaatgcaaccaatccaacggtgtatttttctatgttccctgtatatagctgagtgtcgtttctgaattccacatcatagaaagtcgcccatgatatttatctttttgtcatatttttgacgaatccgaccacaaaatgtaatttttccttcatatttccccactttgcggtcaaaaatatcataatacaaaccaaacttttccacaataactatttataaatgaaagaaactttgctataattagggaatgacaaaggaggcatcctgaatgaattatggaaaaaacgaggtggaaaagacactctgcaaaacaaattccagggctcagaagattacctcacatctggtacttcttctcacaaagatcatcctgatccttgtcctgtttgcggcggtgcttgggatcagcttcggctacgggatcttcaagggcgtgatcgacgcggccccggagattgatgtggcgagcatcgaaccaagcggttatgccaccatggtctatgacagtaagggaaacctcacggaaacgctcgtaaaatccggagcgaaccgtcttgaggcatcctacgaggaacttccccagtgcctgatcgacgccttcgttgcgatcgaggattccaggttctggtcccacaagggcgttgacgtccgttcgatggtccgtgcggccgtcgggatcatcaccggcgactccagtgccggcggcggaagtaccctgacccagcagctcatcaaaaacaatatctttgaaggcggaaatgaggacaccttcggagaaaagcttgagcgaaagatccaggagcagtatctggcgatccagttagagaagatcatggataaaaagatcatcctcaaaaactatttaaacacgatcaaccttggaaacaacaccctgggcgtaaaggcggcggctctccgctactttgataaggacgtctcggagctcacgctctcagaggcaacggtcatcgccggtatcacccagaacccgtcgagattcaacccgctctccgaaaacggaagaaagcgcaacgaggaaaaacgccgcgtcatcctccagtacatgtacgagcaggggaagatcacgaaggaagaacaggaagaggctctcgccgatgacgtttactcccgcatcaaaaacgtggatatcgtcacaaaggagacccagactccgtactcctactttaccgacgagctgattgaccaggtgttaaaagcattgcaggacaaaaaaggctacacggagacacaggcctacaatctcctcttctccggcggtcttgagatccacaccacccaggatcctgatatccagtccgttgtggatacggagatcagcaatcctgaaaactatgacgtggtctactactcgatcgactatcggctgtcgatccagcacgcagaccagacaacaacgaactattccgatgagactttaaagacatatttccgcaaggatctcggagaatctaactttgacggcctgttcacctcgaaagaaaaggcggatgaggcgatcgagaaataccggacggcgatgacaaaggaaggcgatacgatcctcggtgaatccgtacactacgtactccagccgcaggcgtccttcgtccttattgaccagtccaacggctatgtaaaagccctgagcggcggccgcgggcagaaagaagtcagccgttccttaaaccgtgcgacaaacacgctccgccagcctggatctactttcaaggtcatcacatccttcgctccggcgatcgatacatgcggagctaccctcggaagtgtctattatgatgccccgtacacgatgggaacaaagacattccggaactggtacagcagcaaaggctatatgggctacagtacgatccgtgacggtatcgtctactccatgaatatcgttgccgtgcgctgtatgatcgagactgtgacacctcagctcggcgtggaatacgcgagaaatctcgggatcacctccctgacggacagcgattacaacgcctctaccgctctcggcggtattacaaaaggtgtttccaacctggagctgacggacgcgttcgctgcgatcgcaaacggcggtatctacacgaagccggtcttcttcacccagatcctggaccacaacggaaaagttcttctggagaatgagccggagacaaaacgtgttctcaaggattccaccgcattccttctcacggatgcgatggcacagtcgatggagagcagccgcatgttcgcctcctccggagtcagcttaaactccaccagtgcggtggctaatatcccggggatgtccaatgccggtaaatccggtacgacaacgagcaacaacgatatctggttcgtcggatttaccccgtattacacggcgggaatctggtccggatgtgatgataaccagaagatctccgcgatcggaagcagcacttcctaccacaagaagatctggaaaaagatcatgacaacaatccacgaaggacttgcagataccggtttcccggttccgtcttccgtcacgaccgcccagatctgccggaaatccggaaaactcgcgatcccaggcgtctgcgatcatgacccgagaggaagcgccgtctacacggaatatttcgcaaaggggacagttcccaccgaggtctgcgatcatcacgtccagctgaccgtctgcagtgaatccggcggtcttgcgaccgaatactgtccggaaaagaccacgagaaccttcatggtgatcccggaaggtgagtccggcggaacggatgattcaaagtaccgctcacctggaacctgcacgatccacggatcgtcttccgttgtagtcccgagcgatgagacgtctgatgaaaacagctcctctcaggctgagaccacgcaggaaacggttcccgagaccacaaaggcagcgccgaaatcgccgcttgaccaggtatatatcccgataggtcccggatacgaataaaatccataggaaatacgccatacagaaattcctgcatggcgtatttttatgagcatatatccggtttccctgtatacaaaaaagagtctgagacgttgcataaaagtaagctcttttccattaagaaaaatcccccggcactttcataccgggggatttttcttaatttacgcgaagcgtgttttcatttacatcatggcattttctgtaaattctgactgtgatccgctcgctttattctgcttttctcttcttcatctcttcgatcatcaccggaagaacctttgtgacatctccgacaattccgacatcggccacatcaaagatggatgcgtcctcatctttattgatcgctacgatatatccggaaccgatcataccggatacgtgctgggtcgcaccggagattccgcatgcgatgtagagcttcggagcgacgatcttgccggactgtccgacctgatgggctctggatacccagccctcctcgatcgccggtcttgtggcgcctacaacgcctccaagtacctctgcaagctgttccacaagagcaaaattatccttgcttcccattcctcttccgccggatacgatgacctgggcttcctcgaggttgacgctctcagcgatctcttttacagtctcaacgacctttgtgcggacatcctctgctgtcacatcctcatctgcaacctctccgctcctgctctcatccagattctttgcgaaggatccggaacggacagtcgcgatatgcggaaggttctctcccatcttcatgtcgtttaatacatttccgttgtaggaaagtgttgtgtaaacaccgtctgcagtgatccctgtcacatccgtcgcacagccggactcaaacgctgccgcaactgccggagcgatcatctttccttccggtgttcctgccatgtagagagccttcggctgatatttttccacaagctttgtaaggatctctgctttctctgctgcctgaagctcattgcttcctgctgtgaggacttttgccgctcctgctgcgatcacaggctttgtatcggtatctttcccgaatacgactgcgaggacttcctctcctgctgctttcgcaagctctgctgccttgctgactgtctcgagtgcagctccgatcgcagcgccgtttgcgctctggacgcagaccatgatattctttccatctgtatatttcattttttcatttccttccacgactagattgctgcagttcatgaacatttctgccatgaactgcattcagaccggcaaatcaggcagtcttagagcgcctttgcctcatccatcatggcaagtgcctggcgcactgcctcctccggatcttccaccttgatctttgttcctgcagctctctttgccggctcatagaccttgaggaccgttacctgggcctctgccttttctgccgctgcgagctcctcgatcggtttctttctcgctgccatcttactcttgatcgtcggatagcgcgggtcatactccggcttattgacggtcacaacgcacggaagaacggactcgatcatgcggtaaccttcctcagtctcctgttttgctgtcactttgccctcgccggctgtgatatcaacgatgtcagcagttaccggaacgtcaagctcctttgcgaggatcgttccaacctgtccggatgcaaagtctgtagtctccttgccgcagaatacgatgtcaaatttctttcctgtcttctcctcgatctctgcttttgcggcctggagttcttttgcgatgacctccggatccgcattctgatatgcgtcatctgctgccagatatgcatagtcagcgccgactgccagacagttctttaaagagttcttaacgctctcatcaccgatagaaagaactgtgacctctcctcctgctgcctcttttaagcggactgccatctccagtgcatatgtatcaaatgcgtttacgaccggtgtcacaccgtcgagcgccggtgcgcctgtcttcggatccagagcgatctctacggaatcgtccggaacctgttttacacaaactaaaatttccatgttatcctccaaacttattcgcagctgttcagtcccctcacaggtattacggtcagcgcagcaagtgcgcagacctgctgaacagttcccttatttcattatttatttcccgatcacattatttgcaacaacgatcctctgtacctcgttggtgccctcaaagatctggaagatcttcgcatctcttaagagcttctcgaccgggtattctctgctgtagccgtaaccgccgaacatctggatcgcctcggaagcaacttccatcgcaatgtcggatgcgtagcatttcgcgatcgcggattccttgctgtacggaagtcccatatccatctttgtcagggcatgtgcgaccatctgacgggcagtctctgtcttgatctccatatcggctaccttaaactgtaatgcctggttcttgatgatcggtttgccgaactggatcctctctttgccgtatgcgacagcctcattgatgcctctctgtgcaataccggtcgccacgcagcccatccatgcacgcgcctggtcgagcgtcttcattgcgatgccaaagccctttccttcctcaccgatgaggttcgctgccgggatcctgcagtcttccagaacaacatcgcaggtgttggaggtacggattcccatcttgttctcctcatggccggtggagagacccggagtccctgcatcgatcaggaacatggagattccctttacgcctttggacttatctgtcatcgccgttacacagtagaaggaagcgacgccgccgtttgtgatgaagcactttcttccgtttaatacatactcatcgccgtctttgactgcggtcgtcttgcctgcactggcatcggaacctgcacccggctctgttaagcagaatgcaccgaaaccgccgtcgagaacgaggtcgcagacatgctgtttctgctcttcatttcctgcgatcaggaccggcttcattccaaggccgctcgcagagatcgtggtcgcaaatccggcatctgcgatcgccatctgctcgatgagtgctgctacatccacacgggaaagtcccggtccgccgtactcttccggaacctcgagagcctgatatccctgctcgatcgctttctcataaattgccttcggccattcgccggaaacatcgtattctttgcactgttcaacaacttctttgtcacagaaattttttacatcctgcaggagatcctgcgcttcttcagaaattaaatatgccataatcgatttcctttcgtgtctctttttgtttgaccggtgcgtgggagcacaccggccggcagttatttgacaaatatggtgtacggcggctgccaaatggggaggaaagcggctgccgccggggggaatcataaacggatcgttatgcctcttccttcgggtcataacagatcttgcccggatttaagatcatcttcgggtcgaaggtctccttgataccgcgcatcaggcgcatgttgaccggaccggcaaactctgcgaggtagcctttctttccgaagccgatcccgtgctcaccggagatcaggccgccgagttctgctgccttcttgtagatgtctgccataaactcggaaacttctttcttgaaggtctcctcatccagatcgttcgcgcaggtgtagatatgtaagttgccgtctcctgcatgtccgaagctcttgactgcgaaatcatatttctcggaaacacctttgacatatgtcagatattttgcgatctggttgaccggaacaacaacgtcgcactcgtcgaggagttttgtctccgcctcgatcgcctcgaggaaggagcttctcgctgcccatgcatctttcttctttgcaggtgtgtccgcaacgagaacatcgactgctcccgcgtcaagaacaacttcagcaacctgctcggtgagctcttccaactggtccatgctgtcgccatcgaatgtcacaaggaggtaagcaccgatgtcaacaccttcgacctgcttcgggaatacgctctttccgagataacgctcggaagcgaggacgatctctttctccatgaactccactgcctgcggctggaaatgattcatgaagaacttcggaacggtcgcgatacagtcttccaggttctcatacgggatgatcaggctgatcgtctccttcggagccgggatgagttttaaggtgagctcggtgatgatgccgagtgttccctcagaaccgatcatcaggttcagcaggctgtagccggtacttgtcttggagaccgtcgcgcccatttttacgatctcacctgtcggaaggacaaccgtcatcgcgcgcacgtaatctcttgtgcatccatattttactgcgcgcatgccgcctgcatttgtggaaacattgccgccgagtgttgcgaatttttcacccggatccggcggatataagagtccctgtttctgtgcgtcttccgcgaggtcgtttaacagaacgcccggctctacgcggacaacaaagttttcaaggtcatatccgaggatcttgttcatcttggtcatgtcgatcatgacgccgccatcaacagcaaccgccgctccggtaagaccggttcctgctcctctcgggatcaccgggatggagttctcataacagactttcacgatcgctgcaatgtcctctgtggttgtcgcctcgatcacaacctccgggattccctttccgtagatcggcatctcatcatgaaaatagtcgctgttgatctcctcacctgcgtatacttttcccggaacgatcgctttgaactgttccagaatctcaggcgtcacctgattgtacttctttgcttccatgtttgtttctcctcttctcatatcctaaattttcagtcattcggattcagatttatgaaacgggtccatgcctttttctctcaaatctgttttctgacaggttttctaagtttccggcactttccgtattgctgtctttctattttttcgtgtttctcacgatcacggataccccgtccgggatcacggtgatccccgcatccgttttgccaaggtacgcatccgccatccggatcgcttcctccacactttccgcgtaatccatctgcatatcccgcaccatggattccggtgcaccggtcaccatgatcaccttgtgttttaaaaggatcctgcacaggatctgtgcttcccactgatccgggatcgtcttctccatcggtgtgtcgagaaactgcttcataatctcatttttgtctcttccgcctgcaaaggtgtcatagagagactgaccgccgtgaccctgtccgcactctgcgaccatgatgatcactccgcccggattgcaggtggcctccgcagccgtcattccctttaccgactggtaaatgttctggtcgagcgggtaacctccgtttgtggagatcacgatgtctgccgggatcgcgtcaactccggaaagtttatcgacgaagcggcatccttctctgtgtgcctgatcgaagtccccggcatacgcccggatgactttcttgttctcatcgaggaccacattgacgatgaaggcaagtttcagggtctttgccgcaaataccatatctttgtggatcggattcccgtcaaggattcccgttcttgcattcggactatcgataaattgggagcagtggtttgccatgaccgtctctgcactggaaactcccggaagaatgctctttcgccctccggaaaatccggcaaagaaatgcggttcgataaagccctccgagatcagaagatccgcctccgcagcgatccggttgacctttaagatcccgccggacgggagaactcccatctccttcatctcctctttgttgtggcttttatgtaccacaaagcggatatcgtcgcggtccaggtattcctcaccgaacttatctgccagctcctctctcgtggtctccctgtggaaacctgtcgcgatcagaactgttaatttcgcattcggattgccttccttgatctcctttaacatttccggaaaaatcactttgctcgggaccggtctcgtgtggtcacttgcgatcaggacgatattgtcttttcccttcgcaagttctctcagacgaagtgatccgatcgggtgctccatcgcatccctcacgatctcgcgctccagtttctctgcatggtatccatgcgctccggaaaccagggtcccccgcagccgctcgtccggaatacagaccgtcttgttctcttttccgtacggaagtgtgatgtttgccatattcccctccagtctgacatgaaatgtcgtttcctgtctttcctgtccttttcctgctatctttttgatcgtatcgatcatcgtttttgttggtagtaccaattatattgtttttaaaacaatgtgaacatttgtttttactatgcgcacattgttgtttcttcgcttcttattggtagaaccaattagtcttaaaaaataactgctctcataagcagtgtattttttctgatacaaggatagcgctgtcttgtatttttgtcaagacattttgtttttctttgcatgaatttcgcacagattgtctgatttttgtcaatctcgggaagtctgctcctcttttctttctccgtgctctgcaggccggatctctttccagtttctctgaatcgtttacgattcctgattccggttctctcctgctccttacatatactgataaatataatggaaatggagtttcagtccctctcgtgccttctcgatatttccttccgaaaaaccttccgccagcgttcggtgcgcacggctcaaaaactgttcgctgtgcattccttcgataatctttccgcgcatcttcgggatatactcatccatgatcttattgagtgctttatagttcgcgatcatgcagagattcccgtccgcctcgatcagaagatagtggatcgccttgtcccagcggacacgctcctcctccgtctcagcattctccaggttttccagatatgtcatcattttttcgcgctgctccgcggttgcctgacggaccccgccctcaagcgctccccattccagggtggaccggaattccgtgatcttatccacatcgatcttttttaagatgaacatgaatgagagcatctccgcgaggatctcatcaaaatttccggagacataattcccggctccctgctggctctccaggactcccatgttctccaggatccggagtccttctcttgcagagttgcggctgatctccagtttctgggcgagctcccgctccggaagaagtttttctcccgcctggatctctccgcttccgatccctttctttacatattcaatgactttttcataggatttctccatcgtttctgatcctttccccaaatccatttcctgtccggaaccgtcatgcctttcacactccgcattccgaatcggcaaaatccgcgaccccattggtatcatacggaatttttcctcttcaggacagaaaaaaggaatgtgccatggcacattcgcatgtccttcgcagccgccggcagctcctttcggatgcatgataattgaaagccgcagccggtatcatgtaccggctgtagtctttcacgcctttccgttattacgcttccattgcctttttgatcgcatcaaataattcgtcatatgtctcatatgccgcaagctccgggtgatcctttttgatctgctccgtgctgcggaataagaatcccgccttgctcgcctcgatcattccgaggtcattgtagctgtcgccgctcgcgatcgtctcaaatccgatcgactggagcgcctttaccgtcgtatacttcgacttctcgatccgcattttaaaccctgtgatcgttccgtccggggcaacctccagagagttgcagaagatcgtcggccagccgagttttttcatcagcggctttgcaaactgcgtgaaggtgtcactgatgatgataacctgtcccatctcacgaagcttgtccaaaaactctttcgcgcccgggagcgggtcgatctttgcgatcgtctcctggatctccttcagaccaagaccgtgttcctttaaaattccaagtctccagttcatcaatttatcataatccggctcatctctcgtcgttttcttaagctccgggatcccgctctcctccgcgaatgcgatccagatctccggcacgagaactccttccaggtcaagacacacgatatccataatcagttcctcctcattgatcgtacttctatgtcgcaatgcagatattataccatcatccactgtaaaaatccagaactgctttctgatcgtgtccacagaatttcacccggaatttcattgtgcaccgaatttttctcctgcatgtacccgaaggcaccacgctcaaactcactgcctattcctgtccctgcaaaccggcgactgttttcagatattcatacatcacccgcgccccgtcacagatacttgaaatttctgtgtgctcggatgggttatgggaaattccgccgcggcacgggatgaataccatgccggtgtcgcagatatccgcaaaagacatggaatcatggccggcaccgctcggcattctccggctcgagatcccgagcttctttgccgcctgttccaggccgtcttccacctcggcgctcatcctgatcggcgggatgctgttgatcttttccgccacatactcaacgccgcgctttttgcagctttcccgcacagcggccttgaaattccgttccatgcagtttaagctgtcctgatcgatccctcgcatgtccacgccgatctctacacgtcccgggatcacatttaaaacgttcggataattctggatcacgccgacggtcgcaacggactggtacgcagattcctgctttccgatcttttctaactccaggataatctccgccgccgcacacagcgcgtcactcctcatgtccatcggcgtcgctccggaatgttccgccattcctctcaaatacacccggtaccggatcggtcccgcgaccgtgccgacgatcccgacctccgtctgatattcctcgaggacctttccctgctcgatatggagttccagataacgccccacaccggagatctgtttcggatgaaggttcagaccgcggctggcaaagatctgctccagagtctccccgtttttcgcagtcagatgtccgatatcctgcttgtagacttccttcgtgatcagtccgcttccgatcgtacagcagccgaaattgctcgactcctcacagcggaatgcaccgacccgcagcgggatccggagaccgtcctccttcgcccacttcatcaccataagtcccgcgatcacacccgcgacgccgtcatagcggccgccgtcgatcacggaatcgagatgcgaaccgatcagcgtataccccatctcatccgtattggccacataagtatttccgacctcatccgtatggatcgatccgccgagttccctgccgagtcctttgaagacctcatgcatcgcgtcctccgtctccgtatagccaagtcttgtcacacctccctgcggcgtgctcccgatctcataaaaactctgaaacagtctttcacagtactgaatatccttgggtttatgcttcatatgcgcttcctcctgcgtatgctcacgtttatcgtaactgtccgcctgttctccttcaggaaacagatttccagtatgttttttctgataatatcattataaacgcaaaatactcagaatcatatgtgtattacgacaaaaaaagaggattgtttttggcgttacagacaaacaacgccttccacccggatcatggttttccgtttttcattttcaggggatcgaagtcatgtaaaccaagaaagaaccctgcattctatactgctatacccccgctcccagcttccacgccagtaccgccatatagatcataaaattgtcctccggtttcttaagatccagccccgtgagcgtctggatccgccccaggcggtatttcacggtattcttatgcgcatggagaagttccgctgcctgatcgaggtttccggaacagctaaaataagttgcaagtgtatcgaggaactcctgactctccacaggttttaagatttcttcaaatgtttttccccttccggattcaaaaaactcctgaagcgcacagaatacccggactttttcatactgacagacactcgtctccggccagagctttctctggacccggatcgcctgaaacgcatcgctgtatgtatcccggatcccggtaagacctctccggaccgatccggccgcacagacgatccggtccgccccggcatcccagagttcccggatcttctcctccgtaaacagatccgcaaggaccgtcctgaccttgtcctccgtctctccctctgccaggagaagatatcccttctttaacgggatccggatacactccgtgatctccgctctctccctaaagagtccaagaactgccctggcaagaaaacggatccccttccaatcctgctcgtccggcatgaccatcttcctaaaattgatcacggccgccgcaaaccagtcatgctccacatccatcccaaaaagtctcccgcgctccgccatcaggaccctgtcactgtaattctcgtatagaatatccttcacgtacttctccaggatcgccgaatttccttcttcctcgaagatcaggttcatcacattcacgataatatcaatataaggaagagcttccggcagctccaggatcggcagtcccacttcatccgccgcttcccgcacacgctctgagatacacgccacatacggccccgtcttcaccgcgatacaacagcaaatatccgcgacctcccggatcagcgcacactgctcctcctcactcttcctcacagaataaaaactcgtgatcagaaaatcattccccttcaaccactgcctgatctccggaacctccatcaccgtcacatgctccactttcccagaaagccccgctgctcccgcaagaacacgcactccccgcatgaccggaagcttcaaaacatcactcaccttcgccataaacgatcctgtctccttctgtcagtcatcccacaccatatccatacgatagactccccacatacagcatcccctccatgagccatccatcttcctccgctccggcaacactgaccagtattctcataatgtatgtattatagcgtgtattcgcaaaagattccatgtatttttgcgtccgcacctttattccttttg

SEQ ID NO: 2014 - DNA, 9704 bp, Unknown
  gut microbiota DNA sequence
tatatgctcacccgaaaggagacttgtgatatgaaatccggagaacattttgacgtgatcatcatcggtgccggcccgtccggtatcttctgcgcctatgaactgatcaaagaaaaaccagaattaaacatcttaatgatcgaaaaaggaagaccgatcgaaaaacgcgtctgtccaaagagaaaaacaaaagtatgcgttggctgtaaaccatgttccatcaccacaggcttcgcaggagccggagctttctccgacggaaaactctccctctccccggatgtcggaggaaatctgccggaaatcttaggatacgataaggcgacagagctcatcagggaatccgacgatatctatctgcagttcggcgctgatcagaacgtatacggtgttgacaaacagcaggagatccgcaagatccgtaaaaaggccatcaatgcaaacttaaaactgatcgaatgcccgatccgccacctcggaaccgaggaaggctacaagatctatacccgcctgcaggatcacctcctcgcaaacggcatccacatggaattcaacacgatggtaaaagatatcatcatcgaagacggagctgcaaagggtgtcattaccgataaagacgaaacctactacgcagacgagatcgtctctgccatcggccgcgaaggttccgactggttctcccatatctgtgatgaccacgggatcgataccgaggtcggcaccgttgatatcggtgtccgcgttgaagtccgcgacgaggtcatggaattcctcaacaagaacctctacgaggcaaagcttgtatactacactccgaccttcgacgataaagtccgcaccttctgtacgaacccgtccggtgaggttgctaccgaatattacgaaaatggtctggctgtcgtaaacggccacgcttataaatcaaaagaatataagacaaacaacaccaacttcgcgatcctggtatccaagaacttcacaaaaccgttcaagaccccgatcgagtatggtaaacacatcgcccagctctccaacatgctctgcgacggaaagatcctcgtccagaccttcggagacttccagagaggccgccgcaccacagaggagcgcctctgcagaaacaatatcatcccgaccttaaaagatgctgtcccgggcgatctgtccttggttctcccacaccgcatcatggtcgacatcaaagagatgttaaaggcactcgataaggttactcctggtatcgcgagcgacgagacacttctctacggtgtggaagttaaattctactccaacaaagtcgttgtcgacaaagatttcgagacaaatatccatggtctccgcgcgatcggcgacggcgcatccgtaacccgcggacttcagcaggcatccgcgaacggactttccgttgcgagaagtatcctggcgagaatggatcagaaataaatgataaaaagagcaccttacgatcaatgtttcaggggttttcctttctgacattgtgatgatagggttacagtacacgggcactccatgctcgcgcactgtaacaggattttgccgatgcttcgcattccgaatcggcaaaatctgctgccacaactgtattgtacggaattttcagttcagaaaattcctaccgtgtacagtaacacgataggtgctctttttcttagttcaattccagttcagcccctgtgttccagtcagcgtaggccgacaaattttctcaaagtctccgttctctgccgtttgtttcgatcgatatcagtatattgtctgcgaagaatgtgtatattcgcaaaatgttttttcactttctcggatgtgccccctggtacgcctcccggactgtattttccgtcgcatatgccgtatacatctgcgtggatgccagatcggaatgtcccatcatggtctgaacagcgcgcatgtcagcgccgttgctcaaaagatggaccgcaaaagagtggcgcagggtgtgaggtgtgatgtcctcctcgatcccggcccgctccccataatatttgatcagcttccagaagccctggcggctcatggttcctccgctgcagtttgtaaagagaagttccgaactcattccctttaagaacgtctcccgcgaggcctccagatacttcgccagcgcatttttcgccgcatggccgaacgggatcatccgctctttatgctcatcccggcaggtgataaagccgaccgtcatattcacgtctgaaagcttcagacttacaagctccgttacgcggatcccggtcgcatataaaagctccagcatcgccttatcacggatctctttcggattcgcacaggacggctggtccagaagtctcgtcacctcatctactgtgaggatcactggcaccttcttttcgatcttcggtgcatggatcgattctgcaggatccctccggatcattcctctcctatgcatccagccaaaaaatgactttgcggacgccaaggaccttgagaccgtcgatgccgcctttccctcttttccctgaaaaaggagataagaattcagcgcggtctttgttacctttccgcactccgtgatcccgttctcttccagataatccgccatcttcagaagatccctctgataagaaagcgttgtattttttgacgcttgcttttcctcctccatataatggatgaaggtctgaatttcctctctcataccttttccccgttcatttgcggccactgtaatccactgttcccttatttttcccggcaaaaccaatatttttctacattatatccccattttatagcaaaatcaaacgaatttttcccacttgaatcccttttccgagaactcacgcagcccggaaaccttttcagtacctttttgcagcagttccgttccttcatcctcacttgtgtctacgaaaagaaccgaaaaactcctgctgaaacttccggattgatcaaagtctctgccgcgattccgagtgctgtcaataagatcatgctcaagatccgggattgctcattcccccgcaccggttcccggaccacgatccacaagagatacgccgccagtgcataaaagatcccctgtggaaagaccagcccgaaaaagagcaggatcccgctgaatccgctgtgcatcgtcagggcacagacgatcactgccgcctgaaacgatacgcagactgccgatgcatagcagatgatccctgacagcgacgtctggcagatcaggatccccaccaggatccacacaaagcgcttcttcaggacacctgcgaacaggctgtaataatccaccgacgacagctccgcaggcgcaaagatccccgcaaaccattgttccagcgtattcttcatctccatgctcatgtgattgcaaaaaatcgttcccgctgcagttccaacaaataaaaaaaaggacagccagaacaactgactgtccaatagtctccggtgtctgcggatcccagtcatagcgttgccgcccctgttcctttttcacagtgtatgcgcacagtcccatgctttatccacaatatcgtttctgatttttaagtctttcagtacctgctcttaccggattccttccttctgggcatacgcaaggatcgccgcgatcgtctttgcgtccgtcatcttcccgctgtagatcagatccagaaggtccttcacttcccactcctccacgtcgatgctctcgtctgcgtcgaggtgctgtttcgacgggatcagatctttcgcgatatagacgccgatacgctcgtcacagaatgccaccgttgtattgaccgtcatcaggaattccagattttcactgcggaatcccgtctcctcctcaagttctctcgctgcacactcgatcttcggctcatccggcgcatccagctttcccgccgggatttcaagagtaaagcggtccagggcgttccggtactggcgcaccatcaggatctttccgtcctttgtcaccggaagaacagcggcagcgccgtcatgatggatatagtcatagacttcctcgatcccgttcgcaacgacggtgtcccggtagatctttaagatcattcctgtataggcaagttcacgttttaaacgaattgtcttttccatgtttctttcatttcctctcactttatgctttgttctgatccacagtcaatcatttcacaaaatccgacatgtctgcatagaactgtctgcgatttgcttcttgttcgcaatttatctcattatctgtgaataataggagaattctttttacagcaatcagccctttaatttcttattcttctcaaagttcgcatcgcaggccttgatgatcgcaccgcggaatccattctcttccagggcggcaagtccctcgatcgttgttccgcccggagagcataccatatcctttaattcgcccggatgttttcctgtctcaaggaccatcttcgcgctgccgagcaccgcctgggcaaccatcttgtaggcagcctggcgaggaagtccgttcttcacgcagccgtcagccagcgcctcgatgaacatgtatacatatgccggtgaacagccgctggcgcttcccacaacgtccatcagcttctcatccaccttctccatctttccgaaagaagtgaagaaaccgtcgatcacctgtttttcctcgtccgtaaacaggtcctcatcatagctcacaccggacattccctcgccgaccatcgccggagtgttcggcatcgagcgaacaattctggcactttctccgagtcctgtctgaagatccgcgatcgcatatccggccgcgatggagatcacaacctgatctttacggatctttccgtttaattctttaaacacagtcggaagaacctgaggttttaccgcgaggaccagatattttacctgatccgcgcactcagttgctgtggaaacgtgggcaacgcccgtctcctctgtgatcttctgcatcttcgcttcatgagcgctcgtaaaaagcagctcctccggctgatatgtctttaaaagtccccgcatgatcgcggttcccatatttcccatgccgataaaaccaatttttgccatatgaaatttcctcctaaaaatgtatctcggcacattctcgcgccgagcgcggtcgcttgcgacaatcctcatcttcgcgcgagtgcgcatcttaggcacgcagtgcctgtttgttatcgcgacagtcaccaaggtctcgcgcaagcgcggactttggctcgttgttcgcgtaaataaaaaagccgcagccatacagatcctctctgcacagcaacggctttcaattttatttcgcgtaatcggtaactctggactcgcggatcacgttgactttgatctgtcccggatattccaggctttcttcgatcttcttggatatgtctcttgcgagaagaaccatatcgtcatcgctgatctgctccggcactaccataatgcgcacttcgcgtcccgcctggatcgcaaaggacttatcaactcccttgaaggagtttgtaatatcctcaagctgctttaagcggttcgtgtatgtctccaacgtctctcttcttgcgcccggtcttgcagcggaaatcgtatctgctgcctgaacgatgcaggaaataaggttcgtcggctcaacatcgccatggtgagattccacagcattgataacgatcggggattctttgtatttcttacacagttccgatccgagctgtacatgggaaccttccatctcatggtcaacggattttccaatgtcatgtaataagccggcacgctttgccattctgacgtccacaccgatctcggctgccagtaaaccggataactgtgcgacctcgatggaatgcttcaatgcgttctgaccatagctggtcctgaacttcatcttgccgaggagcttgacgagctccggatggatattgtgaatgccgacctcaaggatcgcagcttcaccttcctcgcgcatcatgttttcaacttccttctgcgctttctccaccatctcttcgattctcgccggatggatacgaccatccacgatcagtctctcaagagcaattcttgcgacttcacgtcttaccggatcaaaaccggataatacgacagcttccggtgtatcatcgatgatgagttccacacctgtcattgtctcaagagtacggatattacgtccctctcgtccaatgatgcggcctttcatctcatcgctcgggagctgtacaacagaaacagttgtctctgcaacatggtcagcagcacatctctggatcgctgtaaccacgtattcctttgctttcttgtctgcttcttcttttgccttggcttctaattccttgataagctttgcagtgtcgtgttttacatcttcctcaacagatttcagaagatattctttcgcctgttcgctggtaagtccggagatcttctccagttcttcctgctccttagcaaataattcctcgacctcggaagaacgctttcttaaagtctcttccttcgcggcaagactggattcttttctctccattgcctcagattttttgtcaaggttttcctctttgctcagtacgcggcgctcataacgctggatctcggctctccgttctctggtttccttttcaagctcgtttttcgcttttaaattctcttccttcgcttccaggagagcttctttcttcttcgtctcggcgaccttcaatgcttcatctattatttctctggatttttcctctgcgcttccgatcttactctcgtaactttttttatggtgagccacagctatcttccaggtaataggagccacaataattgctgctatcaacatgctgattattggtgacacaggagcacctcctttatttagttttcattgtactaattacaacacttcaattctaaactgttttatgcattatgtcaagtataatgcccgcattccggggacttctgtgcatccccacgaaggttgtcgaactgcagtccgcgggctctctcagcctctgaaaagcagcactgcagttcctgttcaccgatcaaaaacagcttctcactcccactgtttcatcgcactgttgatcgcgtcataagaaaagccttttctcgccaggaacgcgtagatcttctgacgctttgccgggtccggttcctccggatcgtagtttttctttctcagcagtccaaggatctgggcagactcgtcaacttccatatcctcgaatatcatttccaccagatcatcgctgacacctttctggcggagatcaaatttcatctggcggatactctttttatgtccgtttttctctacataccgccttgcatagtcctcatcatccagataccggtaatgtttcagaaaaaggatcgcatcttcaacagaggctggcgaaaactcctgttccgccagcttcttacgcatctcattttctgtttttccggaaaactggagatagtagagtcccttatttcgggcttcccgaaactcctccgggatcgcctccccatctgcaccggcatacattttctgttcccggtgttcttcctgtatccactctctcatccgtgtgtttcctgtatctttctatctacagttattcttctccctgttattcagagaagtccctgtactgtctgcaggaatgctgtttctgacgttccgtgaaaggtaacgctgttcctgctttttactcgtctgcctctgtctccgcagccagtgtctcctccggagctgtctctgcagccatctcacccgggacaacgtgctgtgcttccagtccgtggagctctctcacctggttttcgatctcctcacagatcagcggattctgcagcagataattctttgcgttttcacgtccctgaccaatcttcgctcccttatacgcgtaccaggaaccgctcttctcgacgatatttgcgtcggcagccagatccaggacatcgccctctcgggaaattccttttccgaacataatatcaaactcagcctctttaaatggcggagcaatcttattctttacaacttttacgcggacgtggtttccgatcacctcgccgctctgctttaaggactcggttcttcttacgtcaagacgaacggaagagtagaacttaagggcgcgtccaccggtagttgtctccgggtttccgaacataacgccgaccttctcacggagctggttgataaagatcacgatacagtttgtcttgctgatgatcgcggtcagttttcttaaagcctgggacatcaggcgggcctgtaagccgacgtgggaatcgcccatatcgccgtcgatctccgccttcggaacaagcgccgctacagagtccacgatcacgatatcgacagcaccggagcgcaccattgtttccgtgatctccagcgcctgctcgccgttatccggctgggagatatagaggttatcgatatcaacgccgatatttttcgcgtataccggatcaagtgcgtgctccgcgtcgataaatccagcgataccgccgcgtttctgtacttccgctaccatatggagagcgaccgtcgtcttaccactggactccggcccgtagatctctacaacacgtcccttcgggactccgccgaggccgagagcgatatcaaggctcagagaaccggtcggaactgtctcgatattcatattggctccggaatcaccgagcttcataacggaaccttttccataagctttttcgatctgtgtgagagccgcgtcaagggcttttaatttatcatctttattcatattcttcctccaaaatccggaactgcactttttattttccggataacaaaatcgatcagaatccaggcggtctcccgtaaaatctgcaggatcaacgcagatgccgcccgatcagtcattagatgcgaacaagtgttctgtactcgttaatcataatataatccctgtaaaaagtcaaccatttcttgttgtttcttcgcattgcgaagcagtatacttccctcccgtctcctttcgttttattcatttggctttccacgattctttcggcgacccgccggtgtgacgatctgcagcacatattttttcgtgctcactatatcagatcgatgatccggataaactccggaaagatttcagatatgggtactatatcggatttccatccggctgtcaatcggcatccttcacaaattccggggagatttttatacatgtaccacttgttatcgcgacagtgccaaggcctcgcgcaagcgcggactttggctctttgttcgcgtaaatcaaaaagacggcagcccatgcccacaatacacagtctgccgccttacgctcagcctttccggctgtcaatatttcattttaacaagaatcagcaagaattctcccacctctataggtggtgagatgaattgctatctcttgcatagtgccatagttggcatgtaaatatcagattattgcacatagctgtgctgtgtattgtaaacttctcatatattgatttttgcagtcgtgctatatcatcaattctgcatacaatgaataagcctgaagcctgaagagaaaatagattgcagattgaacagaacaaatgttctgaaatgtaatagacaaatgatctcatttgtgatatgattaaatcagtcgaaataaaaagaaaggctgataaatatgagagaacttgacaataatgcacattcagtatttttactctattatcatctg

SEQ ID NO: 2015 - DNA, 1809 bp, Unknown
  gut microbiota DNA sequence
gttgaaggcgttcgagtgatagattaaggaggaagtaagatccatggaattaaagtccgtagatgccgctctcttacagaaagcggttctggccgcagcaaaaggccttgaggcaaaaaaagaatggattaatgaattaaacgtatttccggttccggacggagatacgggtacgaatatgaccatgacgatcatggcggctgcgagagaagtggctgcgatcgagaacccgacaatggagtccatcgcgaaggctctctcatccggttccttaagaggcgcccgcggtaactccggcgttatcttatcccagttattccgcggctttacaaaggagatcaaggaatccaatgagattaccgtgacaactctggcaaacgcgtttacccgcgcgactgagactgcttataaagcagttatgaagccgaaggaaggtacgatcttaacagttgcaaagggaatggcagaaaaggccgttgatcttgcgacacagactgacgatgtgatcgacttcctgacccaggtgattgaggaaggcgactatgtattaagccagactccggagatgctcccggtattaaaacaggcgggtgtagtcgattccggcggacagggtctgatgcaggtcatgaaaggcggtcttgacggtcttttaggaaaagggatcccgtttgatgcggtcgctccggcctccggaaatgaaggatccgcaaagccgaaggtggctgcaggaagtgatgatctttctacatcggatattaaatacggctactgcactgagttcatcgtaaacgtggaaaaaccgtacgatatggaggaagagcagaagtttaaaggatatctggaatccatcggtgactgtgttgtcgttgtctccgatgacgatatcatcaaagtccatgttcacacgaaccatccgggtctcgcgttcgagaaaggcttaacctacggttccctttccagaatgaagatcgacaatatgcgcgaggagcaccacgagcgtctgatccagaacgcgtcgaacgttgcccagacaccggatgccccggcggaggcaaaagaagaagctccggctgcagatgagccgagaaagccatacggatttatcgctgtctccatcggcgaaggtctcggcgagatctttaaggggatcggtgccgactatctgatcgagggcggccagacgatgaacccgagtaccgaagatatgttaaatgccatcgatatggtcaacgctgacgtgatctatatccttccgaacaataagaacatcattcttgccgcagagcaggcaaagagtcttgtggaagataagaagatcttcgtcgttccgtcaaagaccgtaccgcagggaatcgcagctctcatcaacttcctcccggatctttctccggaagagaaccttgagaacatgactgctgagatgggacatatccgtaccggccagatcacctacgcagtccgcaatacaaacattgacggaatggagatccacgagggcgatatcatgggaatcggcgattccggcatgctggcagtcggtcaggatgtggaggagacggttcttgaaaccttaaaacgcatggtggatgatgaatcagaactcatcagcgtctactacggcgaagatgtgacggaagagaaggccgaagcgctcgtaaagaaggcgcaggaagcattcccgaactgtgaagtggaattaaacgacggcggtcagccgatctattattacctgctctctgtagagtaagcagaaaagtgtcccggaaattgcaggaaccgctcagagtgtttctgtacgatcctgta

SEQ ID NO: 2016 - DNA, 4430 bp, Unknown
  gut microbiota DNA sequence
tccccttgttatcgcgacagtcgccaaggtctcgcgcaagcgcggactttggctcgttgttcgcgtaaaaaaaggagacacccgcaggtatctccacttctactctttctcttcagcagcttcctacgttggcatgatccaaatcaggtatacgggtcttggcgatgcagccaactctcagcctgatccgtcaggctccccggtctgtttattttcttttttctgacaagacttactatatactttccgcgcggaaaagtcaagtttgcacccggtttcgtacatgctttcaagactgcgaatttcgcatggatccatcgatatttttcatgtgtccgtgcagcctgcttacagccttgtgttccccgtccatcttttttccggcggaccttccagaaatttcctctcttgcctttttccctctcctgtgctacaatccaaatcggttaacggaatgcagcatgagggggagcgccctggtgctgcggtcaattcaattacttgatgacgaagaccagattgcgagggagcccgtgttccgggctgagaggatcccagaaaggatcgaccgtcccatgccgcggatccatgtccgcggcttgtcagcattctgcctgaaagtcatttttacggcatgctgcagaaagcatgcctttttctttatccgcctgtttcttccggattcatggcagctgaacgcgttctatttcttattcggaacgatcacgctctcacagtgtcctgaccattagcggatattgaaactatttcaccgtatttcccggtgtcccattctttcagcagaaaatatattctgccctgacgggctatggaggtattatattatgagaaaatttgttgtaccggctctctccctggcactctgcctcggactcactgcaggatgttcttccaaaacggacgcaccggctgcttccacaggggagaccacagctgccgcttctgcggaaagcacttctgaagcagccgcttccgcagagacaaaatccatcgattccttaaagatcgctttctccccgtatgcggacgcagatacgatcacgacagcaacagagccgttagagaaccttttaaaagagacactgcttgaaaaaggctacgatgtcaaagacatcgacatgaccgtcggaacaagttacaccgctgtcggtgaggcactgagcgcaggaagcgctgatatcggatttatctccggaggaaactatgtcctgttctccgatgactgcgacgttctcctcacggctctccgctacgccatcaataaggactccgaagatccgaaggactggaacgacggcaccatcgaggaaaacacagacaaaatgagcacatattaccgctccatcattctcgcgggaccgagtgaaaaaggtcaggaacttttagcaaaagtcaacaacggcgaggaacttacctgggatgacttaaacagcgccacctgggcagtcatgggaccgacctccgcgtccggctacatttatccgtccttatggttaaacgagcgctacggaaagaccatcgctgacctcgcaaatgcggtccagtctgattcctacaccacatcccttgcccgcctcgcctccggacaggcagacctcatggtctcctacggccatatccgcacaaaatatgcgcctgactggaaagagaaattcggcggcactgatgatatggtaaaacagacaggcatcatcggcgtcacagagggaatctacaacgatatgatcgcatacagcaaaacttccgaccttatgcaggacgctgacttccgtcaggctctcggtgattccttcatcgagatcgcaggaactgatgaaggcaaagacatcatcaaagtcttcagtcaggtcggctacgagtggggcgatgacgcgaactatgacggggaacgcgccgcacaggaaatgttaaagtctatgaactaaacagatcccaattttttactgattcattatttgtaaggcaggtatcttcatggaaatcgttcttcagaacattggaaaacaatttaaaaacgggacacgcgccctggaccatgtaacctttaccatccctcagggcgagttcgtctccgtgatcggtccgtccggagctggaaaaaccaccctgttccggatcttaaacggcatggagacgccgggggacggggctgtcctttttgatggcagcgacatatcgtccatgtccggaactgccagaaaaaatgtaaagagatccatcggcaccatctaccaggatttctgtctcgtggaaaattccacctgccttgcaaatgtgctcactgcctgtctgccggatatgggatttttccccgctgtgttcggaatctacggaaaaaagcgccgggcagaagcactgaaatttcttgaccgcgtgggactcttggaaaaagcagaagaaccggtaaaaaatctctccggtggtcagaaacagcgcgccgccatcgcgagagccctcatgcgtcatccaaaaatcctgctggctgatgagcccgccgcctccttggatccggtcaccgggcggcagatcctgacacttttaaaggagattcaggaaaaggatggcgtcacgattcttatgaacagccataaccttgaattttctcaggagttttccgaccgaatcatcgggctgaaggacggaaatgtggtttttgatggaacgccatcggaaatgaatgaggaaatcttgagaaacatttatctcagtctcgaagactcccacctatcttaggtgatgaataatagaactctgctatttatgcatttatccatcccaacggatccttgcagagaagcatttcagaggaggaagcaatccatgtacagaaatcgaaaaaaatatataaaacctgtcggctggatcctcttccttctctgcttttacgccgccgcgtccttcaccggatgtgatccggctctttttgtttcaaggagctcccatctttcagatctggcggccgacatgatgcggccggatctctcttattttccaaagatcctgctgccgctcttttacacgattcagatgtccgttactggtaccgtaacaggatccgctctggcactgatcgtttcccctttcggcgctgtgtccctgcattttccgtcctgggcaaggcgtttgctgcgtctcctgatccagatactccggtcttttccggcgctgatcctggcgctcgccgcgacctttctcttcggactcggaacctttgctggaaccttcgcgatcacgctctacacctttgcgatcatgactaagctcacctacgaggatgcggaacatacggacacagctccctatcaggcccttatctctatgggctgtgcccgtttcccggcatttatccatgccgtcctgccggagattttgcccgcgtttctgacaaacgccctgtacctctttgagacgaatgtgcggcacagctccattctcggatacgttggggcaggcggaatcggtctgatcttaaatgaaaagatctcctggcgggagttccacaaggtcggaacgatcctgctgctgctctttctcaccgtctgtgtcatcgaatccgcgaaccggtattttacagctgtgatccacagcggacagatcgcagaacttttttcaggcagaaaggacttgtccaaaaagacccgtatctctggacggatgatccttttcggttttgcagtgcttttcctcttctgcctagcgacacagactccgccggatttttcaagaacaagtgccgctgccttaaaaagtatggcagccggactcacgcatccggactggagcttctttttctccgcaaagaaagacgggctcggctatctgcttcttgagaccatctgcattgccattgtcggaacagccatcggtgctttccttgccgcaccccttgcctttctcaacacaagacgctttgtccctgctccgaccgcttttttctttaacctgatcatcatggcgatccggtcgatcccgtttctgatctatggtctgatcttcatccgggtctccggtcccggcgccttcacaggtgtcctgacgttagctgtctgcagcatcggacttctcacaaagcgcttcaccgaatgtctggaggccatcgatcccggcccgtaccgggcgttcctcgccatgggtgtccacccggttccagccgtcttccacagcgttctcccgcagatcgccccagcattctgctccgccgtcctctaccgctttgacgtcaatatccgtgaggcgtccgttctcggactcgtgggcgcaggcgggatcggcgcaccgcttatcttcgcgatgaaccagtacgactggaataaggctggagcgatccttttgggactgattctgcttgtgtggggtgtggatattctgtcttcacgcagataaattcaagtcgaacgtccgtgagactt

SEQ ID NO: 2017 - DNA, 1429 bp, Unknown
  gut microbiota DNA sequence
ggagacggccggaaatccggttgacggagcgggtgtatggtgctataaatgaaatgtatgtacgctgcaaaatggggaaccgggtaaatactgtgaagaacaggcagaccggagagcggcggataaaaatatcaaataatgagtagaaaaaacagggaggaacaggaatgctgtacgaagaaaagcagattgagacaataccggttggacctttaggtctgattccgctgaaaagctgtgaggatctgggtaaaaaggtagatgcctggctggttgagtggagaaaagaaagagagagcgagcacaagaccacgatcgcttttgctggataccagaaagattcctatattatcggcgcaaagactccgcgtttcggctccggtgaggcaaagggagagctgacagagtctgtccgcggtgatgacctctatattatggtagacgtctgcaattataatatgacatacacgatgaacggcttaaagaaccacatgtctccggatgaccactatcaggatttaaagcgtgtgattgcagccgtaggcggaaagggcagaaggatcaatgtgatcatgccgttcctctatgagagccgtcagcacaagagaaccggccgtgagtccttagactgtgcaatggcgcttcgcgagctcgtcgacatgggcgttgagaacatcatcacctttgatgcccatgatccgcgtgtccagaacgcgatcccgttaaagggctttgagacggtacagccgacataccagtttatcaagcacctgttaaagaatgagaaggatcttcagatcgacagtgaccacatgatggtcatcagcccggatgaaggcggtatgggacgtgcagtcttcttcgcaaacgttcttggactggatctcggtatgttctacaagagacgtgattacacaaagatcatcaacggccgtaacccgatcgttgcccatgaattccttggcgcaagcgtagagggcaaagacgtgatcatcgttgatgatatgatctcttctggtgagagcatgctcgacaccgccaaagagttaaagagaatgaaggcaagaaaagtattcatctgcacaaccttcggcctcttcacgggcggcttaaagaaattcgacgaatactatgagaatggcattattgaccgggttctgacaacaaatcttatctatcagacaccggaactgctttccaagccgtactatatcaacgtggatatgagtaaatacattgctcttatcatcgacaatttaaaccatgacgcatccttgagcgagcttctgaacccgaccggaagaatcaaccgggttctggcgaagtatcgcgctggagaaagataaaaaagcgcctgacgtttatttggactccgaggttcggaaaacgtcaggcgctttttgatgaaaaaaatataaggatcatggcg

SEQ ID NO: 2018 - DNA, 4443 bp, Unknown
  gut microbiota DNA sequence
ttgacgtgatatacttgtcttgctgagtaaaaaacagtgacgaatgatttttgggaaggcaggagtacgatgatggagataaagactggaatttccttgcagacaaagcaggtgctctcacagatgcaggtggagtccttaaatattcttgctatgtccatgacagaattaaaagattttctgcagaaggaagaaattgaaaatccactgctggagttttcgacagagcgcggagaggaggctgcgcctgttacatataaggagacggaacggttttataatggtacagaacgggaaaacagccgggagaatgagctgtatgagatcgaggacagcgaaaagtccattgaggatctggtaaacatgcagcttcactggaagaagatcagcgaaacggatcggaagatcgtggatttctgcgtgcagtccatagaacagagcggatattttctgattccggttccggagatcgcaaaacggttaaatgttccggaagaacaggccgggaaggttctgtccatgctgaaggagctggagccgcagggaatttttgcgtccggacttgaggaatgccttctgattcaggttcaggggatggatgaggaagagatcttgtccgaaatgataaaacatcatcttcagaatatcgcggagggaaagatcagtacgatctcgagagcactgaaactatcatctgcggaagtgcggaagatgatccatgtcattaaagagctgaatccgcgccctctgaacggaatcggtggtgataaggcccagtatattgtcccggatgttcttttaagccatcaggacggggtgtggaacatcgagctgaatgataaatggaccggaaatcttcagagtaatgactattacattcatatgatggaaacggctcaggatcaggaattaaagtcatactttgaaaataagttacgaagggcacggtttattataaatgcggtggaacagcggcgggagacacttacagccatcaccagagagatactgaaacgtcaggagccgtattttctcggaacggggcagctaaagccgatgacgctggaggagatcgctgatgcgctggagatccacaaatctacagtcagccgtgcgatccgtgacaagtatctgagggcaccgtcgggatgtttcctgttccgcagcctgtttacaacagggatcccatcgggagatgggaatggcgatgtgagcagaaatgccgtgaaagcaaaattgaaggaactcgttgctgcggaggacaagaaaaaaccgtggagcgatgaacagcttgccggacttttgcaggatgccggaatgccgatctcaagacgtacggttgccaaataccgtatggagttgggaatcggtggggcgttccagaggaaagatggatgagggaacatatttcggaatccgtttgcacagcgcgggacatttttagaaatgagcacatcagcagctaaaaacgataaagcgctgaaataaaaagatgcggtcagggatgcggcagcctgattttaccggaatcggtatagggcaaatgtcgtgagaaaaatacgtttgagggagaaaatcatgtcattcaattacaagagtctacttccgacaccggcacagatcaaagcggaattcccgctgacaccggagtgtgtggaattaaaagtggcaagagataaagaagttgcggatgtcatcacaggaaagagcaaaaagttccttgtaattatcggaccatgttccgcggaccgcgaggacgctgtatgtgagtatatgagccgtcttgcgaaggttaatgagcaggtaaaggataagcttgtgatcgtaccgcgtgtatacacgaacaaaccgcgtaccaccggcggcggctacaagggaatgcttcatcagccggatccggagaagaagccgaatatgtatgagggacttgttgcaatccgtaagctccatatgcgcgtgatcgaggattatggatttacaaccgctgacgaaatgctgtacccggaaaattacagctatctctccgacgtactttcttacgttgcgattggcgcgcgctccgttgagaaccagcagcaccgccttgtatccagcggcatggatgtcccggtcggaatgaagaacccgaccagcggtgatctcggggttatgttaaatgcggtctatgctgcccagcatggccacgattttatttaccgtacatgggaagttgagacaaagggcaatccgcttgcccacacgatcttaagaggcgcagtcagcaaacatggccagtgtctgccgaactatcactacgaggatttggaacttctctacagcctgtatcaggagcgggagcttttaaatccggcctgcatcatcgatgcaaaccactccaactccaacaagcgttacatggagcagatccgtatcgtgaaggaagttcttcacagccgtcgtcactcagaggagatccacaacttcatcaagggtgttatggtcgagagttacttagagccgggctgccagaagatcggcgagcatatttatggaaaatccatcacggatccatgtcttggatgggatgatacggagaagctgatctatgacattgcggatgagatcaaataagagatagaacttatcggtatcagcgcgcggaaagagtgcgagagaacagaaaacagaacaatgaaagccatcggaatgaagaatgaaagttaccattccggtggctttttatgtaattaggaaattatgaggaatgatgtgtattcgcgcgaggatatagatcgttacaagcgaccacgcgagacgctcggatgtgccaaggcacatccttttgcataagattatttgattacgctcgtatcctgcagggctttccgcaaaaagtctctctcgtaaaaaaagatatactgctgcagcacacccgcgaatcccggatatttcgagaagttctcctcgatcagcgcttcgcagagccgcgtttcgggaacatgtccggtgcagtggcttttcggggcatactcccgcagcaggatctttttgatccaggtgtccaccgggaaagcgccgatatggtgaaggccgaagagacagatgcagttggcgaccttgacgccgattccgtagcaggagaggagaacttccatggagtcagcgtaattcagtttcctcaggcggtcaagatccagcttaccggagcaggcatcctcgcagatccgcttgatatattttgcgcggtagccaagctttaaggcgagaaggtcatccagagaggcacggtttaactcttcaggggatggaaatgcataatagtatccagagacagtcggcggaattttatgtcgtgtcccatatttttcgctcagcgcttccaccagtgcccggatcgcagggatcgttttttgctgtgagataataaatgtgatgaccatctcccagagatcctgattcaggatccgtatcccgctgccgaaagctgccgccctcgagagataatcatccatcggatcgatcgcccggatataagtatcataatccgtcttaaggtcaaaataatgttcccagaatgcaaactcatcacttagacagtgaaaagttacctcgtctccagtttgctctacgataagaaaatgtctgccgctgatgacccggtaagccgtctgtgaacgattcggatcacacggaaccatgcggaaacactggccggagtcggcgatctgacggaggttgaagttttttaaagcttttgtgatcataaagtctccataaagatgtatgaaatagttcccggataaagcgggaaagtatttgaagttccatgcaaatgcgggaactgcaggtatcaaaaataccacccggcaggaagctccagcgggtggtaaaaatgaatgtcatatttcagtctggcggaagaaaattactgctcagctttcttattcgctttcgcctgaaacttttcgttctggataatgaagcgctcgtggcggcctccgccgatctttcctttggcatcgtaagcggcaacatcaaaaacgagacggcgtccgtctacctcgacaagttctgtctcgcaccatacggtcattccaagcggtgtcggtgcgtcgtgtgtcacgtttaagagtgtacccacggtaccgcagccctcatcgagatggtctgcaacactcatccatgcggttttttccattaaagcggtcatagccggtgtcgcgaacacgtcgagtgtgccgcttcccattgtttttgcagagtttgcgtcagatacaacaacttcctgtcttccttttattccagcttccagcataagtttgtcctccatgattaaatgaatactgtaactgttcagtagcctcacagttacgcgcaaaaatccattccaaatcggctgtgccgacaggatttttgccttatagtctaagttttcttacggtcagtgcagtaaatgcgcagacc

SEQ ID NO: 2019 - DNA, 23524 bp, Unknown
  gut microbiota DNA sequence
caaatccgatggcgctatcatacccttcatttcctattttgtcaatatgtttttataatttttaaactatatatttaatttttttaaacttctcgcgctatcgttttaaaattttcatattgttttcaggatatcttgcgtcgcgctaccaccggaacaccacgatccccacaatcgccagaaccgcaccgataagttttctccactcaaacgccgctttctcgacaccgaagagaccaaatacctccgccacataggagaccaggatctgggtcacaacgatgagcagtgtcgcctttgccggacccaggccgtccatacttttgatcacggtccaggtgataaatgcgcccatgacaccgccaagcagcatgtacttccggtcgatggaaaacatcccccagatttccccgcgtccggtaacgaaatataagaccacgcaggtcacaagcgccgtcatctgcacccatcctgctgccgcccagatgctgctctgcttcgtcacctccgtgttaaaaatcccctgcagactcataagcgctcccgaaagcagtgccaccagaattccccacatataaaaaacctcctgaaaccatgtttcccttaggattccatgatcgggaggtttttatacctgatattcacttgtagctctgttttatctcttcttcctgcacgccgcctgcgccagatgcttcgccagcaccgccgtcgtcacagcaccaacgccgcccggcaccggtgtcgccgcggatgccttttcttccagaccatcccagaggacgtctccgcagagttttccgttctcatccacattgatcccgacatcgatgaggacagctccctcttttaagaatgacgcatccagcatcttcgcctttcctgctgccgcaacgaggatatccgcctcctggcagacagccttcagattctcggtcttcgtatggcagatcgtcaccgtcgcattttcctttaacatcagcatggacagcggacgtccgactaccatgctgcgtcccacgatcaccgcgcgttttccgacgatcggaaggtcgaatgccttcaggacctcaataaccgcctccgccgtacacggagcaaatccatctttctcaccggcaaacacctttgccgtattgaccgcgcagatcccgtcgagatccttttccggacggatcatcgcctcggcgcgcttttcattgatgtgcttcggaagcggacggaataacaggatcccgtcgatcttctcatcatcattgatcttctggaattccgcaaagaactcttcctcgctgatatccgctggatatgcaaaagacttcgcttccattccatatgccgcaatgcgtttcatgacatttctctcgtaggagaggtcatccgggcgctccccgatccggacgatggccgctgtcggcacatatccgtttaattcctggttcatggaaagaacctgttccttgatctttgcagaaacctctgctccctttaatgtaatcatcctcttaccgcctttaacacaatctcatagatccggtctgcccgttccgttccctttcttataagaagctccgcctggctgttcactgtctcggcatacccccggtccttcatcatcttcgtgttgatatacacgctcatgacagcgccgagaagcgcagcccggattccctgaatcccgacaccagcgtcactcaccgcaagccggcttccgtgaagcgccagaaactcgatatcgtccatcacactgaccgcccgctccatgacttccataggaacctgcgcagcagctttcaggcactcttccatccgctcttcctttgcttttttctcctcgtccgtctccgccttcatgcggtaaacctccgaaagcggctcaaacgcctgctcgtccgccttctcgagacggatgaaatccattctcgcttcctgtaatcgtacaaggatcttctggatcttttcctcatatattgcaaatttctttttccctgtcgtcaagtttcccaccatctcgccgagggctgttccgacagcgccgtaaaccgccgctgcgcttccgcctcccggagttggtgccttggatgccagaacttccaggtattcattccactgtcccatgaaatatttccttccagattttctctccgcagttttgctttgcgttctaaaccggcaaacgctgcggccgttgctgtattgtgcggaatcgtttacggaatcttctgttcagaaaattcctgccgcacccagcagcgttcttcggattattatccatgatttcttgattcttgtcaatcctggagcactttttcctatcgtttttataggatgattcaggcacttttgtgcataaatccgtctccggatcgtcattgtgaccggtctctgcctgctgaatctgatatcagccatctgcattcttccattacagtcgccttttcctgacattttatcattcatatcgtcaaccctcgtcatcctgcttctctgtcccctgcatttatacgcttgatatgcataatatgcaaaattcatttataaaaatacattttatgcttgacattccgtatattcagttgtatatttatgaagcacaacgaaaataaaacgtctgaaataaatcggaggtcttgattatgaaagagaaagttgttttagcatattccggcggtcttgataccaccgtactgatcccgtggttaaaggaaacttacaactacgacgttatctgcgtctgcatcgacgttggacagggaaacgaacttgacggtctggaagaaagagcaaaatactgcggcgcttccaaattatatatcgaacacgttgttgatgaattctgtgacgagtatatcgctccgtgcgtaaaggcaaacgctacatacgagaacaaataccttctcggtaccgcaatggcccgcccgctgatcgcaaagatcctcgttgatattgcaaaaaaagaaggcgctgttgcgatctgtcacggtgctaccggtaaaggaaacgaccaggttcgtttcgagctcggtatcaaagccctcgctccggatatgaagatcgttgctccgtggagaatctgggatatcaaatcccgtgaagatgagctggaatactgtgcaaaacacaacatcgagcttccgttcaagaaaaatgacagctacagccgtgaccgcaatatctggcacatcagccatgaaggtcttgagctcgaggatccgtccctggctccgaactacgaccacatgctcgtactcggcgtaacaccggagaaagctcctgataaagacacagagatctccatcacattcgaaaaaggcgttccggtcgcattaaacggcgagaagatgaaattctccgagatcctcacaaagttaaacgagctcggcggcaagaacggtatcggtatcacagatatcgttgagaaccgtatggtcggcatgaagtcccgtggtgtgtatgagactcctggcggaaccatccttctcgaagctcacaagcagttagaggagctgatcctggacaaggagacattaaaattcaagaagaacatcgacaacgaattcgcagatgttgtctactccgcaaaatggttcagcccgttacgcgaggcattacaggcattcgttgagtccacacaggaatacgtaaccggtgagtgcaagatgaaactctacaagggcaacatcatcaaacagggcacaacctccccgtactccttatacaacgagagcatcgcatccttcacaaccggcgacctctacgatcaccacgacgcttccggctttatcaacctctatggcctttccacaaaggttcgcgcaatgaagaaggcagagatcgagaaaaatcagaaccagaactaatccatttctctcataagaacttaggcagacagccccggcagggatttcccgccggggctgttaatatctgtttaccagaagtttctacaaaaagaccgggaacatttttcctgctcccggtcctctttctatggatgcgcgatacatgacgctcctatctgtgcgttctgtcaattacttcgcatcttttttataattcttcctggcttactccctccagtacaatatggcctccaggtaaaagcgcaccgccacagccatctactcgtttcgtacctgccgcatagaattcaccatcaatgcacattacgctgtttagcatcgtactcatcgcctgatccaccggaacaggaacaatcttatgccccatctcttccagtatttttcttgtatctccggaaattccatactccacttcaagtccctgggccctcgtaaggcaattgatatatggagcattcaccagctgctccggagtcatgtcgaaatcaattgcattcacgattccctgaagagttcccgtaataattctcggtccacctgctgccccgattgcaaggaatggtttaccatctttaaataccatactcggagacatactggaaagcggcgtttttccaccctgaatcgcattggcacttccatatgcaagtccctgacttgtcattgctcctactgccgccgagaaatcggacattgcgttattcagtacaaatccaaggccatcgacaacaattccacatccaaaccagtctcgaatcgtctgtgtctgcgaaaaagcatttccgtctttatccattaccacgaaatgggatgtatttccaggatactgttttgcttcgattccatcggccgatgcaaactctcccgccttttctcccgccaatgtaaaacgctcatgagcaaatttcttgcttgtcaaacgttctacatcgacattcacaaaatccggatcaccaagtgctacacttctgtcagcaaatcccagtttcatagactctgtcaatgcatggatactggctgctgtattatgtcccatggaacgaacatcatagttttccaaaatgttcagcatttcaaccagtgcacagcctccgctcggcggtgcaaatgcggcaacctcatatccccgatatgttgttttcactggttcgcggaattttggttcataactctccatgtcagaaacatcaaaacaaccaccacgatcattaatcagatctacaatctgttttgcaacttttcctttatagaaataatcaactccctgttccgcaatattctccagaagatcagcaatctcctggttcttctggatctcaccgaatcgatagaaacttccatcttccttcagatacagttttcgaaatgcttctgaaaggcgcattttacgctcaaccgaattgtcatacatcgtcagagcacctgtatagcttgttccaaatccattacgagcacaacgaattgccggagctgccacatcttttaaagtcatagttccatatttcttcaatacgatatccatggtctttaaaagtccgggaagcgccactgactgaccaccaagatctttccactcatcctgtacttcaccatcttttataaagagatcagctgttgcctttgccggtgcgatccctcttccatcaattccttctgttttcccagttttcgcatcgtacagtaaggaaaagcatccgccgccaataccagaatgatggggttctaccacagataacgtcagtgacaccgctactgccgcatcaaacgcgtttccgcctttatttaaaatgtgaacctcacatgactaaagtcacgtgcttctcagccgttttaaacggcaagaccggataccagcggatacgcctgaaacttagaactgcgcagatatgcgcatcctccatgccgggtacggctggattccacataacaggtaatcctccggatatctgcctgtgtttatgcagctttcgaacatccatactcattcttaaggatgagcaggtcagcataaacgcatgaggttctgcgctccaccgcaggtacttttgcctccagtgaagacctttccgtttccggtaaggtttttatgatttcccgaatccagtatctcgctccgatattgtaggatgctgacagatcacagttatactgttttccagattggaaaacacacaggctgtggttcttcggatctcggctgaccggtccgcttccatcatacgccagacggctggtattccatgcgcagacacgggacacacggatcccataccggtgtgctttgtgttcacacatagtctggatctcccgtttcttccaaagatgcagtttctgtcgtttctttcctgaaatctttcccttcatttccaggtactcaaacacgatcacatccgcatgattctcatgggcatattctgcgatcgaacgggcagtctttctggcaagttccgtattcagacgtttcgcatacgcccatcggcttccgatctgcttggaactgtgttccttctggaatctccggatccttccgagtacatgggacagccggtctttttcactggggaaattgataaatttccggtccaggacagctccgtctgaccgcatgatactgcagactgcatccgtattgatcccgagatccacactgcagatgatctgatcctctataggtgtttttgacaatgtaacttcttccgtataggaaaagcggaggaaatatttctgatgtcgtttttccaaaaccggagcagaagacttttttccggaccagtgcctgcgcaggtactccatatccgtatgaagcagacctgcgcagaaccatttccagtcatgaccatcataaagtttcaggcaggccgcgtcttcgctctcttctcctggtttgtacatgacatcccgataaaataccggcatcgcgtggttttcatatacaagcttcggttttccggaaagcgctccatctttccactgttccagccttgtatggtacgaggaaacactcccgagcgcatgctggatcgccgctcttctcagatatgacggcattttcgggaaacgggcatcaaagtcaaatcttgcatgattcttcttagtttcatgtaccagatgttccgcctcattaaatctccgttttttctgatcgatcatggataactctgtccatacggtctcatatatctccgtcagacagcagaccgcctcccggtaaagcgccagcgtatggcggatcgggatattcttatttttaatttccgcgccatagctggatacgacctgcataagtttcctctactttctgttctctttttctttctgtccttcgatataagccatgatctgttcccgactccggtcactgacggtcacagcacagtaagatgggttccagagatgtccgccccacagctcccttttcagttccggatgtgcaagaaacagctgtctcgcaagatttcctttcatgatcttgatcatatccgaaataaagaactgcggtttacaatccagtaacaggtggatatggtctggcattacttccatcgcaaggatccgaaattgatattcttgcgcgatttcctgcagcatttctttgcactcctgatccagaccattggtcagaacttccttccggtatttcgtgcaccagaccagatgatattgaagcgagtacacatatcctctaccatacgaaagagaattttctttaatagtaaatatatctttttccatatggatattataccatatgttactcagtatgtaaacatacgttcgatattgttgtaaataaatagcgcacctaactcatcactgaagtaacgagaatgcggtgcgcgtttttcaaatctttctatctgatatctttgccatggttatgtaaatttttcttgcggtgcctctgtttcgaatgtgttttcttcgaataaagctctatcggctcacacaaacctctctaatttttcatatccaacatgcatcttactcaaagtatctttgacgaaacatttttcttaaacctcttacgtttttctttcttgcttgaagaaaatctttcagatttgtcctttaaatttcatgttttattgacactttagacacaactttatggttcaatagtagacgtaagaaagagatctgaaacatctgtttccaaatcctctttccttgcaactacaatttcaaatacaggaaggaagctttgattatgaaaaagaacttattattgactgctgctttagcaggcgttctcgcattagcaaccgcatgctcttcccagagcacaaccaccgcaaccacagctgcacagacaacagctgctgaaactgccgctgcaaaggagacagctgaagtaaaagaaacggctaacgtaaaggaaacggctgacgcaaaagaaacggctgacaaaaaagaaacggctgacgcaaaagaaacaaccgaaaaggccgatgaagaaaaagaatccacgatgaccggaacgatcagcgatatcaaggactttatgttcacgatcacctccgacggaaatgactatgcatttaccttcgataacgacaaaaagccggaaggactcgcagaagtcaaagatggcgataaggtcaccgtaacctacacaggcaccgtcagcgccgttgatgctttctccggaactgttgtatctgtaaaggctgcaaaataatcgttcctgatcaacggaagagaatatgcctcttcactaaacgaggaagttccatcagaatcttccgttaatcaaatacccctcaccttgaaaatgcagtgcactctcaaggtgaggggtatttttttatttcttcctaagtctcacaccaaaataccacagcggaagcagatacaaaaagactgctgccacgatcgatgtaagcggtgccgacacggatgccagcggaaccgcaccggcaatcgaccatggaactaacggtgcaactacgatcacagaattttccatatcgatcgcaaatttctgagcgtccggctccagttccttgcagatctgatctaccagcatcgtcgccagtgtctgattgcaggccaccataccggctgctgccgcagttccaagaatcgtcccaaaaacagaaaatcttctgctaagtgtccccatctttgattttaatccgtttaaaagacctgttgcctcaaaaattcccgaatacgaggaagagatcgtgatgatcaacgccacccggaccatggacatgatcccgccgccatcaatcatagcagaaagtgacggatccggagcatgataaccgtttacgagaagcgcgaacagacctgacggatccgtatgctgccagaacagacataccccgatcgcagtgacaatactcgcgagcattgccttgcgaacctgtacccgaaacagggacaagaccatgatgacgatcgccgggaggatcggaaccaggcccagacggaatacaccggcaaagctgtctgcaagagtcatgctgccgctacccactgccggaaacaaaatcccgcagatcccgtaaaatccgcaggtcaaaagcgtcggaataaacgcagtcttcaccataaggcgaatattgtcaaagatatttgtatgcgtcagctccgccaccagaagagcactcgtcgaaaccggagaacaacgatctccaaaaaagactccggaaaggatcgctccgcctgcaaggatctcgttacaccccattgcctttgccatcgtcatacagatcacacccatggtcgctgctgtaccaaatgccgttccagtcaggacagaaaccagagcatttaaaagaaatgccatcaggaccatgaccgccgggttcataagtcccgcacagtaggatacgatcgccggaattgtccctgccgccctccagagcgctgtcagcatcccaatgagtaaaaacgtaattaaaatatttttcgccgtcttgattcccttccaggacatcccgagaatatctctgaccgtataaccgcggctcaaagtgtacgcgaaaaagatcagatatccaagtgccaacgctgccagaatcgggattcccgcaaagatgcacccgatcagcgtcaccgcgaacacgaccagaacgaccgtctcactggtgtgtaccttcataatgtttacctcttccctgttttctttcgtgaaccattccctcagccagccgttccctgttcagatatcctgatccacctttatgattctagtatactcctggattttccacttgtctaactgtattttccgatatataatacagctaaaaaactgtatataagttacagctttcattcttttacacgattttcccagctcattctggctgtcccatatcctttatggtcagcacagctgatccgagactctgcacgacacttacaattaaactttctttgtaactgttcagtaccttcacagttacatgcaaaaatccattccaaatcggctacgccgatggatttttgccttttagcctaggttttcttacggtcagcgcagcaagtgcgcagacctactgaacagttacctttcttttttatattcaggaggttttatatgaactttctttccatggactactttctcatgaccgccgagaagcgcagcttcacaaaagccgccgatgctctccatatcacccagcagaccctgagcacccacatcgccaatctggaacaggagctggactgcaagctcttcgtccgccatgttcccctggaactcacctacgccggagagatcttttgccagtacgccgcagacttccagaaaaaataccgggcaatgcagcacgaatttgccgatctgactaaaaatgagcagggcatcctgcggatcggcatctcctttacccgctgccacgcaatcatgcctgcaatcatcacggaataccagcgccgctacccgcatatggaaatccaggtcatcgaaaatgcgaacactggactacagaaagacctgatggaacataagatcgatctcgccatcgcgaagttcccggattttctgccagggatcactctgagcgatttctatgaggaggaggtcgttcttctgcttgctgattctctgtttcatgaggtcatttccgatgcctccccagtagatgccctatttttacatcttccaaagactatctactgctccggctctgatttcactcatgacaccgctggcactgcctccttttctgttcaggatctccctgcactgacagattcacagccagaaccgttaatgttaaaaagcctggaagacttctcgatcttcgaacactgcccattccttctaaactacgccacagacatcgccggtcagctcggaagacacttcatcaccatgggcaacttcaaaccgatcgtaaagacccagtccgacaatatgggaatgcttctggagctctgcgccgccggaaaaggcgcctgcatctccccactgaaccttgccatgagctccctctcccctgagcagcgcaaaaaaatgcggatcatccatctcggacgatccgcaaaatataaaatccgcttcggttctctggaacagccttaccagtggaaggcgatccggaactttatggatgccgcgaacgctgcactcacaagaaccggcacaaccacctagctttccgttctctatcgtatgcggtgtgccgtttttcaaatgaataaaaatttctatcgcttctcccaactgaacacgatcaacctgcccggggcctctcaccctgccagataacaccagactggcagggtcagcatggacattagcgtcgtcacaaccacgcatctcgttgcaaacaaggcgtcactgtcatatcttgccgcaaaaatcgccgccgtagctccggcaggcatgccggtcatcagaacgctgattcccagtgatgtggcatcaagtccaagtccaagtccaacgcccagtgctgctgccgggagaatgatcagacggaatacagaaaacatggctgtatctttattaaagatcgttgtaatttttacatccgccaaaatcgttcccacgatcagcatcgtgagggcgctgttacaattcccaagatacttcactgtcgccgtgatgacggctggaagcttcacctgagtcaccatgcagatcaagcccagataaattgcgaccagacatggatgtgtcagcacgttcttcgcgactttcttcttatccaccttctcatccgccacaaaataagttgtccccaccgaccacatgatgatccgcatagggatcaggaaaattgaagtatacaaaactccgatctcattatagatcgcctctgcgatcggatttccgagaaatccactcattggaacgatcgtgcagtactggaggactttccttctccgcggcacataccggttaaagataaacttatttaaagtcagacagaccgcctgcatgatcaccgccgccagtaaaagcaacgcacaggaccggaatatttccatgttgaattcaatcaggcacgacttaaagatattacatgggatcaccacgttgatgcataaatccgtcagacatttctttccattggcatcgatgatctcctttttctttaagattgctccgacaatcatcaatgcaaacaaggttccctgaagactgaatagatcgagtaaattcatgtatatgcctcccgcctctttctgatgtaaataaatttttgcagcaactttatagaagtcttctcattgcccctgcatgtttcttaaagctatcatagcacggtcatatttctttgtataactgttttattcagtgaagtacacagctatttatctgttttttattcgaatttcaaaaaggtccccaatcgtcagtctttattacagccaacgaccggggaacttccaggactctatttttctttaccatacagcgcctcttataaaaagcgattccaaaacaccgccccatgccggagagcttttaccaccacgtcactccgctcttcaccatgttcccaatttgactccaccatatatccggctccggtaaagattcccgccagaaaagcatgataaaaatcttcctggtaatcgtatcgctcttcatatcgataaaagagtagatgatcgcgttatcgctggtatttttccaataactcgccggtcttgcgcttggggctgtctgcatcctttacacatagttcataacatcccacggacaatagatatcaaattcaccgaaatggtgaccatcataccaggcttttaccgttgcaagctgatctttcctctttgcatctgtcaggatctgatccacttatttctgtgtaaatccactgttggtatgccaagctttcgcacaccaccatctggtttgggaatctcaactcgtcttactggagacggaatatactttccacgataaatgcggtcggttatctcttgttgattttcctttagatatggaagagcctcctcaatggtcatgccatcaatccctggcgctcccttgtttgccttgactctcttatacgctctgttaaagttgtctttatacagtatcgcttccaaaagtcttggctgtgcactgcctctttctttccatatccgattgaatgaccttgacgcttttgcatacccttcgtgttccgcactatctctttgcgaacagccattgttttcaatgttttctgccatagacggccattcctcctttctcggtcatactcaagactcctactgattcggtccttcgcctctcggctactatgacctctgctgacttctgtgcgttcagcattgctttgcgcaatggttactcctttcagagcatatcgcacagacctccccgggtaccacacatttcttcctctccatctatctgcctcatttatcatacatgattccgtgtagttattgggcttcggcttgcttagcagtcttaccctcatgtataaccttatatgagatttctgttcgtcagaccagagatttgcccgtggttagtctgttcccacatccggcttccttcatattccacctctcgatggacacccttgccttcggctatatccttcccactaccgggcggattcgggactttaacccttaagaaacgtgcgccgccgagcgcactaacgcaaaaatccccgcccggaaacccggacggggattttatcacctgtttggacactgccggcagaatcgctctgcctacttttattcgttccaggtgccaagttcaaaacttttcaccctggtatatacaattcacgtaaattatttagctgctgcagcctttgcttctttgatcttctctgtcagcatcggaacgatcttgtttaagtcgcctacgataccgtagtcagctacatcgaagatcggagcggactcatctttgttgatcgcaatgatgatgtcagactcttccataccagctacgtgctggatagcaccggaaataccgattgcgaagtatacgtgcggacgaacagtcttaccagtctgtcctacctgaagatctttcggcttccagccggaatctacaactgcacgagagcagcttactgtaccgccaatagcctcagcgagatcatcaagcagtttgaagttctctgcgctgccaactccacggccaccggaaacaaggatctttgcatccatgatatcagctacgtcggatactgccttaacgatctcgagaatctcaacgtacttgttgtccggagtgaagcccgggttgaattcgataatttcagcttttctgccagcctcacggtcaagcttctgcataacgcctggacgtactgtagccatctgcggacggaattccgggcaagcgattgtagcgatcgtgttgccgccgaatgccggacgggtcataaggagctgaccatgtttctgctctttacccggcatagctacgagcgggaaatctccgatatcgagctgtgtgcagtctgctgtaagacctgtatggatacgtgcgcaaacacgcggaccaaggtcacgaccgattgctgtagcaccgattaagaagatgtccggcttgaactcgttgataacagctgtgatcgcatgagtatacggctcagttctgtaatcctttaattccggatcgtcaacaacgataactttgtctgcaccgtactcaccgagttcgtctgcaagaccttttacgttggaaccaactaaaactgctgttacagttgttcctaaatcttttgccaggtctttacctttaccgatcagctccagagcgatgctgctgatctgattgtctacctgctgtgcaaagacatatacacccttatattctgctaaattcatcacttttcaccacacttttctttttttgaattaaagtacatgtttctcagtaagtttctcaacaatgtaatttgcagctgcggacggatcaaggtttgtctccttaacgcctgcaccctttcttactttgtcggaagccttagcgatctgagtcggggatcccttaagaccaaggttggaatcaaagacatctttcagatcttttctgccccaaacggtgatctctttcttgtatgcatcgaagattccgcccggagtcatgtaacgcggctcatttaattcagaaagtgctgtaattaagcacggcattttagcctttaacatcatgtatctatcatcaaactgacgcttaacgattacagaatcaccatcgatctcgatgccctcagcatagctgattaccggaagaccaagatgctcagagatctgcggacctacctgagcagtatcaccatcgatagcctgacggcctgtgatgatgaggtcatagtcaaggtttcttaaagcaccagcgattgtctgggatgtagcccatgtatcagcaccgccgagaacacggtctgtaacaaggataccgttatcagcgcccatagccatagcctcacgaagaacttcctcagccttcggaagacccattgtaactactgtaacttctgcaccatactgatcttttaagcgaagagctgcctccagaccagctttatcatccgggttcatgattgtgagcatagctgctctgtcaagtgttccatccggtttgaactttacgccgcccttagtatccggcacctgttttacacaaacaacgattttcactgtatttcactccttattttcatttatagttatgatcttccagctgttaaattattattttaacagtgcgccggagataaccattctctgaacttcacttgttccttcgtagatctcggtgatcttagcatcacgcatcatacgctctacgtcgtactctctgatgtaaccataaccaccatggagctgtacagcctttgttgtaacttccatagcaacctctgctgcatacagtttagccattgctgcctctacgccgtaggacttctgagtagccttagccattgctgcacggtaaaccatcatctgagcagcttttacctttgttgccatatcagcaagctggaactgtgtgttctggaactgaccgattgtgcggccgaactgctttctctcttttacgtaagcaactgttctgtcaagagcgccctctgcaagaccaagagcctgagcagcgataccgatacgtccgccgtcaagagtatgcatagcgatcttgaagccctcacccttcttacctaagaggttgtccttcgggatgcggcagtctgtgaaaataagttcatatgttgcagatccgcggatacccatcttcttctcttttgtaccaaaagtgaagcccggtgtacctttctctacgataaatgcggaaatctctttctgcattttgccacgtttctcaacagtgcctgttacagcgataacgatgtatgtatcagcatacttaccgttagtgatgaagcacttggaaccgtttaatacccactcgtcgccgtctaaaacagcttttgtctgctgaccctgagcgtctgtaccagcgcccggctcagttaaaccgaatgcgcctaacttctcgccttttgcaagcggaacgaggaatttctgcttctgctcttctgttccgaatgtcatgatcggatccatgcaaagggatgtatgtgcggaaacgataacgcctgtagtaccgcaaactttggaaagctcctcaacgcacatagcgtatgtaagcggatcacagccctgtccaccatactccttcggtaccggaataccgaggaaaccgtttttagccatcttctctacggtttcaaccgggaatctctcttcctcgtcaacctcctgagcaaggggtttgacttccttctcggcgaaatcatggaacagtgttctcgccatctcatgctctttacctaatgtaaaatccatgtttttagttcctccttgtgaattgtatcatgtataacatggggaaatgtggatgcttcactcccccgatgtacctaatttagtacatgccttttcattataacatattgtgaaaaaataaacaatcgtaataaaaaaataatttgaaatttacctcttctgttataaaaggcatattgcctgacgggataagatcaccgtcaggcaacccttacattattatttgctgtaatcgtagaagcccttgccagtctttcttccaagaagaccaccgcgaaccatcttcttaagaagcggatgcggacgatacttcggatcgcctgtctctgtctcaagaacgttcatgattgcaagaacaacatcaagaccgattaaatcaccgagtgctaacggtcccatcggatggttagcgccgagcttcatagcggtatcgataccctctacggaagcaacgccctcagcgtagatgccgattgcttcgttgatcatcggaacaaggattctgtttacaacgaaaccagcagcctcttctacctgtaccggagtcttgccgatctcctcggagatcttcttaactgcttcaacatcttccggttttgtgtttaaaccagcgataacctcaaccagcttcataaccggagccgggttgaagaaatgcataccgattacatgtctctcaactgcgccgccgatctctgtgatggaaagggaagaagtgtttgtagcaaagatacagctcggtttgcagattgcgtcgagctctttgaatgtctgcttcttgatctccatgttctcgattgcagcctcaacaacgaggtcgcagtcaccacagatatcttttacgcctgttgtgatcttgttcaggaccttgtcagcctcttcctgagtcattttgccttttgcgattctcttctcgaatccagcggcaattttcttctttccgttcgctgcaaatgtctcattgatgtcgcagagcattacctcatagccttctgtctgtgcgaatgcctgtgcaataccggaacccatggttccagcgccgataataccaactttcatgattttatctcctttatgcaaacatatgatgtagacttactgatcgctgttcagactgaacagttccatttatttgtttttgaagccgtccacttttctcttttcgaggaacgccttcattccttccttctggtcctcggtctcgaagcactcggagaaatatttctcttcgatagagattgcgtggtcaaggtcggaaagataaccgtctgtcagggactcctttgaatttctgacagcgatcggtgcgttggaggcgatcttctttgccagcttcataaccgtcggcataagctcttccttcgtgcacacaccgtttacaagaccgatccggtatgcttcgtctgctttgatattgacagcggcatataccatttcctttgcttttccggttccgatcagtcttgcgaggcgctgggttccgccgaatcccggagtgatgccaagaccaacctccggctgtccgaacatagcgttttcggagcagtaacggatatcacagctcattgcaagttcatttccaccgccaagcgcgaaaccgttgacagctgcgatcgacgggatcggaagtgtctccagcttacggaaaacatcgtttccagctttactgaactcacgtgcctcctgtacagtcattgtgctcattgcagcgatatctgcgccggcaacaaaggatttctcacccgcgccggtcacaaccagcactcttgttgtaccaagatcgatgctgtcaagaacagcgtctaaatcctgaataacctctgtatttaaagcgtttaatgcctccggacggttgatggtgataacaccaacaaaaccgtcctgctcatattttacaaaacccatatgtagttctcctcagattttgccaaagtcccagattagtctctctctacgattgtagcgcagcccattccgccgccgatgcaaagagttgcaagacccttcttagcatctgccttctccatctcatgaagaagtgtaacaaggatacggcatccggaagctccaaccgggtgaccaagagcaatagcgccgccgttcgggtttaacttgttaaggtcaaagccaagctctttacctactgctacagactgtgcagcgaatgcctcgttagcctcgatgatatcgaagtctttgatctccatgcctgttctcttaagaacttttcttgtagctgcaaccggtccgatacccatgatcttcggatctacgccgccaagagcaccggcaacccatgtagccatcggcttaacaccgagttcttttgctttctcttcgctcataacaacaactgcagctgcgccgtcgttgattcctgaagagttaccagctgtaactaaaccgccgtctttcttgaatgccggttttaacttaccgagtgtctcaacagttgttccgtgacgcggaccttcatctgtatctacgataactgtctcttttttcttcttaacttctaccggaacgatctcgtccttgaatgcgccggacttctgagctgcctctgccttctgctggcttactgcagcgaacttgtccagttcttctcttgtaagaccccactgatcgcagatgttctcagctgtgatacccatgtggtagttgttgaatgcatcccagagagcatcgtttaccattgtatcaactaaagtagcattgcccatacggtatccgtaacggcctttcatcattgcatacggagccatggacatgttctccataccacctgcaacaacgatatcagcgtcgccggaaaggatcatctcagcagccatgttgacagcctcaagaccggaaccgcatacaacgttgatcgtaacagccggaacctcgatcgggagaccagcttttaatgtagcctgacgtgctacgttctgtccctgaccagcctggattacgcagcccatgtaaacctggtcaacagcttccggagcaactcctgctctctttaaagcctctttgattacgattgcgccaagttccggagccggtactgtgcttaattcgccacccattgttccgattgccgtacggcatgcacctgcaagtacaactttctttgccattttcttttcctcctcattataccgctgccaagctctacaccatatatttttccataagcaaggcagtatattatgtataactaatcatatcaccaaaccgttttgctgtcaaatcattatcaaaagctttttatatattttttctaaacaaattaggaactttactcttcatttcgtacaaaagttacttttatgctctgacgcgtcactttctgtttttgtcatgttttaccatttctttctattcctttttcaccggatttcttgaccttgccggcagataatgataaaataatgtcagagtttggccccggatcctatgatcccggcaaagttctgagatgcagtaatatttttatggttacaaagagagggtattaaaatggatttcaaacagatgtatcaggaaaagctggtttccgctgagaaagcagcttccgttatcaaatccggtgactgggtcgattacggctggacaacagcaactccgatcgcagtcgataaggaaatcgcaaaaagacttccggaattaactgacgtaaacttccgtggcggtatcttaatgtgggtaccggagatcttcaagatcgagaacccggcagaacatatgacctggaactcctggcatatgggcggtatcgagagaaaagcgatcgcacagggcttcagctactatgctccgatccgttattctgagcttccaagatattacagagaatcccagaacaagccggatgtcgctgtcttccaggtttccccgatggacgagcacggtttcttcaacttcggaccgaacgcttcccatatggctgctgtttgcgagacctccaaggtcgttatcgtggaagtaaacgagaatatgccggtatgcttcggcggtactgaggaaggtgttcatatctcccacgttgacatgatcgtagaaggtgacaacccggcgatcgctgagatgggcggcgctgctgctgcaagcgatgtcgatgaggctgtcgcaaagctgatccttgaggagatcccggacggcgcatgcttacagcttggtatcggtggaatgccgaacgcggtcggcgctctgatcgcgaaatctgacttaaaggatctcggcgttcacacagagatgtatgttgacgcattcgtggatatcgcaaacgccggaaagatcactggcgcaagaaagaatatcgacaaaggccgtcaggtatacgcattcggcgcaggtacaaagaaattatacgactacttaaataagaatccggagtgcatgtccgcaccggtcgactacacaaacgatgtccgtacgatcgcgtctctcgacaacttcatgtccatcaacaacgcagttgaccttgacctctttggccaggtaaatgctgagtccgcaggaatcaagcacatcagcggtgcaggcggacagctcgacttcgttctgggcgcttatctttccaagggcggaaagagcttcatctgttgctcttctaccttcaagaagaaagacggcaccttagagtccagaatcgttccgactctggctcctggctccatcgtaaccgatacccgtgcgaatatccactatctcgttactgagtacggtaaagtaaacttaaaaggtctctccacatggcagaagactgaggctatcatctccgtagcacatccgcagttccgcgaccagctgatcgcagaggctgagaagatgcatatctggagagcaagcaacaagagatagtattttcccgttttttcaggagagctttcattttaggaaggctctccttcttctttctttgtctcgccctctgctttttccgttgaatgaagattaaactgtttgatccggcgtgtcgcgatcggaccgccgatcgcacatccggcaacaagtccgaaggttgcagatgcgatcgcaaagcttcacatttttatatcataagccaatctcctgctacactattttcagatatgtattttgcgtaccatttgtgtccatttttttgacgggaagttccatcggaatttcctgtaaacaagtgaaaacacgcttcgcgagtttccccttgttatcgcgacagtcgccaaggtctcgcgctagcgcggactttggctcgttgtccgcaaaaaagcagcagcattttctgacattctcttcagaaaatgctgctgctttttatttctgcaaatgatctctttctccaatcgatccgctaaatctgaattttttctccactcacagattcaggatcggctccatcagcgtgatcccgctctccccggctaatttctgcctgcagatctcgagaagatgttcctgatatggagattcatcccctgcccggtacagatagtacagggtccggttcgggagctccacatccagttcatggatggaaaccggggtgttttttaagatgctctttgcaaccgacacaggtagaaacgcccagttgtcaccattctgcgtaaagtactgcaaaaagcccatttcatcgagatagacactcgggacggccgcactgctaaaatagtagttgtgccagctgtcaaaattctgatcccactgcgtccggatctccttgcgaggatcgaggtccgaaatgctgatctgcttcggaagtttcagctccgtcccgacgaccaggcagagcttttctttaaacaggatctccgtctttacctgggaagagtacatcggatccgtgataaatgcgatatccaccgtcttattgttcacatacccataggcgtcactggaatggagtgtcgtcacatgcaggctgcactccggcgtatctttcatgaactcctggaacacggtcggaagcatgaatgccaggagacttcctacactcgcaacatagaaactcttctcatttccgaggagcgcttcttcctgtgtctcgttccagagagcctgccagcgatgagcgatcccgacaaaggcacgtccctgtctcgtgagttccacatggcggactcctttattccggataaacagggaatatccaagttcttcctccagcgcccggatccttcgtccaagagccggctgtgtgatatataatttttctgccgccgcggaaaaacttccgcactgagcaatctttaaaaatgcttcaatttccagaaatgtcatcacgttctcctttctgccgggaccggcagttttctatttcgatcctgctttcacacatgtttttttataacgctcatctctcttctgcttttttaccacag

SEQ ID NO: 2020 - DNA, 13184 bp, Unknown
  gut microbiota DNA sequence
acccgttttacgggtggcggcgactgaagagtgcactgctgcgattgcaaaacgcaaaaacagcaatgaaaattctaagatttttatgtcccaggggatgttggtaatccggttaaataattatctcagatatgtatccatccactcaataatctccctcatccggtcgatcctgttttccggctttccgcttctggagagttcatgattttcaccgtggaacaggcagagctttgcagggcagccgttccgcttgatggcgctgaacatggcgatcccttcggccatatagcagcggtagtcttcatcggagtggataaagagcgtcggcgtcttgcagttcggtgcaaactgaagcggggactgcttccagagaagttccacattggtcctcgtatttccgccctggttgtttaagatgaaggtgtgtccgatatcggagttatgttcaaaggacacccagttggagatggagcgctgggatgcggcggcatggaaccggtcggtatgtccgatgatccagttcgtcataaatccgccgtaggaacctccggcaacaccgagacgggatgcgtcgatcatcggatagcgttttaacacctcatccgtaaaatccatcaggttctgatagtccacagttccgtagaggccgttgatgtttccgaaatcagttccgcgtccgtcagatcctctcggattgcagaagaagacaaagtagccgcggtttgcccacatctgcatctcatgatagtagacatccgaatatacagttctcggacctccgtggatatttaagatacccggataggacttttcctcctcatatccggccggttttaatacccagccgtggatctcatatccgtcgctggcggtgaatgtgaaggcctccggagtccggacatcatattcttcggtgagccagtcattcatatgagtcacctgcacgccgtcgacgaagagttccgcgatttgcatcccgcaaaattccatggaggcgatatgaccgttcgcgaggtcgaagctgtcacaggagcttccctctgtcagaggatcggagacggtaccgtcccgggagattttatagaggtgggagaaatccccgacggtggaaacgtagtaaaattcgccattcacggctttaaaggtctgcccggaaccgaatctggaatcagatccgacggatgaaataccgatggaggactcataaggatggatcagctccatggatccgtccgcgaggttcattcggtagaagtcgcagtactttgtcgtatccttataggaatcatctgttgccgcgatgatcgcagtcttttcatccagaagagagacaactccggtgcgaatggaatcaggaacgatcagcgtgaccttctcaccggtcgcaagatcatagagataaacgcccgggcggatccccatgacactctgcttccacggatatgctttatagagcagaagattgccgaaaacggaatactgggagcagttggtccactcgtcgtccacataggtgagatctccggatttcagatcatagactgcgtaacggttcctcttcgcgttcgtatatccctgaccatttccccagaatggaagttcatcgaacacttcgtaggatttctttcgcgtgtccttataattatcatggcggatcgtcaggagataacgcccgtcgggaagaagatggattcctgtgatgacggccggaacggacgcgcggcacacggcctcaccgccggacggggagatttcgtagagatgagtgattccgttctccttatcccttttttcagcttcggtgcgggctgcggaaaagagcagggtattatccggtgtccatgcccatgttttcgcgtcaccgccggctgtgatcctggaaacagatttagtttccagatcatacaggtacaggtccgccagatatccgttggatccaaggtccggtacggagactgtgaaggcgatctttgtcccatcgggtgaaaactgcgggctgcttaaaaactggaactttaaaaatgtgtcgatttcaatcctcttcattggcatgtcctccatatagaatgtatgttcagcataaaactaatatagcgattgagggggcacatgtcaataaaagcagcagaaaaatccgcaccacttttataacgaagaattacaggctacgggcacttgcagccataaaaaaacgtaaagtgacagagtttgtcgtgttcaaccaaatgtgaaaaaaataacgaaaaactttgcaatttctttacatcgcagtgatgaaggcctgaccggagtgaaaaactgcttgccatatagaaaaaataatgctaaaatattttagactatgtataatgcgcacgaaaaggtccccgagaccggtgcacgagagataaaaaagagcgagatgcgaagagaaaggaagataaatcgatgtcaggacataataagttttccaacatcaaacacaagaaagagaaaaacgacgcagcaaagggtaaaatctttaccgtaatcggaagagagatcgctgtcgcagttaaagagggcggcgctgatccggctaacaacagcaaactgcgtgatgtaattgcaaaagcgaaagcaaacaacatgccgaacgataccatcgaccgcggtatcaaaaaagctgccggtgacttaaactctgtaaactatgagaacttaacatacgaaggatacggcccgagcggtgtagcgattatcgttgacacactgactgacaacaagaaccgtactgcagctaatgttagaagcgccttcacaaagggcggcggaaacgtaggtgctcagggaagcgtttccttcatgttcgaccgcaagggccagatcgtgatcgacaaagaagagtgtgatatggatgccgacgagctcatgatggcagcgcttgatgcaggcgctgaggatttctccgaggaagaggacagctacgaggttatcacagatccggacaacttcagtgcagtccgcgaggctcttgagaaagccggaatcccgatggtagaggctgatattactatgattccgcagaactgggttgagcttaccgatgaggaagcgatcaagaagatgcagagaatccttgatctccttgacgaggatgatgacgtacaggctgtataccacaactgggatgaataaagaatcgtaattgtgtatgttgtgatcccctttcaccagaattgtactgatgagaggggatttcttcataataacaggaaattccggggaattccctgttacataaaaataagccggcagccggaaggcaccgggcagtcacataaaacatagaactgcaggaaaagcggagagcgtggaactttccgaaggcaggagagaggagtccgttatgacggatatgaagaaaaatattaaaaggacagcagtgctttccgtggtgctggtcctgatgttcgcgatgaccgcgttcggtgcggacgggacggaagagtatgtgccggcggtctacgcgacgttctgggcgctcgttccgccggtcgtggcgatcgggctggcgctcatcacaaaagaggtgtacagttccctgtttgtcggtgtcctgatgggcgggatcctgtattccgggttcagttttgagggaacgatcacccatatctttgaggacggaatgatcagtgttctctctgacagctacaatgtggggatcctgatcttcctcgtgatcctcggaacgatggtgtgcctgatgaaccgcgcgggcggctcagcggcgtttggccagtttgcatccgatcatattaaaaaccgtgtgggtgcggaattagcgacgatcttactcggctgcctgatctttatcgatgactatttcaactgcctgaccgtcggaagcgttatgcgcccggtaacggataagtttaaggtatcgagagcgaagcttgcgtatctgatcgatgcgacggcagctccgatctgcatcattgctccgatctcttcctgggcggcagcagtgaccggctttgttgagggggaggacggattttccatctttgtccgcgcgatcccgtataacttctacgcgatcttaacgatcatgatgatgatcggaatggtcctcttaaagacagagttcggttccatgaaattccatgaaaagaatgcgctgaagggggatctttacacgactccggggcgtccgtatgacacggaaaaagcaccggaagtatccgcaaaaggaacggtgctggatcttctgatcccgatcatatccctgatcatctgctgcatgatcgggatgttatataccggcggtttcttttcaggcgtggattttgtgacagcgttctcccagagcgacgcctccctggggcttacgatgggaagcttcttcggacttgtgatcaccatcgctctctatcaggtgcgccgtgtcctgaaattctccgagtgcatggcatgtatcccggaaggctttaagtccatggtcccggcgatcatgatcctgtcatttgcctggacattaaaggcgatgacggacagcctcggcgcagatgtctatgtggcgactgtggttgcgtccagcgcccgttccttcttaaatttccttccggcgattatcttcgttgtgggctgtttcctggcatttgcgacgggaacatcctggggaactttcggaatcctgatcccgatcgttgttgcggtatttgagaacagcaacccgaacctcatgatcatctccatctccgcctgcatggcaggagctgtctgcggggatcactgttccccgatctctgacacgacgatcatggcgtctgccggtgcccagtgtgagcatgtaaaccatgtgacgacccagcttccgtatgcgatcgtggctgcggtggtatcctttatctcctacatcatcgcaggctttgtccagtccgcctggatcgcactcccgatcgcgatcgcgctgatggtgatcacgatgtttgtgatccgcgggataaacggggtgctgaaagaagaatagcaaagaaaaacaaaaagagcagaggctttttcagtctctgctcttataaaaatcggggcaacaggatttgaacctgcgacctctcggcccccagccgagcgcgctaccaagctacgccataccccggaagtaaattcattatatcagaatccggggaaaaagcaacaaaaaaattagggatctttctgtgccgttgcaaagctgcacgggaattgatataatgaaatacatgaaaacaggaaggaatcagaaaaatatatgaaacctacgatccttttataccatctgccggagggcgagagactgttaaagatcaaaaaagcgctgtttccgcttggaatgaagcttcgcgcagtgaagaaggaagagtatctggaaccggtgggatatctcgcaggagtgaaggagatcgcttcctgcggcgagatctacgacggagaggactttgaaaaagagatgatggtgatggcaggtctcacgtccggacaggtggaccgggtgatcctggcgctcagaaaggcaggagccggacggatcgactacaaggcagtgctcacaccgacgaaccagaactggaatgcgctgaaattgtatgaagagcttgcgggagagcacgcgcggatgaatcagtaaaaagcatacccggatgggaattggaagaaactgatgacagatcgtgccagggcggaaaagctgcaaataggcatgggaaacaaaaatggttaagaatgtctgatcggaccatagagtggaggaatcagccgatgaaagatgaaaaaaagcagaaaaaagaagtcctgaaaaaagagatggaaagactcggaagcctgcagcgggaatgtaaggaggaaaagatcccggtctatctcctgtttgacgggtatgatggcgccggaaagggcgttcagatcgggcgtctcatgcaggcgcttgatccgagaggatttgacgtttacaccggagacaaggacaccgaggaggaggcactccgcccgttcctctggagatttgcggtccatgctccggcagcggggcggatcgcgatctatgacacgagctggtaccggagagtccaggcggaccgctttgaggggatcctgaaggagaaacaggtggatgcagcgtttgaggatattcttgcatttgaacgctgtctcgtggacggcggaacagtcatcgtgaagctgttcctcgaaatatcggaaaaagaacaggcaaaacggtttgaaaaactcctgggatcaaaggataccgcatggcgcgtgacagaaaaagaacgtgagaggaacgcccactacggaaaatacaaaaagatcagcgacgagatgatccgccggaccgatatgccttacgcaccctggtatgtgatcgatgcaaaggataagacggaaacggcccttacagtgataaagacggtggcggatgttctggaaaaggcgcttgagaaaaaacggtcgggaaaagagccggaactttttgaagctccgctcccgccggaccggtatgaaaaagggattcttgcgaaagcggatcttacgaagagcctcgaggaggcagagtaccggaaaaaactggaaaagctccagaaacgcctggagacgctccacggggagctctatcgtctgcggatcccggtgatcctgggattcgagggatgggatgcggccggaaaaggcggcgcgatcaagcgtctgacaagccacctcgacccgagaggttacaaggtctgcccgacggcatccccgaatgacctggaaaaatcccaccattatctctggagattctggaacaatgtgccgaaagccggacatatcgcgatcttcgaccggacctggtacggaagagtcatggtggagaggatcgagggattctgctccgaggcagactggcatcatgcctaccgggagatcaatgagatggaaacgcatttcgtcaattccggagcacttgtcctgaaattctggatccagatcgacaaagatgagcaggaacggcgcttcaatgacaggatgaaaaatccggagaaacagtggaagatcacggacgaggactggagaaaccgggagaagtgggattcctatgtccttgcagtgaatgaaatgctggaaaagacctccacgaaggacgcaccttggatcgtcgtggaaggaaattccaaatggtatgcgaggatcaaggtcctcgagactgtggcggatgccatggagaaaaagataaaagaagtggaaaaagataagaagaaatgagtaaagttgtgattatcggcggcggggcagcgggaatggctgctgccatcggcgccgcggagtgcggacatgacgtctccgtctatgaaaaaaatgaaaagcttggaaaaaagatctatattacaggaaaaggaagatgcaacctgacaaacggctgcgatacggaggacctgttcagacacatggtctccaacggaaaattcctctacagtgcgatctatgggttcacgaatttcgatatcgtggatctcgtggaggcaaatggctgtccggtaaaggaagagcgcggtgcaaggatgttcccggtatcggatcatgcatccgatgtgacaggggcgcttgagcggaagatgagatccctcggcgtaaagatctttctgaatgagccggtaaaggatatcgtgatccgcgaggaaaagacagccgggatcatcctggaaaaatcaggaaagaccgtagaggccgacgcggtggtgatcgccacaggcggactttcctacccgtctacagggtctaccggggacggataccggtttgcaaaggaggcaggccatacggtgacaccgctgtcaccggcgcttgtcccgttcgtgtgtgcggaggacgatgtgaaagagcttcagggactttccctgagaaatatcgaggtgacggtctggaacggaaagaaggttctctggaaagaattcggggaaatgctgtttacccattttggcgtcagcggaccggtcgttttaagcgccagcagctatgctgcgaagatcatcagaaaaacgcctcttaagatggatatcgacctgaaaccggcgctctcgaaagagcagctggacgccaggatcctgcgggatttcgatgaggcgaagaataagcagttcaagaacgcgctgaaccatctcttcccggcaaaattgatccctgtaatgatcaaaagaagcgggatcgatccggaaaaacaggtcaatgaggtgacggctgaggagcggaagcgcctggtcgacctcacgaaggcattcacggtaacgctcacaggacttcgcggatataatgaggcgatcgtgacccagggcggcgtgaacgtgaaggaagtgaatccgtccacgatggagtcgaagaagttaaaaggtctctacttcgccggagaggtccttgacctggacggcgtcaccggcggattcaacctgcagatcgcctggtcgacgggaatgctggccggaagaagtgcggaataaatgaacagtcacgaataaataaaaaaacttgaaataaactaaggggagaatgacatgtcttttaatgtagcgatcgacggcccggcaggggccggaaagagtaccgtggcaaaatctgtcgcggcactgaaaaactttatctatgtggacaccggagcgatgtaccgggccatggcactctattttcttcgaaaaggtatcgacaaaacggacgagagtgcgatcaacgccgcgctgggtcaggtggagatcacgatccgctatgagaagggtgcgcagcaggtgatcttaaaccgtgagaatgtgtccggtctgatccgcaccgaggaggtcggaaatatggcgtctgcgacttctgtctataaaaaggtccgggagaagcttgtagaactccagaaggagctggcgagacaggcggacgtcatcatggacggccgcgatatcggaacctgcgtccttccggatgccgacgtgaaggtgtatctgactgcaagctccgcagtccgtgcaaaacgccgctacaatgagctcaaagagaaagggactgactgtgatctcgacgagatcgagaaggacatcatcgaccgggactaccgggatatgcaccgggagaattctccgttaaagcaggcggaggatgcggtgcttcttgacagctccgacatgactctgaaggaagttgtggacgcgatcgtcgcgatgatcgagaaaaagcagggtgcgtgacatggaagtaacagtggcaaagacagcgggcttctgctttggcgtgaagcgcgctgtggaaaaagtatatgagcagatcggaaagatggaaaaaccgatctacacctacggtccgatcatccacaatgaacaggtcgtgggggatcttcaggaaaaaggagtggaggtcatcgacactctggaagagctgaagacgatccgcgatgccgttgttgtgatccgttcccacggtgtcggaaaagacgtctatgatattttaaaagaaaacggagtggagatcgtcgacgccacatgtccgtatgtaaaaaagatccaccggatcgtggaaaaacagaccgcagagggaagaagagttctgatcgtcggcagtgaggaccatccggaggtgcagggcatcaagggctggggtgatgagaggacaaaagtcatcgaaaacatggatgatttccgcagactggaattaccggaggacgaaaagctttgtatcgtatcccagacgacatttaattacaagaaatttcaagatctagttgaaaaaatttctaaaacgcggtatgatataactgttttaaatacgatttgcaatgcaacacaggaaagacaagtggaagcgatgaggatagcctcgcaggtggacgtgatgctggttatcggcgggaaacacagctcgaatacccagaagctatacgatatctgccggaaggaatgtaaaaacacctattacatccagactctgggcgactttaatcctgaatgtattagttctgtgcgcagtgtaggtattacggccggggcgtcaaccccaaacaatattatcgaggaggttcatactaaatgtcagaattaagttttgaacaaatgttagaagaatcattaaaaacaatacgtacaggagaggttgtcaccggtaaggtcattgacgtaaaagaagacgaaatcgttttaaatattggttacaagtctgatggcatcattacccgcagtgaatacacaaacgagtccaatgtagacttaagaaatcttgtacatgttggtgacgagatggaagccaaagtcgtaaaggtgaacgacggtgaaggtcaggttgctctttcctacaagagactggctgcagacagaggaaataagagacttgaggaagcatttgagaaccatgaagttcttactgcaaaggtttcccaggttcttgacggcggtttaagcgtgatcgtggacgaagcaagaatcttcatcccggcaagccttgtatccgacgtatatgagaaagatttatccaaatatgctgataaagagatcgaattcgtgatcacagaattcaatccgagaagaagaagagtcatcggtgaccgcaagcagcttatcgttgctaagaaggctgagatgcagaaagctctcttcgagaagatcgctgtaggcgacaaggtagaaggaactgttaagaacgtaactgatttcggtgcattcatcgatctcggcggcgctgacggtttacttcacatctccgagatgtcctggggcagaatcgagaacccgaagaaagtattcaaggttggcgataaggtaacagctctcatcaaagacatcaacggtgagaagattgccctttccatgaagttcccggagacaaatccgtgggcaaacgctgctgagaagtacgcagtaggtaacgtagttaccggtaaagtagctcgtatgactgactttggtgcattcgttgagcttgagccgggcgtagatgctctgcttcacgtatcccagatctccagagagcacgttgcaaaaccggctgatgtactttccatcggtcaggagatcactgcaaagatcgttgactttaacgaggcagacagaaagatcagcttaagcatgaaggctcttgaggctgacaacgcacaggagcagacagaggagtaatccggaagtctttgatctgaaatgaattttttgggacatcacagttgtgatgtcccttttttggcttaacgggaaatttcaacggaactccctgttaagcaaaagggcactgcctgcccggggtgcgcactccaaagtgcccggattgccgcagaaatgccgcaatccggatcctttctacaaaaatgcgtaagggatttgtaaatgaaatcctagtgtattttcaagaattatatgctaagatatgcctacaaaaaagaaaacagctgcgacaacttttttgaaatctggaaaatttgaggaggaactgatattatgaagaatatgaaaaaaatgactgcgctggcatgtgcagcgatgatgatggcatccatgggaattaccggatgtgcaaaggcggacggacagacaaaggaagagacaaaagctgttgtcgttgagactccagcaggaacggaaacttccgcaacgacagaaaatgaggcgacaatgcttccaggcggcgaaaacccggagggcacaggagcggaggcagagagtgaatacgctccgtttgtcggcaccgttgtttccatggaaaacggtgagcttacgatgaaccgccaggtcggggattccaccgaggaagtgatcatcacgatctctgatgatacaaagattctcgacggcgtcaacggttacccggttgaagcagatactctgacggaaggaaaagcagtgaacgtttatgtgggaccggcgatgacaatgagtctgccgccgatcgcgaacgggatcatgatcatcacggatgttccggaggacgcggcgttcccgaaatatacccaggtacagagccttgatcagggaagtgcagacggagagttcgttttaacaaccgtggatggcagcgaatacacgatcacggctgagacaagacttcttccgtatctgactaaaaatatcgtttccgaggaagatctcacagagggaaccgatatcctcgtctggacatctgcagatgatgccgcaaagacagagaagatcgtgatcttccagagcggaaactaagggaataaaaaaacaggatccgggcatacttcctttacggaaggagtgtggaccattgtctaaaaagaaaagggaaccgatcgatccggagcatataaagccggaggatcggatgaaatttgagatcgcgaaggaactgggacttgccgacaaggttgtagccggcgggtggaggtcactcactgcaaaggagagcggacggatcggcggtcttatgacaaaaaagaaaagagagctgtctgcgggggaagaacacatctgatgaggagaaaaagggaaattttcggaccgaaaattcctacccgcaaaaagtaacaggaaaactgccgttgaacaaccggcagttttcttttataatgaggaagaaagagtttggctgaatgcaagtgagacttgatccggagaggatggaagatgatgaaggtatcgctcgtctgctttacgagaatgggatttgaaacgatgaaaaagatcgccgggacggggagtgccggcggaaatgaggaaaaatgggacacgtcgctgtgggtcgcagggcgttacgcgctccggcttgccaaggaagatgccggtcttccttatcaggcgatcgcggagggcggactttccgcgtggaccggggcggagtttcagcgctcggatgcgcttatttttgtcggcgcctgcgggatcgctgtccgcgccatcgccccgttcgtgcaggataaattccatgatccggccgttctctgcgtggatgaggcgggaacgttcgtgatcccgctcctttccggtcatgtcggaggagcaaaccgcctggcggagtttgtggccggtgggatcgaggcggtccctgtcgtcacgacggcgacggatgtggaacggaaattcgcagtggatgtctttgcaaaggatcacgggcttgtgatcacagaccgggtgcttgcaaaaaggatctcggcggatattcttgcggaggaaccggttggcgtgttctcggatttcggcttttcaggatggaaaaaaataccggaaggactgtttcgc

SEQ ID NO: 2021 - DNA, 17889 bp, Unknown
  gut microbiota DNA sequence
ggaatggattcagagaatgggcagtatccataatcatgcagaggaaattgtgttgaacgaattgatttatagataattgacaatgcagtacatacctgttacactccgtgcaacaggtatgtactgcaagaaatagtggaagcttgtattcttttttcgaaaaggaatcttgacagccacaataaaagctgtataatgatagtaacagaacccaccacgcctctgatttttcatgcgcaacccggtgggactttttcatttatgggatgttttatgtatcaatatccaaaacaaattttaacaatagcacagcaggtacaatcatatattgatgcaggaatggtaattacttctcgtgaggacgtagaaaagtcattaaagtccgttggattttatcgtttgcgtggatactcgttccacttatatgataatgctacaaagaagtatgttccaggaacaaagtttgaagatattttaaagttgtatcaatttgatcaggaattatctgctttgactttttcgatgatttccaagattgaagtggctttgagagtacgattggtggaagcgttactaatacacggagagccacttgttttgcaagattcatcgatttttaaagagaaaaaactgtattggcagaatatgtctactgtagcgtcagaaattgctcgctctaatgatgtgtttatcaaacataattttgacaatcatgatggagaggtgcctgtatgggcagttgttgaagttctttcatttggtacgctatcgaagataattaagaatttgaaaacaggtactggaagttcgtattctatattggccactaattaccggtataaatcgaaaaaagggaatttggtaaatccatcacagaaaatgcttgcttcatggatacagggcgtttcagtattgcgtaatatgtgtgctcataattccagaatttacaatcgaacaatacatacgacaccggaaattctggatgcagataaggtcacaccaccgccagcacataacggtttgtatcaaatcctactggcaatgaagtatctgcgttcatccgatgaggagtggacagtatttgttgatgcttttgataagctgattcaaaataatattggtgtagtcagtcttacagcaatgaattttccggcggattggaaagcacatctaagtgtataaatgaagcagagctgcataaaatagtaaagcagacctaaccaagcattttttgctcaaaccggttaggctttcggcggagtgttacgataagcacttcgccatttttattttgataaaaaacattcataatgctgactttcaaaagtaaattccagtgcagaggtaaattccatatatcactgaggtggtggaatttacttctgcataaatggaatttaatctttcatacatttgtgttatgctcatagagaccttctggcagcagtagaaggagattctctatgagcaaatatattcctggcaatcaaaaacatctttctcttgaagaccgtaaatatattgagcagtccttgaatcacggcagttcttttaaagatattgcccgctttttgtgcaaagatcctactactatctcaaaggaagtaaaacttcatcgggtaagtgactggtatcataaaggttcttttctgaatgcccataacttttgtattcataggtatcattgcaaaaaaacgaatgcatgcaaaaaaatcatgctctgcaacatcaagtgtacttcctgtcctacctgcaatcaaaactgttcggactttgtaaaagagcagtgtaaccggctcgataaagccccttatgtctgcaatggatgtgcaaaggccatcaatcactgttccatcgcacataaatacctctatgatgctgttttcgcagaccgcaaatataaagaatgtctggtatcttccagatctggcataaatatgaccaaacatgaactgcggcaaaaggacatggtcatcacaccacttatctaccagggacagtccccttatcagatcattgcaaaccatccggaactggatgtgtccgttggaactctctactcttatcttaacgatgggatccttacagccagaaatgttgatttaaaacgcaaagtaaagttcaaacttcgaagaatccataagactcagatcaaggaccgtacggtttttgaaggacgcatgtttacagattttcaaaagctggagcttgatcatttcgctgaaatggataccgtccattcctctcaagactctaaacgggtgatcctcaccttctttttgacttgggagaagctgttcctggcttttatcatgaatcggtgtacaaagggtgctgtaaggcttattttcgacaaactggaacatcaactgggaacttatgattttctctctttattcaatacgatcctaacagatcgtggttcagaattcggagatcctgattctttagaaaacggaacaaatggaattgtccgatcaaacatctatttttgcgatcctatgagaagcggacaaaaaggcggaatcgaacaggctcacaccatgctccgtatgatccttcccaagaaaaccagttttgaatttctcacccagtgggacctgaggacgattgtagatcacgtcaattctactcccagagaaatcctgggcggacgcaccccttatgatgttgcacttgaaaactatggcattgacattttaaaagcacttcagcttaggccgattccacccgacgaggtcaatctgacacctaagctgattcgctttaaccactaacttatcataaaaatctgctgtcagaccggaatttactaattcacttttttagtacatggcctgtggaatttagtcttgcatacccgacatcggatatgcgatacatcatagaaaccacaaagacagatgccggaataagagtattgccaatcacagaggatgtggaacagatgtttcaggcaattatcgaggatagaaatgcaccgaaagtggagaaaaccatagatggatatagtggattcctattttacgatgataatggaatgccacttgttgcaatgcattggcaacaccgctttaatcctatggtcggcagatacaatgacatttaccgagtacagatgccaaatattacacctcatgtatgccgacacacctattgctcgaatatggcgaaatcgggaatgaatcctaagacactacagtacctcatggggcattcggatattagcgttaccatgaatgtgtacacgcatattggggttgatgatgccgaggaagaattgaaacggatggaagagtttaggaaggcacaggcggaggttgagcagaagaaggagaaaccgatgtcgcagaagatgtttaaggtaatttacatagagaagataggtagcgctctggcttagactgaggcgttttttctgtggaaaagaagtgaaaatgacgatataatataaaatagaatgtgaaatggaggtgaagaagggtgggaaggagtcgtagagcagatgcggttgtttttggattcgattttcaggttaatgctgcaatagttcttttcttggaaaatatagaagatgtggaaaaaatttgtctcgaaggtaattatgaggatatagaattagagctttcctctggaaagatgatattggctcaagcaaaagcagtcgaaaaagcgagttccgattttgttaatgtgagaaaaaatttaaaaaaagcactcacatcattatcagaggctggagaaaaggttgctgcaaaggaattaattgtaattactaattcccccaatcccttcaatgatgataagtctagaaatgttttttacgggcatgcacataggaattataatacattaccgccatcggctaaggagatagtcgacagatatttatcaaaaatggagaaacctcttgatactgataaattaaaaatacaagttttaccttttgaaacagatgacgaaaatgaaagatataaagtcattatggaatgcataaacgattttatggggaatttgaatataagcatttctggaattggaaggaagatgttagaaacatggcattggcaagtgtttgataatggcgggaaaaaagattcggctataaaattgacaaaaaaagatattatatggcccattcttgtacaaataacagaaattgaacaatgtgaagattcgtttctggagcagtttgattctggcgtgtatgaagaagtggtaaataggtattctgaggtaattaattcacattgtgagcagtgcgagttttttataaaagttttaagtgattataacaattttaagacagaaaaaaagcaaagtgaaaaattaaatgaatttatagaaattcagtggaaagactatatttcagaatttgccgttgatggtgtggaagaagagatacaggaggcacttgcaaaaattgtcatacataatattataaaaagacgctttacaatagatcgaatcaagaaaggagtgaaattgtgttaataaaatcaatttatattcgagatggtctatttgaacgaaatatttcatttggaactaatgcaaatttgatttatagcgaaaaaaatagttgtggaaaaactactttagtaagatttatattatatgcattagggtattcgataccaagtacaaaaaaaataaaatttgagaaatgttttgtaaaagtacaattggttcttgataataggaagtgtgtatatttaaccagagaaagtaattcgactatatcatttatttgtgataatgaggaaaaaatatatgtattaccagaacaaataagggagcttcattcaaaaatatttaatacggaaaatgaagaaattttaaacaatttattaggaactttttattttgatcaggagaaaggatggacgctattaaatagaggagtagttattggaagcatacattttaatatagatgaacttgttagagggatttcgggtaaagattgttctgggttaattttaaaagaagaaaagcttgtagcagacttatctaaatataaacaaatgttcagtatagcacaatacagggacagtataaatgaagatagcttgattgatgatacatatcaagaaaaaactgacattgaacttgaacagttaagaatgaaacagtcttcgattaggagggaaattagcagagttaatcagagtatatctggaaataaaaaatttcaagaatttgttgcagatatgaaattactggtaagaactgatgagggacagtgcataactgtgactaaagataatattgttggtttaaatgatgcaattgatttattggtagcaaagaaaaaaatgttgtcatatgaattggctgatgtggtttctaaaatagaaaaaatacaacgtgaacaagaaaaggaaaatgatcaactttctttttttgaatcggattcggttgctgccgcatttgataaaagaattgtgtctattccaatgaatcaaattgtgataaaaaaggaaattgaaaaaatcgaaaaagaattaaaaagtgttcgggatgagattgctaaaatatcaagaagtgataatgtagttgttttgtcactttaccaaacaatagtaaaatatgcgaaagaattaggtattggagatgcagaaagcatcactaaaaaatatttatttacatcgaatttaaaagaactgacaggagctgtgcttcataaaacggtgtttgcatttaagatggcgtatattgtggaacttgaaaaacatctacaaataaaattaccaattattcttgattctccaagaggaaaagaagttgatcaagagaatattgatttgatgatgaatattttaaagcgtgattttagtgaaaatcaaataattattgcctctatttattgttattcttttcctgagattcatgaaatagaattgaaagaaaatttgattgatcaattggttgtgaataaagaagatatttgattgattcttagtagtaagaaaatctcttttactactaacaggtagtaacaacttgctcaatcttgctctgatttgccacagtctgtaatttcagagcatatcaccataatccccgaaatcccttacaaaacaggacattccggggtgaaacaaggagaaacaaaactatgataaaagtattattcatctgcctcggcaacatctgccgaagcccactcgccgagttctactttaaagacctcgtagcaaaacacaacctttccgctgaattttatatcgaatccgcggcgacctcctatgaggagaccggaaacccggtacatcctggaacgagaaagaagctggcagcggcaggcatctcctgcgtggggaagactgcgagatgtatggagagggaggattaccggaaattcgattatctgatcgggatggatcaggcaaatatccggaatataacacagatcgcgggcggtgatccggagaagaagatctataagatgctggaatttgccggggacggctggaaggagcttaaagcaggaaagcggaatatggacaaggtgccggatgtggcggatccgtggtatacggggaattttgatgatacctggcgggatgtgacggacgggtgtgagggattattaaagtttttggattagttattgaaacgggggttcatctgcaaaatcctgttgtgttgcatgggaaaggagtgaccatgtattgtaactcgatgagaggtagaatggtgtactcgatatggaaaacgataaaggatggtatagtgtagccagctgtgtgtatgtagatcagactctgcggaacagctaatcgtgaatcgtaataagaaaggaaaaaacatatggtaaaaaagatcattcatgaccccatgttcctcaggcagaagtctgtggacgcgaccgaagccgataagcaggtggtgacagaccttctagacaccctgcgggcgaatctggaccggtgtgtcgggatggcggcgaatatgatcggggtgaagaagaatattattgttgtggcagtgggaccgtttcagtttgcaatgatcaatccggtgatcatgaagaagagtggaccgtatgagacggaagagggatgtctttcgctgagcggtgtgagaccatgcacgaggtaccaggagatcgaggtggattatctggaccagaatttcgtcaagaggcatggaaaatattccgaatggacagcgcagatcattcagcatgagatcgaccactgcaatggaattctcatataaacgcatgaaaaaataagaacctggcggttgccaggttcttgttttccctcccttacttctcaacctccggatccgtcggatcccagttctgctcagccgggatcttttctgccgccgggcgctcaaacggggcggcgaggttgtcgccaacggtgacgactgttccggatgcgcagtggtcgtagatccatttgcagtcagctacggtcatgcggatgcagccgtgggaggcgggttccccgagcttgttgtattccgctgccggaatattatagatgctggtggtctttccaggaacgctgtggaaaagaatgctggtatttccgagtcttgtgcagtactgtccgtaagtggattctaccagagcatgccagcggtacttatttgtgagcttgaaggttccgaccggagtcggagtgctcgattttcccggggagcagataaaggtgcggtacgggataatgtaaccgttgtctccatccggtgcatatacggtaacctggcagcgggagcggtcaacagtgatccggaaggacggtgcggcgagaattccttcaagatcctggatcagtgagcaggaagtttcgtcaaaataaaatttgtatccatcgatatactgccagcccttgacggcatatccgtcggaatcaaagtagtaccagttgttgtttgcattctgccagccatttttcgtgagctcaccgctctcattccggtagatcagaccgtcagccgtctcatgaatcccggtcgtaaggtcctccggcggagtctcccgctgtttcattgtgccgtttacagtccagcggccatcggaatcgacctggaagccgtccggagttcttgttccggccagcagctggccttttttatcaaagtagtagcattcttccatgccgtcctggtcggaatcgatccagtaccagccgtctgcggcgtaggagccgtctccgagatcgtatttccactggttcggtcctccctgattggaccatgttcctgcataggaggccaacgggttgatgagcagtgctgcgaaggctgcgccgaggcaggtgcggagtgtatattttgttttctgattcataatgaggttctcctgaaggtaaaaataaaattctttttcacatgaatatagctgcctcgcgttccacacagaggaaccgaaacagcttcgctttttattctaagtatatcactggaaaaaatcaatcctttttctgaaaatcctgttacatggacctcatgcagtccccattcgaaaatctttacttttcgaaaaaaatgactataatagatcagggctcaaaatccggggatccgatatctgtttacagatgccggatccctgaatttccagccccgataaaacatgaataagcagccatttttattaacaaaatgctaactgttcagtaggtctgcgcatttactgcgctgaccgtaagaaaacataggtctgaaggcaaaaattccatcggagcagccgatctggaatggactttttgcgcgtaacttgccaagtatcccaaaggagctgccggtggcaggtcctgtaggtgtgaaggtactgaacagttacgcaaagtgagcggattatgaatgttctgcaacatgcagttcatcagataaaagacagcgggtaagattcaggacccgcacaacaagacatcaaaggaagtgaactacaatgaatatcgtagacaaattcggaaatatcgtgggaacagaggccatgaaggatccggagaaagcacggcgactcctcctcaccggttaccgcatgcaggagaaaaagctgcagcttttaccggaccgcgcactgccggaatccggacagtatgtggcgaagatcgtcatgaagaatatcattgaagcgcttgcaaaaccggagcaggcggcgatggtcagcatttttgtcccgggcgagctcgtgacggcagcaggccttaccccgtactcggtggaggcgctgtcctgctttatcgccggaacgaaatgtgagcaggcatttttgagaagaacagaggaagagggattccccgagaccatgtgttcctatcacagggtgttcctcggagcggcgctcagcggccttctcccgaaaccgaaatgcacaatctacacgaaccttgcgtgtgacggcaacatgatgacattcccgtatctgaaagaaaacttcggatgcgagggcttttatatcgatgttccgtatgagaaaaatgaggactccgtaaaatatgttgcggaccagctgagaaagctgaagggattcctggaggaagtgacaggaaagaagatcacggaggaagcagtcgcaaaggcggtcgcgaacagcaggaaggcatctgaaaactatcgggcgcagcttgccctgagaaaggaccacgatcctgtcacatccctgacgaatgaattgtatgcactcttcatgtgccatctgatggccggatcggaagaggcagtgaaatacacgaaacttctccttgaggatgtgaagaaagccccgaagggcgaaggactccatgttctctggatgcacatcatgccgtttttgcaggagccggtgaaggaagtattcaactacaatcagaagatgcacatccgcgcctgcgatttcatcgccgatggattccaggagatgcatcatgaggatccgtacgaggcgatggcggagaagatggtaaactgcatctataacgggaatgtgaaccagaggatcgaggccgcaaagaacctcgcaaaggagacggatgtggacggcgcgatactgtttgcccactggggatgcaagggaacgatcggcgcgtcgagcctgatcaagagctccctggagaaagacggactgccgaccatgatcctcgacggggacggatgcaatccggccaacaccagcgacggtcaggtttcaacgagacttcaggcattcattgaaatgctggagaaggcgaaaagtgagtaatcgattctgaatgaaacacacatttgacaagatcagacaagcagcgaaagaggattacgaacatcctttgacttgcaaaaaacgaattggttacaaaaaggagaaaatttcatgatacattatgtctgtaaatacaccccgatcgagctgtttgcgggcttcggggaaacatgcgcggtcctggaggagatgccggagaacttcgagatgtcggaccagatcgcccatgcaaatctctgcggattcggaaaatccgtgatccaggcagttctgcagggaaaagcggatgagcttgtcatggtgaactgctgtgactccatgcgccgcgtatacgatatcgttgcgagcacaggaaaatgcaaatttctgtatatgctggatctcccgcatgacgacaatgagtgcgagaaggaaaagtttgcggcagcgatccgccgcctgaaagaggcgtatgagaagtattccgggaaaacatttgataaagctgcatttttccattctttcgcgaaacttcgcacagagacgaaaccatatatcggtgttctcggcgtgcgtgtcagcggtgtcctggaagacatgatccgggaaaacatccggatggatgtggataacctcacctgtaccggaggaagacggttggcagtgactacggaggaactggaaaagatggatgaggacgcgatgttcctcgcctacgcggacggacttttggggcagatgccgtgcttccgcatgaaccagagttcaaggagaacagctctctatctggacccgaatttaaaggggatcatttatcacacgatcaaattctgcgattactatggatttgagtacgcgagcatcaagaaaaacatcaaagttccgcttttgaagatcgagacggactttacgagccagagtgccggacagcttctgacgaggatccaggcattctcggagacgatcgaaggttcggaggacatggacccgggaaaaggaatcagcaaggaggcaagagagaagatgacatcaggagtttattatgtagcgggaattgacagcggatccacaagtaccgatgttgtgatcctggatcaggacggaaagatcaagtccacgatgatcatcccgaccggcggcggagcgaccatgagcgcggagaagagcctggagctggctgtggagaaagcgggaattaaaaaggaagagatcgtccgcattgatacgacaggatacggacgtgcctacatcgacagcggtgacgacagcatcacggagatcacctgccatgcgaaaggcgcccattatctgaatccgaatgtccgcactgtcatcgacatcggcggacaggacatcaaggcgatcagcatcgatgagaacggcgcggtcaagaacttcctgatgaacgataaatgtgcggccggaacgggacgtttcctggagatgatggcgagaacactgggactttccctggaggagatgagcacgagaggtctgaaatggaagaacaatgtggtgatctccagtatgtgtaccgtgttcgcagagtcggaggtcgtatcgctcgtggcacagaataaagatgtggcagatatcattcacggtctgaatgtgtccgttgcttccaaggtcggcgcgctggcggcccgcctcggacagaataatcctggtgagtacatgatgaccggcggcgttgcgcagaatcagggaatcgttgaggcgctggaggagaaactcggcgcgaaactctatatctgcgatgaggcgcagctctgcggagcactcggtgcggcattgtttgcgtatgagaagtgccaggctgcgaagtaaggaaaaagagtaaaaaatccgtcattccgtcgtgaaaactaatttcatggcagaatggcggattttgtctcagccagataagctttttgtgggagtagctgcaagcgcatctcagatgtaatttatgaatgtgataaatggtctgtgcggatgctcgtcccccggaacaatggatttatcattggaatgtaattcttttacccgatcttcttatcttcctgaaccggctcgcatgtaacatcgatgccgagtttcttaaagatatttttatcaacattggagagcataacggtcgtgtggacctggcagccgcggagtttcgggagctgctctaacgcgatccgggcgttgtcatcagtagcggcacaggtggagagtgcgatcagcacctcgtcagtgtgcagtctcgggttgacgccgccgagatagcggacctttaactcctggatcggagcgatggactccggggagatcaggtcgatggagtggtcgatcccgccgagttctttcacagcgtttaagagaacagctgcggaagcaccgaggagttcctttgtctttccaagaacgatctttccgttcggaagctccattgcagctgccggagcgccggtttccttcgcaagttcgatggcagccggaacaaccgggcggtcattcggggagatctttgcctgcttcatgatgagctcgatcttgtatgcttcgttctggcaggaatcgtcttttacgactttttcaagcgcctggtagtagcggcggatgatctcctggcaggaagcttcccggcacgcatcatcatcaaagatgcagagtccggccatgttgacgcccatatcggtcggggacttgtacgggcattcgccgaagatcccttcaaagatcgcgctcagcaccggatagatctcaacgtcacggttgtagttgacggtagtctttccgtaagcttccagatggaacggatcgatcatgtttacgtcgtttaagtcagcggtagcggcctcgtaagctaagtttaccggatgctttaacgggaggttccagatcgggaaagtctcgaattttgcgtatccggcctttacgccgcgtttgttttcatggtagagctgggaaaggcaggttgccatctttccgcttcccggtcccggagctgtgacaacgacgagcggacgtgttgtctcgacataatcgttctttccgtaaccttcatcgctgacgatgagcgggatattgctcgggtagccgtcaatctcgtagtggcggtaaactttaagaccgagcttttccagtttgtgtttgaactgctggatcgccggtgtgtcaacgtagcgggtgatcacgacgctgctgacatagagtccgcggtcggtgaatactcggatcaggcgcagcacgtcgaggtcgtatgtaatgcccagatcgtagcgcactttgttctttgtgatatcagcggcgttgatcgcgatgacgatctccgcctggtcagcgagctgcatcagcatgcggagtttgctgtccggttcaaaacccggaagcacgcgggatgcatggtaatcatcatacagcttgccgccgaactccagatataatttatcgccgaatttgctgattctctcacggatatggtcagactgcatggcgaggtatttatcgttgtcgaaaccctgcttaatcatttgttctcttctcctcttaatcatgataaatgaaaagatccggttcagggcattcctgaaagacatccgggcggacaaagccgtcatggggtggacgtctggatcggtttcatattgttttatcgtacccgtctatctattatccaacaaaaacatcattttgaacagtagtttttttatttttcttttcaaaatccatatacttatgctatgatgatggtaactatgggagaagaacaggaaggacaaatatgaaaaaaatgctatttgcgttctccatggcggggatcctgctgttatcagcatgcggaagaccggcagcggaggagacagaggcggcagagacaacagcggaagcggaacgtgcgcaggagaccagcggtgtcctggtgatcgaggatgccggagaagataagaacaaaacaatctccgtgcggatcgtggattcctcgaacccggcgcttcccgggcgtgaggcgaagaaagtccgcggcatctacatcacaggtcctgtggccggaaatgaggaagtcttaaacggagttctggacggcgccctagcggctgggatcaacgcggtggtcatcgactttaaggaggaccaggggaggatcacatgcccggtgagcgctgcgaccgtgaatgagatcggtgccagcattccttacgtccgtgatatgaaaagcctgatcgaaagcctgaaggaacgggatctctatgtgatcgcgagagttgcggctttccgggattcttaccttgcggagaagaagccggagtggagtctgacactgccggacggaagtctgtaccgggatcgccaggggatggcctgggtggatccgtaccgccacgaagtctgggattatcttctggaagttgggaatgaggcgaaggaacttggctttgatgaggtccagttcgattatctgagattcccgaatgaggcatcggccggacaggtcgtctacgatgatgcggtgatccggggacgttccaagacggatacgatcctggagtgtgccaattatttatatgaaaatctcgcatcccagggacttttcgtgtcggcagatgtgttcggcacgatcatcgggagcggagtggattccagcgctgtcggccaggattatacggagatggcgaagattctcgattatatctgtccgatgatctatccgtcccactacagctccggaaacttcgggctggagcatccggatatggaaccttataagacgatcttcggagcgctccagaagtccggaaaagtcctgctcgacgcgtcgagagccgataaccatgagagccgccaggcaattgtgcgcccgtggcttcaggactttacggcgacatacctcggagatggtaattatatcacctacggggccactgaggtcgcagaggaagtccgcgccgtgcaggatgccggatatgaggaatggatgctgtggagcgctgcgaataaataccacttagagggactttctgtggacggaagcagcgcggctgcggcggaagtttcgacagaaacttctgaagaaggtgagacagcggctgaagatgcagacgggacttctgaggctgagtccgcggcagaaaccgcgcagcaatagaaaagaaaagtataagagtaaagtcatagaaccttatgccaaaggagacaccgtcctgaaaggggcggccggacccggcagaatggagaacaaaaaatggaacagattcgtaaaacaccagtgccgggagaattctaccggcactttaaaaataagttataccagatcattgcggtcgcaacccactcggagaccggggaggagatggtcgtctaccaggctctgtacggggatttcaaggtgtgggtgcgcccgttatcgatgtttttggaggaggtcgaccgggagaaatacccggatgcggcgcagaaatacaggtttgagagagtacgtctcgtgaaaccgaaagatgcgggtcagtccggaacgaaatcagctcctgaaaatgcccagccggaaaaaaatgatgcgaaaaccattgatcaggacgcaaaaaatccggcagcgaaacagtcagcagcggccagcgaaagcgggaacgtgcagatgacagccggacaggcgccggaggaagaaccgacggtcagccaggatcttctggacttctttgatgcgatggacgagaagaattacgaccggatgctggaatgtctgacgaagctttccgcgcatgcgacccggaaggaactcgatgacatctgtctggtcctggacatcaatccgccggcgggctgtgatgatatcttgtctcagatcatgttcatcaagcgtcacctggcgatgatcagaaagtttgacggggagagattgcgttgacggaaaaggaaaattcttatgagcgcccgacctttaatatagaagaagagctgaaaaaactcccagcatcgccgggagtttatctcatgcatgataagcacgatgagatcatatatgtaggaaaagcgatcagcttaaagaaccgtgtgcgccagtatttccagagcagccgcaacaagactgcgaagatcgaaaagatggtctcgaggatcgcccggtttgagtacatcatcacagattcggagctggaggcactcgttctggagtgcaacctgatcaaggaacacagacctcgttataatacgatgttaaaggatgacaagacgtatccttatatcaaggtcacgacggacgagccgttcccgagagtcctgttctccaggacgatgaagaaggacaaatgccggtatttcggaccgtacaccagcgccggggcggtaaaggacacgatcgatctgatccacaagctctggaagatccggacatgcagcaggaacctgccgaaagatatcggaaaggaccgcccgtgtctgaattaccacattaaacagtgctcggcaccttgccagggctatatctccgaggcagaatataaaaagtccgtctccgaggtcatcgagttcctggacggaaaatatacgccggtcttgacgatgctggaggagaagatgatggcggcctccgatgcgatggagtatgagcaggccatcgagtaccgggaactcttaaacagtgtgaagcaggtcgctcagaagcagaagatcacgagccagagcatggaggaccgcgatgtgatcgccatggcgcgggatgaggcggatgcggtggtccaggtattctttgtccgcgacggaaagatgatcggacgggaacatttccgtgtctccgcgtctacggcggacaataattatcagatcatcggaagcttcgtaaagcagttctacgcgggaactccgtttatcccgagagagatctgggttcaggaaaagttcccggagatggacctgattgcggaatggctcacgaagcgccgcgggcaggcggtaaaattcctggtcccgaaaaaagggcagaaagagcgcctggtggagcttgcagagaagaacgcgaagcttgtactcgatcaggataaagataagatcaaacgggaggaactccggaccatcggtgccatgaaccaggtgggcgagtggctgggacttggaaaagtccgtcgaatggaggcctacgatatctccaacatcagcgggtttgagtcggtcggctcgatggtggtctttgaggatggaagaccgaagcggaatgactaccggaaatttaagatccggacagtccagggaccgaacgattacgcgtccatggaggaggtcctgacgcgccggtttacccacgggatggaggagctggaagaagaacggaaaaaccgggaagacggagaggaagcgccggacggaagattcggaagctttacgagatttccggatctgatcctcatggacggcggacgcggacaggtgaatatcgcactgaaggtcctcgatgagctgcggctcaatatcccggtctgcggcatggtaaaggacgacaaccaccggacgagaggtctctactataataatgtggagatcccaatcgaccgccattccgagggattcaagcttgtgacgaggatccaggatgaggcccaccggtttgcgatcgaatatcacaggagtctgcgaagcaaagcgcaggtccattctatcctggatgatattgaagggatcggtccggcgagaagaaaggcgctgatgcggagatttaagtcactggaagcggtgcggacgcctccctggaggaacttgag

SEQ ID NO: 2022 - DNA, 6553 bp, Unknown
  gut microbiota DNA sequence
agaagttatcagagtccgcgcagatctcggatatccgcctcttggaactccgttctcccagatgtgcggtgcccaggcaacgatcaatgtgatctccggaaaccgctaccagatgatcccgaaagaagtaacggcttatgtggaaggaaagtatggaaaagctccgggaccggtgagtgaagagttaaagaaacggatcctcggcgatgacaaaaagccgatcacctgccgcccggcagacctgatcccggccggatatgagaagatctgcgaagagtgtaaggacatcgcaagaacagaagaagatatccttacctacgcgatcttcccgcaggtcggcagagagttccttgaaaagaaatataacgggtagatgtttgtaggccgttcatgaaaacccgacgcattagtagggtcgaaatcctgatccggaagccacctggatcccagtacttcgctcatactgttcgatggtctccagaaatttctgtacctgcaaaagctcatagctttccgtgtgataaaaaagccaggtattccggcgcagaggagttccatccttcaaaaacagcggaaccacctttcccggaaaatctccgagacagatggcgggaagggtggaccagccgaggccggcggcagccatctcacggcagctgttgatatcgtcaagtaccatccgggagttctggatgttgaatccgttctcctggacccactggctcagacgtttttcttcatccgggtcggtgcggtggctgatatacggatattctgccggatcgcggtcggcgttctcgcggctgcagacaaagcagaccggttcggaggagaggagaatccgtccttcctcccagggatattccccgcggaggatcgcgagcggaaattttctctcggaaagctgccggaacagcgtctggctgtgaccggtcgagatactgatatcgacctgcggatactgttccgtgtaaaggcgcataacgctcggaagacggtagcggcagtaattgatggaagtaccgatggataaagaacctccgaccactcctttggatgcatgaatggagttgcggagctgttcattcatctcgcacatctgccggcagtaggagacaacagattctccgacggagttaaagaccacgccctttctggaccggatcagaagctcagaaccaagttcctcctcgatgcggcggatccgcttcgtaagagccggctgggtcagaaagtgctggtcggcaacttttgtgatgtttttcgtctcatagagatcgatcaaaagctgatagtcctgttcattcataaagctgtaacctccttaaaatatgataccggtttggtttacacagaatcccttttatatctgcaatttgccccggtttgtgtgaaacaggtgcagcgacttcaagggctgcttagtaatgaacccgaatttatgaatccggaaaggcaaaaaattaaaaaatgcgggcagaagaatgtttgagttcgtggtgtctgtcctgatatcatcaaaattagttatctaaattcagtatatcatataaacaaaaagaatgtaaggagcaatgacaatgtatatgacaaaatatccatgcgtttatatgcgcggcggcacaagcaaagctgtatttttccatgagaaggatcttccgaaggaccagtccaagtgggacgagctgttcttaaaagtgatgggaagcccggatgtcaagcagatcgacggcatgggaggaaccgtttcctccacaagcaagatcgcgatcatttccccatccgaccgtgaggatgtggatgtcaactattccttccgacaggttgatatcgtgatcccgaatgtcgataaaaaggcaaactgcggaaacatttcctccgcggtcggtccgtttgcgatcgatgaaggacttgttccggcggtggagccgatcacggtcgtaaaggtgctcaacaccaacacaaacaagatcatcgaggagcatgtccgtgtgaaggacggtcacgcgatggtggacggagatgaggtgatccgcggagttccggggacaggaagccggatcgacatgtactttatggaaccagccggtgcagcaaccggaaagctgttcccgacaggcaaccgcaaggatgtatttgatattccggattacggtccgatcgaggtttccatcgtggactgctccaatacgatcgtgtttatgcgtgcaaaagatcttgggatcaagggaaccgagcttaccgagttaaatgcaaacaaagatgtgatggaacacattgaacgggtccgctgttttgcagcaaaggcgtgcggctttgttgaaaactgggaggacgcaagaacaaaatcaacatccctgccgaaggtttccatcatctctgagccgcaggattataaagacatggacggaaatctgacaccggctgacacgatggacatctgcgtccgtgcagtatctgtcggctcccttcacaaggcatatccgatcacggtttccatcggaacaggagctgcggcacttcttccgggaacgatcgtcaatgatcttgtccagccgaaagagggtcagtctatcgtccgcctcggacatgccagcggcgtgactgccgtagacatcaagatcgacggcgaccatgtcatcaagggcggcgtcacaagaactgcgcgccgcatcatggatggctatgtatatgtaagagaataaataaagcccccaagaacccttcaatttgaaattcctgcgaggtgtcagctccataccgcaccccgcagggatagtaccccaaaagtacagcgaagagtttcataatagaaaataaaatcaggaggaaataaaaatggtgacattgcatgaaggaaaacagttcatcattgacaacgagaggatcgcaacagccgaagaagctgcaaatctttccgaggaagaaggaagaaaagagactctgacttatcaggtgttagcggctcacaaccgttccggaaacatgaaaaatctggagatccagtttgattccatgggtgtgtacgataacacatacgtcggaatcctgcagaccgcatatgccagcggattaaaggaattcccgatgccgtgcgtattcacaaactgccacaactgtctgtgcgcggtaggcggaacgatcaacacggatgttcacaaatatgcggagtccgcatgtaagaaatccggcggaattttcgtaccgccgcacgaggctgttatccaccagtacatgcgtgagatgatcgtaaaatccggcggaatgtccatcgtttccgactcccatacccgttacggaacccaaggttccatctccatcggagagggcggtccggagcttgcaaaggcaatgctcggaaaatattatgagatcgaatatccgggcgtgatcgcggtcttcttaaccggaaaaccgaagccgtgggtaggtccgatggacgttgccttaagcattatcggaaaagtatttaagaacaacttcgtaaagaataagatcctcgagttcgtcggtcctggtgtttccagcatgtccatggacttcagaaacggaatcgatacgatgacgacggagtccgcatgtctttcctccgtatgggcgacagatgagcagacaaagcgctacttcgagatccacaagcgtccggatgacttcaaggagatgaagccgggccatgcagccatgtatgacggaatcgttgagatcaacctcgacacgatcgttccgatgatcgcacttccgttccatccgagcaacgcatatccgttagcagacgtgatcgctgatccggaaaaatacatgacactcacagagaaagaggcagagcgtgtctttgagaacaacaaggacattcatcttgacctccactccaagatccggaacggtaagatcaaggttgaccaggcagcgatcgctggatgtgcagcaggttcctttgagaacatcttcgcggtagaccagatcgcaaagaaaatgaaccatggtctcggaaccttcccgttcaacatctatccggcatcccagccgatcatgtacgagttaaataagatcggcattttaaacgacttgatgaactacggcgtccgcgtaaagacagcattctgcggaccgtgtttcggagcttccgatgcacctggaaacaatgatttctgcatccgccacagcacgagaaacttcccgaaccgagaaggttccaacccggcaaacggacagatcgcatccgtagcgctgatggattccaagtccatcgcggcgaccgcatttaacggtggttatctgacttccgccgaggactgcccggttgtttacgagactccggagtatgaattcaatgagcacatttatgacaacatcgtttataatggatttggaaaagcaaaaccggagacagagatcgtttacggtccgtccatcaaagactggccgaagatgccggcactgaccgagaaccttcttcttcaggttgccagcgtgatccgcgatgaggtgacaacaacagatgagctgatcccgtccggtgagacagcttcctaccgttccaacccgtacaagatttccgaatttaccctgatccgtaaggatccgcagtatgtgggacgcgcgaaagcggcacaggagttcgagaaggcgagaactgcaggcgataaggagaaagcaggaaccttctatcaggtactcaaggcggtcggtgttgacactccggtagaggaactcatgaagacaaccgggatcggatctgtcctctacgcaaagagaccgggcgacggttctgcgagagagtatgcggcaagctgccagaaagtactcggcggtcttgcaaacatctgcatcgagtatgcgacaaagagataccgcagcaactgcgtcaactggggaatcctgccgttcacatgtccggaaaaagagatcgttctcgagccgggtgagtacctgtatcttccgggaatccgcaaagcagtggaagacggtgcgacaagatttacggcaaaagtgatcggaaaagacggcgcagtccgcgaccttgagttagagctaaacggcgtgaccgaggcagagaagaaggttctcttagcgggaagcctgatcaattcctataaggaagcgtaaatattaaaataataaaatactgccggtccggtcagcgtgaaattgcgcgctgaccgcgggctggaaaaacaggggtatcacgaatatttggaggtattacatatgaaactggcaattatcggctttgtactcatgatcgtcttaatgtacgtgctcatccgggaaaagatggctccgcctgtggcattcatccttctcccactgatcgcagcggcatgtgcaggattcggaatggaagatatcgcaggttttgtgaaaacaggtatgaattccatgttaagcaccgcgatcctgttcgtcttttctatctcatatttcacattgatgtccgataaaggactttttgatccgatcatcaatttcctgatcaaaaaagcgggaacgaatgtgacaacgatcctcgttgcggcagtgctcacaaccttcgtcgcacacttagacggatccggcgcgactacattcttaatcgtagttccggcgttcttaccgatctgcaaggagatgggaatccgcccgaaggctctgctcggcgcaatgtgcggcgcttacggcgtgatgaacatcgttccgtggggcggtccgacgatgcgtgcagcgagtgttgcaggtgtggaagccggtgatctctacagctttatcattccgggagtcgcatgcctggttctcatggcgtttgtgatcgtatttgtggttgccatgatcgaaaagaaaaacggcgccggaaatgcggcaaagatcgagaccgaacagaaaaaagcagaggagaagaagataacctatgacgccatctactggtttaacctgatcctcacgatcgtgatgctcgttttcttattcatggatcttccgattccgttatattcgattttcatggttgcttacgcgatcgccctgatcgtaaactttaaaagcgtcaaggaacagagcaaaaagatcaaagagtatggctccaatgccatggtcatgactgtcaccttatttgctgtcggaatcttcatgggagttatcaaggactccggcatggtggaagcgatggcagagacgatcgtcaatgcacttccggcagcgatcgcaccgcacatgcactggttcatggcactcttctccgtaccgctcctgatgatccttggaacggatgccttctactacgcacttctcccgatcattatcggcgtagtacagccgttcggcatcacgccggaaacggtagcggcaaccttccttttatcagccacaatggcaactccgatcagcccgtccgttgcagccgtatacgtgggcctcggtcttgcagatgtctccatcagtgagcatatccgctactccctgcgccttgtatggccggcgagcattgcggtcctgatcttatcaacgctgattggcgtgatccgtttctaaaaaaggatatcagataaaaaacatctccggtttgaggtaagccggggat

SEQ ID NO: 2023 - DNA, 2458 bp, Unknown
  gut microbiota DNA sequence
tgccatcaggttgtttaattcttcgattccatggatatcgaagctcatggtgatcgtcgccttgccctgcttgttcacgcgggagctcatggccttgatatcgatctcgcgttctgtgaagatcttggagatatccacgaacatgccgatccggttgttcgcgaagatcgagatctctgtggagtaggtcgcggcactgttgtcctcctcaacgccctgccactccgcgtcgatcaggcggcttctctcaatctccgggagatttaagacgttgatgcagtcggttctgtggatcgtaattccgcggcctctcgtcacgaaaccaacgatctcgtcgcccggaaccgggctgcagcacttggagaaacgaaccgcaaggtcatggatgccttttacgatgatgccgctctttgacttgctgcctctgatcggaactaccgccggtttgttattctcgccgatggcatcaaggatcgtcgcgtcggttacttcgcgtttcagcttctttgtgcgctcctcgatcatcttgttgatgacctgaccttcttttaatccgccgtgtccgacggatgccagaacagaatcccagtcctggaacgcgtagcgttttaaaaccttatctacgaactccggcttattgatatcggagaaattgatcccctttgccttacagtagcggtcgatcatttcgcggccctttaagatattgtccgccttccgctcctgcttgaaccaggcgttgatcttgtttctcgcctgactgctcttgatgatatttaaccagtcacggctcggtcctttggaattctgggacgtcatgacctcgatccggtcaccgttctggatcacatagtcaatatttacgagctttccgttgactctcgcgcccaccatcttgtttccgacagccgtgtggatcgagtaagcgaagtcgatcggcgtggagccgcttggcagtgcctttacgtctccggtcggtgtaaaacagtacacgctgtcggagaacatatcgaggtcactcttgatggcgtttaagaattccttgttgtcggacatatcctgctgccactcaaggatctggcgcagccagcttaacttcttcgcctcatcaccggcagcaacctgtccgcttccgctctctttatatttccaatgggcggcgataccatattccgctgtacggtgcatctcaaaggtacggatctggatctcaaagggctggccgtttgtgccgatcagtgtcgtatgtaaggactgatacatattcggcttcggcatcgcgatataatctttaaaacggccggggatcggtttgtacatctcgtggatcacacccagagccgcgtaacaatcctttacggagtccacgatgatgcggactgcaaagatatcgtagatctggtccagcgtcttgtgctggtttaacatcttcttataaatgctgaagaagtgcttgacgcgtccgttgacctcgcacctgatctccgcgttctccatgtgggtcttgatctcagcgataatgtcatcgatgaatttctggcgcgcttcgcttgtcagggcgatcttttcttccagttctttgtatacatttggctcgagataccgtaacgcaaggtcatccagttcgatcttgatcttggaaataccgagtctgtcagcaagaggggagtagatctcgatggtctctctcgccttctctttctgtttttccgggcgcatatactgaagcgtccgcatattgtggagacggtccgcaagcttgatgataatgacgcggatatcttttgccatggcgaggaacatttttcttaagttctccgcctgcatttccaccttatccgccgaccaggataactgggtcagctttgtaacaccgtcgactaagagggcaacctcttttccgaatatctcggcgagctgttcctctgtatatacggtatcttccaccacgtcgtggagaagtccggctgcgatcgtctctttatccatctcgagatccgcaaggatgatcgccacacagagcggatggataatgtacggttccccggattttcgcttctggtctttatgggcattatccgcaagctgatatgccttctcgatcatgctcagatcatcggacggatggtactttctgatgctggcaacaagatcccggtaaagaacatcaggacttgtgaaatcagcaggcgcttccagctcgccttcgatcgttttcagtttgttttcttccataatatctcccaccttcacttttagcgtaccatccggttatgtccgccgcagaaatccgctgttttcacagtattttcgacaaaagcagacactcctgaaatataccaaccattataaaattttttagcataaattgcaatcgttttgttacggttttaggccgctgctttccggaaggattccctgatccggggactcttatacaggggcgttccagatccgg

SEQ ID NO: 2024 - DNA, 46827 bp, Unknown
  gut microbiota DNA sequence
tccgcggccataacggtatcatacggaattttcagttcagaaaattcctacccgtgaaaagtaaccaatttatgccgtattgcatgttgtattcttctcgatgaaaaaaagcagcggaactactctcagagaataagttccgctgcttatctttctttttataatcccagctcctcaaacacgcccttcatgatgatcttcacagaaccgtcatccaggactttgtggagtccgctgtattttaagagatcgaaatatcccatggaaccgccggctgcgcagagtttgtagtagtctgcccatgccgctttccggtcttccttcatctttgtgtagaactcgaacgcacccatctgggccatcgcgtagtccacatagtagaacggatacaggaagatgtgctgcttctgcatccagaatccgccgccctcaaggaattcgttgccgtcataatctctccacggcatatagatcttttccaggctgctccagactgctctccgctccatcgcggtcatctccgaattttcaaagaccttgtgctggaattcatcgacgcagaccatatacgggatcttcatgagcgcgtccgcgaggtggtctttccggtactgctccgcgcggcccccgaagaatttctccatccaggggtaagtccagagttccatgctcattgagtgaatctccgcgatctcacttgtggagtggcagagctccgggatcttctggaattttgccgctgtgaaaccggcaaacgcgtggcccgcctcgtgggtcaggacattcacatcggcgtccgtgccgttgaagttggagaagatgaacggtgcatggtagagaggaagtatcgtgcagtatccgcccgcgcgcttcccatgtttcgactccaggtcgaaaagatcatgttcaatcatgaaatcgaagaactctccgctctccttcgagagttcgcggtacatcttctgagcctcaccgaccaggtattccttatcaccgaccgggaccggatttccgtccggagaggtcagggactcatcgtaataatagagatgctcgatgccgagtgcctctttctggcgctcatagagctccttcacagccgggacaatgatctcccgcacctgtttccggaacacttccaggtctttcgccgtatagtcgaaacggcggcggcgcagatatcccatcgggataaagctctcaaatccaagctttttcgccattccggagcgcaccttcacgagaccgtcatagacttcgtcgagcttcggggcgatcccctcatagagcttcgcccacgcctcaaacgccgcttttctctcggtgcggtccgtactctgcatgtgttttaagagtccgtatgtcccgagctgctctccgcggaaatccacggtggccgccgcctgggtcttcatgtactggttgacaagctcggcttcctccacctgatcgtccacgatgcactcgtcggagagctgtttctgcgcttccatattctgcaaaaggatggagccgaattctttctccatctcgcctttgaacggggatgccacaatgacctctcccatctcttttttcagtatcccgtatttcggcatctggctgttaaaatatgccatctcgccctcgtagaagctgtctaaaaggttgatcgtgttccggatatgagcgactgtctttgccgtctcaagctccgtatccgcctccacgaagtccatgtaggcatttttaaactcctcatagctctttgctttctttaacgctgcgatatcccccgatacgcgcgcaaagactttttccatgtccggacggacatactgaagatccgcaaatttttccatgatagtaacccctttcccaaaatgatgctgctttccggtctgttccccatattttacagaccgcagccggtcctagctgactgctaccccgtttttccggaggaatttccttacattctcgtcccattcattctccagcgtccgatccatggtaaactgtttcatggatgtccccgtaacgcagatcatctcgtggttttcatactggacattgatgtaaagtcctcctacctgatccggactgagccccggaactctcccggaaacaaaccggtctcttgccgacggcggcatcagaaatacgatccggaagctctccggcagccgttttcccctgatcagggagtagcagatcggctttaagctcttccaggaagaatattcttcgatccggttctcctcgagctcttcttccgaaaaatatccctgacggatctttccgtcgatggaaaaccggttccaggtcacgatctccgcttccctgacaagaaatttatcaaagatctccccgataaaaagcccttccgtaaatgctttctgctcttcgacctttaatgctaccattgcttacctccatatattttttgccgttccgtaactgttcagcaccctcacagttacaatcctgtgctttattacggtcagcgcagcaagtgcgcagacctactgaatagttacgccgttccgtctatgtgatctcacagtccgcaaacagatgcgcagaccagagggaccgtcattccgtctccttacataccgtctcaaagatctcgaagaaatctgccgatgtcttctccccgtctgtgatggaaagatttttccacagactgtcatccttcgcgagatggaccttcgccgcgtactccgagtatgtctcatagaacgcctcgttcttcttctcccggaccatctcttccttccggatcttcgtcgcggcctcatcgtaatcgctcacgcagcgcaggatataatattttccgtctgccccgatcacatcgctgatctccccggaagccagcacgtaagcggcctgctcatattcttctgacctcatgcctctggagatctttttctcgatttcctggtcctcggacacctcttttgcgaccgtcataaaatctgttccctccgtccggaccttttttaaggtctcatccgcctgatctttgtcggaaagtacgatctcatcgaccgtgatgaccttcgcctcgctgtcgctgacctccagattgacattttccgtcagtgtctccaccagtttttccgctttccagtagtcctcatataaggattctgccacatcccgggtaatctcgaagctgtccccggcgtttttcagattttccatatactgagccgccgcctgcttcacaagctcccgctcttttcccgagagtgtgacgttctcctcgtcggccatgcggctcatggtctttaattcctttaaaaaatcatggatctggtttaccagagtctcctcaaacgtagttccggactcgtctaccgcgacatcccagatcttgtctgtatataattcttcataacggagccgctccgtggtgacgatcaccatggtctcggctttcccgtactctctttcactttttctgccggaaagcagcgtctctttcacgccgcatccgcagacgatcactgccgtgaggacgaccgccgcaagcgtccttccccaccggttccattttcccatatttctgtcctcaagcttatgttttcctgtgtctcccgcaacaggtatgcagacctcacagatcgttgtctgcaagtatgttttattacggtcagcacagcaagatgcgctgacctgctgaatcaacccgtctgcacatttataaagcaccaagttttttcaattcctgatatacaagatgcaccggaagtcccatcacattcgcgtaagatccctttaatccgtcgatatatcttgcaaaaaatccctggaccgcatacgatcccgccttgtccatcggctcctcggaatccgcatactcccggatctctttttccgtcatcggggaaacattcacgtccgtctcatcatagaaggaaacgaccgtatccgcttctccctccggtccttttttcacgaggcagacgcccgtatagacctgatggctgcgccccgcgagacgcctgatcatctcatacgcctcctcatggctcttcggcttcccgaggatctttccgtccgccgcgacgaccgtatcggacccaaggatcacggttccctccggcatctcttttgccacatcgacggctttctgctccgcgagactcataacgacctcagcagggatgtccgatgtgatcttctcttccacatggctcacgatgatctccgggacgatcccgatctgcaaaagcagctctttccgtctcggggaaccggatgccagaatgatcttactttttcccatttttctttcctgtctgtcatttcctgttatagaagaaagaggcggtctgacataagatccagccgcctcatcctgtcataaagtccaaagtcattgcactttacacgccgcctgcagatccgctccgcagccagtcatgtgctttgcacattccggactccattagaaacttaatttatcctcaaaatagctctttaactctgtgatcggaatacgaacctgctccatcgtgtctctgtcacgaacggttacagcgccgtctgtctcagaatcaaagtcgtatgttacgcagaacggagtaccgatctcgtcctgtcttctgtatctcttaccgatatttcctctgtcatcgaactcacagttgtagtatttggagagttctgcgtataccttctcagcgccctcgtttaacttcttggataacggaaggatgccgactttcaccggtgcgatcgccggatggaagtgcataacggtgcggacatcgccgccctctaactcttcctcgtcatatgcggagcagaggaatgcaagtgttacacggtctgcgccgagtgacggctcgataacgtacgggatgtacttctcgtttacttcatcgtcgaagtaggacatatcctgtccggatacgttctgatgctgtgtcaggtcgtaatcggttctgtccgcgataccccagagctcgccccagccgaacgggaataagaactcaaggtctgtggttgccttactgtagaagcagagctcctccggagaatggtcacgcgcacgcatctcgtccggtttgatgccgagatcctgcagccacttgatgcagaactgtttccagtatgcgaaccagtcaaggtctgtacccggtttgcagaagaactctaactccatctgctcaaactctctggtacggaatgtgaagttacccggtgtgatctcgttacggaaggacttaccgatctgtccgataccgaacggaactttctttctggatgttctctgtacgttcttgaagtttacgaaaataccctgtgctgtctccggtcttaagtaaaccgtgttctttgcatcctcggtaacgccctggaatgtcttgaacattaagttgaactgacggatatcagtaaagtcatgctttccgcagctcgggcacgggatctggttgtcgtcgatgtacttcttcatctgctcctggctccagccatcgatcggagtctccggctcaacgcctttctctgccatgtagtcctcgatgagcttgtcggcacggaaacgctctttacatgccttacagtccattaacgggtcagagaaaccgccgatatgtccggatgctacccatgtctgggagttcattaagatcgcgcagtccacacctacgttgtacggattttcctggatgaatttcttccaccacgcacgttttacgttattcttaagctctacgcccagattgccgtaatcccatgtgtttgcaagacctccgtaaatctcggaacccggatatacaaagcctctggatttcgcaagtgctacaattttttccattgtcttttccattgtgactctcctcttgatctcttccgcactggtttatgcggaaagtaattctatctacaaccacctgggatttcggggtgattccatcccatccggcgtattgccatgatcacaggatcttaaactgaagatcccgtctctctaagatccgcggatttccgccggatccttttatctgaagataatataagacgtctcgccttccggcgtctcggccgtattcccgtttaaggtcacgccctcggacacatactggatcgcgccgtccgtctggagcttcgcgctgccggtcacacagaccacataaagctttttctgttttgtgatgtccacagcggatacttccgtcttttcatcgcctgctttatagaaatttgaaccgacgatatagcctttttccactccgtcctgcacggaaaccacatccagactctcgacctggatcccgctctcctcatccggatactccgccgcaaagcgaaggtattcctccgcatccgggaaggtgatgagaagtttcgcagtcccgtccttcacgatgcattccgtgatctcagcctttttctcactgcttccggactgattttcgctctcgaatgcatccagcatctcctgcgcataggcttttaattcatcggcgctgtaataatcattctcgcagatttccacatctgcgctggtgacggtgccttcctttgtgacataaaggctggtctccgtcggggcaaatgcggtctttcccactccgccgccgcagccgtttaaggcaaatgcgagaaggagaatggctgccgccgtctgtccttttttcataattcctccttgatcctcaaaaacgatttttaaggataaacctgtttatgataccgatgcttcgcattcctaatcggcaaaatccgcgaccgctactgtatcatacgaaattttcagttctgaaaattcctacccgtgaaaagcaacgaatgatccattgccaaaaaagtcaaaaaacctttaacatcatttatatacaagaacatccaaaatgtcaagtgaatgaaaggttttatccacaaatcgccgcttattttccgccacgcattttgtgaattcttccaggactttctccgtgactgtaaaggtgtaaagcttttccaccggagacgcgagaacgtattcccacgtatagatcgtggagtcttccagccttcccagaggcttttccatgtactcgccgttgatctccatgagctttaactcaaagacagccctcacgagccggttcgggatcgtgctctttaagagtgcccggagtgactggtagagaagttttaaggtctcgaccgcctccaggttctctctcccgtaatagtccgcgaactccagaaaatacgagccgtaacatgccgcctccatattttccgtgatctcccggaagtaattctgtacctccacagagacgagggaataggcgtcccggccctcatagagggagaatgtgccgaacacaaagggggcggaggacgccatcagcgtacttccgggtcttctcgcgcctcttgcaaaagccgtgatctttccccgctcgcaggttaagatcacgagtcttctgtcatattcgcctgccggggcagatttaatgaccatcccggtcaggactacctgttctctcatttcttcgttcctttaataacctcttgcatctgatccagatctttcctgctacggccgcaggcagaaatctgtctgcctgaccagccatgctgcagcagagcgatcagatatctttcgaattatatccgtagttcttcatatacagctcggaatctctccactccttgcggaccttgacccagagctttaagttgaccttcgtgtccatgaggttctcgatctcgatccttgcggaggttccgatgcgctttaacatctgaccgccttttccgatcacgatccccttgtgggactctctctcacagatgatcgtcgcatcgatatcgaacatgccgttgtcgcgctccgtcatccgctcgatcgtcactgcgatcccgtgcgggatctcatccgacatcatgcggagtgctttctcacggatcagctccgcagcgatctggcgcatcggctggtcggtcacggtgtcctcatcatagtactgcggtccctccggcagatactggaagatcgtgtggatcagcgtgtcggtgttcgtcttcttcatcgccgataccgggatcacctctttaaagtggtatgcatccttgtaggtctcgatggtctttaagatatcctctttcttcaccgtatcgatcttgttgatgacgaggatgaccggtgtctttacggtctgcagcacttttaagatatgctgctcaccggaaccaatgtaggttcccggctccacgagccataagatcacgtcgacctcacggagtgtatgctccgcaacgtttaccatgtactcaccgagcttgtttttcgctttgtggatccccggtgtgtcgaggaagatgatctgaccatgctcgtctgtatacacggtctggatcctgtttctcgtggtctgcggtttttccgacgtgatcgcgatcttctgtccgatcagatggttcatcagtgtggattttccaacattcggacggccgatcagtgtcacaaaacctgatttatatccttttttcatgaattctccttagcttttccgtagctgtccagtaccttcacagttacgcttttccttactcaaataacggtttgatctccttgaacagtttcctgtccgccttgatcttgtcctcatttcctaccacgcacacggctcctgtctcaaggactgcctttgtgatcggtgcgagggcgcggatatcttccacggtcgcgtttaagatctcctcgcgctcttttttcatcatcccatccgtcactccggaataccatgcggagagtccgcggcttccctttaaggacggcgtcagcggagtatcaatatcgctgatggttccgatgacatattttgtcatcgtgcgctcatccgcctcgaaattctccagataatccggaattccgagatagatatcatcactcttcttcacctccggatcacggtaggagacaaaatatccctcaccagaacgcccgatgccgctcatgcagccgtatgcgccgcctttcacgcggatgttgatccagagataatcatagcttaacatcacttttaagatccgcagcgcgcctgtgtaggaatatccgcttcccgcgaaggttccgcagtgtgccacatagttgaccttggaggaggaagtaaagccctcatttctgttctccttcggtgctgtgaacggatagatttttccggttcctgccgggatcttctcagaaagcttcttcatcgcgccttccagataagagaatccttcctggtcagctgtgtagctgactgtcatgttctctctcgtaaagagcgctgccatcacacgcttcaggccggcaatgatctcgtctttctttgtctcaaagttctttgccaggtcctctaagaatttatagtatccgatcccgcctgtcatatcgttgaaataggaagtatcggagaagtaagaggtccctctcgcaacggccgccgtgtgaccggatcccatgagtttcatctgggactttgactttccttcgctcaagatctcatttaagcgcttttcatcatcgagaaccgagcggttgatgatctcttccaggatctcgaatccaaagtcaagtttctcatagaggactctcgcgctgcaaacgaaaactcctgtgaagcttcccgctttcgcaagatccggataggaggttacggagaaggaaacaccgccgctgtttaagaagatctcactgctcagatcactgtagctgtagttcttcgtatccacatatccgaggacggattttaagagtccgagatacggcaggtcttccatcggaacccggttcgtattgaagagaactttcagatatccgatcccggatgtaaacatctcgtggcggaccacggtgatgccgtcaagctttgtctcctcaaagatcagcttcgcaggctctcttccgatctcatctctcgtcagcatcgggatcttctcgaggtcttccttcggggacggggtgtcctggtactcttttaattcctttgtctggcgaatcagcgcatcgatttcctttttggagaggctgtccttgtattcctttaacttctttgcagtctgctcttcgatccgggcggtaaggttcttcttcgggcttgcgatcacaaccgcctcatacgggttgtcgagaaggtatgtcctgataagtccttcaaaatatccatggtcagcgccctcttttaatgctgcgaaggtctcctcatactctaagtgcatcatcggatcgccgccgtagagccagctgtccaggcactggagaccgtacatgagtcccttcggcgcagaaccgtaatccgcctcgcggtactggaattcgtagttgttgatcccggccttcaggctctttttctcgatgccgccgtccaccagttttctcagtgtggattttacgactttcacgaactcatctttctgctcacgctctgcattctttgcgatcacggagaaatacggctgcaggatcccatactcgtagccgcccatgatatcgtcgccgatccccgcatctaagagtgcttttttaagcggtgcgcccggagcatctaagagcacatactccaggatctggaacgccacgtactccttcggggagagctcgtttccggcctgcgtgttgatcgagaggtaagtcgcatggtcaaggctctcggactcggaaacggaatagaagatctcccgctcgatcggctccttgaattttttctggatccggatctcggaatcgatctcttttctgtcgtactttccgagatattcctcatcgagccattttaatttttccgccatgtccatatctccgtagaggtagatatagctgttggacgggtgataatatttatgatagaacgcaaggtaatcctcgtaagtcagcttaacgatgtcctccgggtctccgccggactccactccgtagcaggtatccgggaacattgccgtgtggatgaagctgtccagaacgctctccggggaggaaaatacccctttcatctcgttgtatacaacgccgttgtaggtgatttcatcttccgggctttcgagctcatagtgccaaccttcctgcatgaagatcttcttctcttttccgatattcggatggaagacggcgtccatatatacgtccataaggttctggaaatccgtctcattgcagctcgcgatcgggtacacggtcttgtccgggtaggtcatcgcgtttaagaatgtattcaaagatccctttacaagttccacaaacgggtccttcaccgggaatttatcagatccgcagagcacggtgtgctcgatgatgtgcggaacaccggtgctgtccgccggcggtgtccggaaaccgatgcagaatactttgttgtcatcctcgttgctcatgaggaaaatatttgcccctgtttttttatgctctaagatcataccgtcggaattcagttccgggatatgttttacctgccgaagacgatacgcgtcaagggctttgactgattcgatctggctctccatgtctgaaaatcctttcttttttacgctatagtcgtaaccggattgctccgcacttcgtgctcccgcaatcctgccccccacattcgtaatccgctcattttttcttcgaaaaaatggctacttactcatgtggggagtgggtctcaaacttataatcccgcctgcaagcaagcttgcgtcgggcttctaagcttgatccccttggttacatattccccacaaatttatcttttaatatcgcaaaacactctctcacgcaaaaatgtacaaacagcacgggatccgactttgcggagatgccgctgacgttggggaggccgacgtggcgggcaatccctttggcgcggagttcgtggaaattgctggtgagaatccctatccggatcacgatctcctcatccggggggagaagatatccggattccgccatggcggcgcggagtgtcgcacggcggatccgctcacgctctgtaatcagcattttgctgtataccatattttcgtaagtgctgcgggatgattcctcaagaagcagctggtaatccgggactccgcggctcttcatgtagcggtacatggcggatgcctccgtcacgtcctcgtcatccccctgtccgccagaaagcacaaataccgtgttcggatgatatgccgcgtactccacagccttttccagacgccgctccagcgtgcggctgatcgtatttccgcgcacctgcgcaccgagaacgatcacatagttgacgctctctttctgaaaagacagcgcgccgaatcccataaggagctccacaacgatgaagatgaatgcgatcgctgaaaagaatgtgatcacagctacctcgatctgcaccggcactctgtcacggatccgcggataaaactttcccacggccgccatgataaaaaatcccagcgccagcacgatccagatggcagaaaatgaggttcccgcaccggagtagatcacgatcacaccataataaatgagacacaatattcccaggatgccaaaaattactgtcacgatcatgcctcctttctaaatcctgcacgcagccattcagctttgtcttctttccggatccggatcttactccgcctctttcttgcggagaatatcgtactgctccacttccccgtccagatcgatataaaggatctgtttcggatgcggtgcgctctcctggctctcgccttcctctgtgtagatgccgcggacaagcgcggaaatatttcttccatccggcttcatgatctcgatcgtctcgccgacagagaatttattcttctgctcgatcttcgcgaatcctctcgcatcccgctcttccacggttccgaggtagatatagttcttcacgtaagtattgctgtcatagatctgggtctcggaagtcggttttccgaagtagaagcctgtggtaaactcacgatacgtacactttccgatttcttccttgtaccactccatgttcgccttatatttttccgggtcctccagataatcatcgatcgctttgcgataggttctcgcaacagtcgccacgtagagggccgtcttcatgcgtccctcgatcttaaagctgtcgatccccgcatcgatcatctccggcacatgttcgatcatgcagagatccttggagttgaagatataagttccgcgctcattctcatagaccggcatgtactcgcccggtcttgtctcctcgacaacggaatatttccagcggcacggatgggtacaggcaccctggttcgcgtcgcgccccgtaaagaagttgctgagcagacatcttccggaataggagatgcacatggcgccgtggataaagctctcgatctccatgtcctccgggatgtgtgcacggatctctttgatctcctttaaagataactctctggcggagacgacgcgctttgcgccgagttcatgccagaaaaggtaagttccatagtttgtattgttcgcctgtgtgctgatatggatctccatatccgggagaactctctttgcgatcgtaaagacacccggatccgatatgatcagcgcgtccggacggatcgtctttaattcctcaaaatatgcctccacgcccgggaggtcatcgttatgtgcgaggatattcgccgtgatatatacctttacgccgtggtcatgggcaaatttgatcccttccatgatctcttcgttcgtaaagtttttcgctttggcgcggagtccgaatgcctcaccgccgagatatacggcatcggcgccgtagatcacggccgtctttaagacatcaaggcttcctgccggaatcagaagttctgtttttctcataactaatcctttcctgacctgttttttacactgagcgcgaccccatcgcccaccggcaggatcgaagtctcaaattcatccatatgtttcaatgtgtacaaatactctctcattctctcatggatcgtgcggtcccgacgctccaccgcgtagcgggattccatgatcgtcccgtcctgcaggacattgtcagacattaagagtccgccgtctctcagcaagcgcaggatatccggcagccagttgatatactgcccctttgccgcgtccatgaagataaaatcaaaggagccggaaagccccgcgaggatctccccggcgtcgccctccagcagcgtgatcttttcttccatccctgcgaggcggaaattttccttcgcctccgggatccttttttcatatttttcgattgtcgtgatccggcagttttccggcattacagacgccatcaaaagcgctgaataccccaccgccgttccgacttccaggatcctggcaggggaaacaagcgtcaccattgtctttaaaagtgccgccgtctccctgcggatgatcggaactctgttttttaccgcagtctccgcgatctgttcaatgagctcctcatccccctgatccagggaatttatataagccgtaagtctgttttccgtgatcatgatttcgtatcttccttcgcagcatcttccggactttcctttaaaatatcgatcagctctttggagtccttcgatgtatttagctcataagttccggccttcacctcgtatccatagcattttgcctggatcgtaaaggtacgcggatcacggatcaggccggctttctttaagatctttccgacctcttccaccgactcgtttccggtgagcttcacgctcttctctgttcccggctccgcctccatcgccggcgcatagaagatcccgtggccaaaggagtaggcacttctcgccccggtgacgatcaggatggcagcaagtccatacaggatgatccgtccggatgtgctgatgacaaacaggctgatcttgttgatttctcgtgttatcttgctcatatcattccccttgcaggtagctccgccgtgtatcttcttgttttcatgtgcatgaaaacaagaagccgggggcgttccccctatactgagctgtgccaaaaattgcttatgcaagcaagcttgcaacacaattttcagcccagatcagtgcacggctaactgggttcatttaaacttccatgatgattggaaggatcatcgggtttctcttgatgcgcttccataagaagtcgcttaaactgtcgcggataatgttcttgatcttgccccagtcggatacgtggcgctctaagcagtctgcaacagcctgatccacgatcgcctgtgcctcctccatcagatcctcagactcacgcacgtagacaaatccgcgggacacgatatccggtccggagagcaggaggttggagtgtttctcaagtgtcaggacaacgataatgataccgttctgggcaaggttctggcggtcacggagaacgatatttccgacatcgccgacaccgagtccgtcaacgagaacgccgccggcctgtacatgatcgatcacatctgcgccgctctcaccgatctcgagcacatctcctgtgtggagcatcacaacgttctctttcgggatgccgagagaaatcgcaagctccttctgtgccattctgtggcggtactcaccgtggatcgggatcgcatatttcggacgtaccagagaataaacgagtttgatctcctcctggcatgcatgcccggatacatgggtatcctgggaaattacggtcgcgcccttcatggagagttcgttgatgactctcgatacggctttctcatttcccgggatcggggtagaacttaaaacgacaacatcgcgcggggtaatggatacttttctgtgcatggaggacgccattctggagagagccgccatggactcaccctggcttcctgtcgtgatgaggacggtatcctcctccttataattctttaactgctcgatatcgatcagggttccgtccgggatgttaatatatccgagttcctgtgcggttccgatgacattgaccatgctgcggccttccacaacgacttttcttccgtacttgcaggcggagttgatgacctgctgcacgcggtccacgttggaagcgaatgtcgcaacgatgatcctgttctgctggtgctcagcgaagatcgcatcgaacgtctttccgaccgtcttctcggacatcgtaaagccaggacggatcgcgttcgtggaatcacataaaagtgcgagcacgcctttctttccgagttccgcaagtctctggagatcggtcacgtcaccgaataccggcgtgtagtcgatcttgaaatcaccggtatttaagatgattcccgccggtgtaaatacagcaagagcagccgcgtcctcgatcgagtggttcatcttgataaattccacgcggaagcagccgagattgatggactgtccgtgttttacaaccttgcgctttacgctgcgcagcatgttgttctcttcgagtttatggtcgatcagtcccatagtcagcttggtcgcatagaccggcgcgttcaccatttttaacacgtacggaagtgcaccgatatggtcctcatggccgtgggtgatgacaaatccttttaccttctcatagttatcttttaagtaggttacatccggaatgacaaggtcgattccaagcatatcgtcgctcggaaatgcgagtccgcagtccatcacgataatgctgtcgccgtactcgatggctgtcatgttcattccgatctgttccagtcccccgagagggataattttgactttacagttttctgtatcatttttcacgttcttcacgattcataacctctttctttttttcttcattttttctgcactcactgcaaagtccgtagagctttacctcgtggttcatcacgagaaagcccagtttctccatcacttccgcctccaggctgtctaaaaggtccgattccagggaatacacctttccacagcctgtgcagatggcatggtgatgacggtgtcccgatgcgctttcttcaccgttcagctcataccgggtaaaaccgtcatcaaatgtgactttgtcgattacatgcagatctaaaaggacctggacggtcctgtatatcgtagccagtccgatctccgggctgtttactttcgccagatcatagatttcttccgcggtcagatgttccgccgggtgcgacgcaataatatccagcacgatcatacgctgatttgtcacttttaatcctgccttgcgaagcagtccttttactgtctcatcgttcattttctcgtctcccaacatctatcccgcaaaaatttactcagtcttatctccgtcagataagaccgggtcaaacgcccgttgtgggcgcgcattgtcttattttactgtttttccagatccacgtcgtcaagaagctctgcgaagatcttcatgagtccttccagctcgtcctcatcttccacgaactcatagagggcatccgcctcctcagcgccggacatatcctttaagatatagcagtcgccttcctcatcgtcatcttccgcatctgtgacgagaagatagttcgctccgtttaattttgtctcttccacaacgtaaaattcgagtgtctggtcatcgtcgaccagtgtgatctttctctcttccatacatattctcctgtttgctgcagcccacagccgggccacctgccgagtgtttcctgttttcgtagttacacgtttcgttctcagtcttcctgacgatcttctttcgtctttaagcagtccagatatccctgtaagatcaggcccgcggcaactttatcgatcaccgcttttctgttctcgcggcgcactccgctctccatcaggatctgttccgcagcaacggtcgtgagacgctcatcccagtaatgcaccggaagtccggtacgacgctctaacatttctccgaaggctttcgttttctcaacgcgctcgccctctgtattgttcatatttttcgggagtcccagaacgatctccgtgatctcatactccctgatcagctcctcgatccgggcacacgtcttgcgcagtttgttctcatccttgcgctcgatcgtctccacgccctgggctgtcagaagaagtccgtcactgaccgcgactcccacagtctttgaaccgaaatccagtccgagtattctcataaactctgtcctctgttatttttcctcataccaaaaccagccggatatgttccttcccggctgtctgttctggcgtcgtatctgttcagtacctgacatctcatcctttgcggaaagactagcggagtctcgtctcgatatagttctccatcagctcttccaggatctcgtcacgttctactttcatgataaggcttcgcgcgctcttatagctcgtaatataggtcggatcgccggacatgatatagccgacaatctggttgatcgggttataccctttttcggtcagtgcttcgtagacttcacgaaggacctcgccgacctcaagcttcttatcttcctgtaccgctttaaaatattgtgtattactgatatcgcccataaatatcctcacgtcctcttgtgctgatataaatcagatttatatcaacccttttgttgctattctttattctactctaattttatcgtttctgcaatacaaacttgcccggctgaccatcggcggcgctgccctatgagagcagcatgatctcctccgtcaggaattccttcaaggttcccctgacaaatgtatttttcagcatcttcggatcgcgcccgtcaagtcggactgctgccttcacatattccttcgtatatccggtcatgcagacctcgctgtcgatcgtcaccggctcttcgaggaggatctcctgctccgtcccgaggaatgattcccggtattccccggacatttttttctctagttttaagagaacggcactccgctctttcttcaccggctccggcacctggtcaggcatccggtccgcgcgggttccggcacgtctggagtacgggaacacatgcatctcataaaagtggaccttctcaaggaattcccttgtcgtctcaaaatccgcatccgtctcacccgggaatcccacgatgacgtccgtcgtgatcgccggattctcaaaatattttctgaggatcgcgcagcgctccgcgtactcctcacaggtgtaatggcggttcatgcgctttaaggtatcatcgcatccgctctgtaaagagaggtggaaatgcgggcagatcttcggaagctttgaaagctcctccgcgaacatttccgtgatcacacgcggttccagggagccgaagcggatccgctcgatcccatcgatcgcatgcagccgtttgatcagtgtcaggaagtcgatcccctcatccttgaagtcgatgccgtaggaagtcagatggatgcctgtgaggacaatctccttgtaaccttcctccgccaggatctttacttcctcctccacgtcctccggccggcggcttctgacgcggcctctcgtgtacgggatgatgcaatagctgcagaactggttgcatccgtcctggactttgatgaacgcacgggtgtgttccgcctgctttttaatgtgaagcttctcgtactcattggattccgcgaggtccgtgatggactctttgatctcttttccggcaaaccaggcgtctaaaagcggaacgagatccgccttgcggttatttccgatgatcagatcgacagcggcgtcctctctcagtttgtccgctgccgcctgcacataacagcctgccgcgacaacgaccgcgtccggatttttcgccttcgcgcggtgcagcatctggcgtgatttcttgtctgccacattcgtcacggagcaggtgttgatgacatagacgtccgctttctcctcaaatcccacgatctcatatccagcggcctccagaagctgttccatcgcctccgtttcatacgcatttaccttgcagccaagattgtgaagcgctgcttttctcatattctatctcctcatattatataatcagtttctgtcactatacccggattttgccgatgcttcgcattccgaatcggcaaaatctgctgccaaaactgtattgtacggaattttcagttcagaaaatttctaccgtgtacagtaacatacagtaacacttaaacattattcaagatacctcttgacttttcatgcatgtccatttagtatgaaagtaggtttttctattttatcagaataacaaatattcgagtattgggaggaacactgacatgaaaaccgttaaaatttctttaaactccatcgataaagtgaagtcttttgtaaacgatcttacaaagtttgataccgatttcgaccttgtttccggcagatacgtcatcgacgcaaaatccattatgggaatcttcagcctggatctttccaagccgatcgatctgaatatccacgatggcggaaacacagaagagatccttaccgtacttgctccgtatatcattgaagcataagaaaaaaagggtgtaactgtaaaggtactgaacagttacaaggttttaaaaactgccggaatcttacttccggcagtttttttgcaccttttttagatgcagcggatcacttctctcgtctcaagtgccgtcttcatcagttcatcgatcttctcatccagcttcttctcggaatttttgatcttctttaagctcggctttgtgaccggatgctttgcgacgaagatcgtgcagcagtcctcatacggaagaacggatgtctcgtaagttccgatctttaaggaaatatccacgatatcctgcttgtcgaacgcgatgagcggtctcatgaccggaagctcgcagacttcatttgtaacggcgagggactgcatcgtctgggatgcaacctgaccgatgctctcgccggtgacgagtgccagacagtcattctccttcgcgatcgtctccgcgatcttcatcatatagcggcgcatgataattgtaagctcgtcatgcgggcactgatcgtagatgtagagctggatatcggtaaagttgatgatatttaagcgaatcggacctgtgtactttgcgacaagttttgcgagatcaacgaccttctgcttcgcgcgctcacttgtatacggcggagcatggaaataagtcgcatcgatcgtaacgccgcgcttcgcgatcatccagcctgcaaccgggctgtcgataccgccggataagagcagcattgcacgtcctgcggttccgatcggcattccgcccggtcctgggatcgtctcggagaagatgttgatcttgtggcggacttccacacggagtaatacgtccggtgtgtggacatttacttttgtctccgggaatgcgtttaagatcacctcgccgaggtcgcggttgatctggtcggaaacgaccggatactgcttattcgcacgtctcgcgacaactttgaacgtaaagtgtttatcttcatatgcgtcatcgatatacttgaccacctgggcctttaagtcctcgtagccgttgtcctcgatctgaaccatcgggcagatcccgacgataccgaatacatgctggagagcgtcgatcacttcatcgtaatcgaaatcttcagatgcctccgcatagattcttccggcttcctttgtaacctcgaactttccttccaggttctttaaacggtgatggatctgttttacaagggcgtcctcaaagaggtaacggttctttccctttacgccgatctccgcgtatttaattaaaaatgatctgtatttcacggaatttcctccattggttttctgtatttatgctctgcggtatctccgcagcatcggaacaagctcttttaacacgtccaggcagtagtccacctcttcctccgtattgaatgcaccgaaggagaagcggagtgtggaatcgagcagggaatccttcacgccgatcccctttaaggttccggacacacccggatggttggatgaacatgcggaaccggaagaaacgtagatccctttatcttccaatgcgtgtaaaagcacttccgctctcacgccctcaaatcctgccgccacgatctgcggtgcactgtcacgtccggtaagtccgtggaccgtaacgccgtccatcgcctgcaggcctttcaccatgcggtccttgatcgcgtagagcttatcgatcttcgcgtcatggtctgtatagaccatctttgccgcaagaccaaggcctgcacagcccggaacgttctcggttccggagcgcatgcctttctgctgaccgcctccgtagatgatcggtttgatcttcacgcgctcatcgatatagaggaagccggttcccttcggtccgtggatcttgtggccgctggcagataacagatcgatcccctgttttttcgggcgaatcacatattttccgtaagcctggatcgcgtcaacatggaagtagacggacggctttttctccttgatgatcttcgcgatctcctcgatcggctccacagcgccgatctcgttgttcacatacatgacggacaccaggatcgtatcgtcgcagatcgcctcgcggagtgcatccagggagacatgtccgttgtggtcgaccggaaggtaggtcacgcggaaaccaagttcttcaagaaatgctgtcgtattgtagatggacgcatgttccacgcaggaggtaatgatgtggtttccggcgcgcttgtttgcaagcgccgtgccgatcagagccatgttgttggactccgttccgccggaggtaaagaggatctccttgtcctttacctttaacgttttcgcgatctcctcgcgggcagtcttaatgtagttttccgcctccacacctttcatatgtctggaggacgtatttccgtaatccacggtcatcgtctcagcgacgatatcgcgcacttcatcgaacgcgcgggtggtcgcggagttgtcaaaataaacttctctcttatccatgagttgtattactcccagtttatcagcaataactccatgcacacagtttttctgttgtcatttttctgttatcctgatcgttctccttattctcgtattccacgtttcttcatgattccagcagcagtccgacagccgccatcacgaacattccggccgtctcggttctcaggatccgctttccgagtgtcaccggtctcacgccggagttcatcgcaatctccacttccccgtccgaaaatccgccttccggtccgataaagatggacagtttctgtcccggctttaagcttccgatcagctctctcgtgagcgccattccgcccgcacccgggagactttccgaatcctcataaggaatgatcgccaggtcatccgctttcgccgcctcgatcgccgccttgaatctcatcacatttccgatctccggcacgatcatgcgcttcgactgtttcgccgcgctctcggagatcccgtaccagcgttttctcttcgcttcttccttctttgcgtcgagcttcaccaccgcgcgatcggtatccaccggaacgatctttgtgacgccgagttctacacatttctggatgataaattccattttatctgctttcggaagtccctgatacagagtcacctgtaccggaagctccgtatcgtccacctcttccggcaggatcttcgcgagaaccttgtccggaaaaagctccgtgatctcgcagaggcagttcgttccctttccgtcgctgagcaggatcttctcacccggcttcatccgcagcacgtttttaatatgattcacatccgggccggtgatcacggcctccgtccctgtaaaaaattctgtttccgtaaaaaaatggtacactatttcttcctcgctgtaaaggatacccactcgccctgtcttgtcacttcaaggatctcgaacgcttcgtttgcctcgagagcttcgcggaccgcctgttccttcatatcaatgataccggagctgatgaagatcccgcctttctttaagtggaacggaacctgtttctggatcaggatgataatgtcggcgagaatgtttgccacaacgatatcgtagcactcgtatccagctgcgtcctgggttgccttgtcgtcgatgatgtttccctggatcacgccgaacttctcctcagggatctcgttcgcagccaggttttcatggacagccgtgatcgcattctcatcaagatcagttccgaatacataatcagcgcccagttttaaagccgcgatcccgagaattccgcttcccgttccgaggtcaaggacctttacgcccggctttacatacttttcaagctggcggatacagagctgcgttgtctcatgttttccggttccgaaggcggttcccgggtcgatctggatcaggagcttgtccttatgttcttccgggatctcctcccaggtcggcttgatcaggatatggtccacggtaaacggtttgaaatactgtttccagttgttgatccagtccttatcatccgtctcggactctgtgatctttgcggttccgatatttacgaactggctgatctcctcaagtccctcgcggactgcttttaacttttcttccgtatcttcatcctcatcgaggtagaagctgacgcgggcagtaccgtcgtccggcgggagttccgggagaatatcgataaacattccctttgtctcgctctctgtgagcggcacgttgtcctcgatctccattccttcgatcccgatatcatcgaacatacttccgagatagtccactgcgtccgtggtcgtctcaagagtgaatttcttccatttcatatgctgtttctccttttttatgatcgccggtcaggaccaatcgttttattccgttctgtcatatccggctttccgcacatatgcctgtatcctatatggatgcagacgaaatcacatgatatcatagcatagtttcacaggctttgcaaggtgggactttactgcgtcatatacaaagcgggacagagctttttgccctgtcccgcgaagtgaatgctatgaaattttgtaaatgttcaggcctgctgaatcgatacgaaattttatgccgtctttttgttcggacggacgaataagatgcatcccacgatgatgcagatcgcaaacatcgctccgccgacgcccatcgtcattccgacgcctgtcatcgtccacatcggaacgagacctgcgaatgcttccttccagcacataactgcgctgtacacaccgtggttatccggtgcactggagttggaatccgggtcaaccgcacggacaagcgcaagacctgtcgctgtgtttccggtacctacgccgaatgccatgatcgctttctcgaaccactcatctttacagaagagtttgcagaagccgagggcgatcgcaagtgtcagtgcacagcagatcgctgtgtagacaacgatcggtacgatatatgtactgatcaggtcgatatcgagagttgccatcgccgtgaggacaacgacctcaagtaaaaatccgctgacatgtttgatcgtctttacatcgatgtaacggtcaagtttcactgcctttgcaacgttccatacgatcgcgccgccgaggataccctggataacgctcgggagaacgctgacgcccggccatacaagaccgactgtcttgatgagaagacgtcctacataaacagaaccgaggagccagccgccctgaagagcgagatggttgataccgatggagcttgtaaccgtgtttccgatggaagttttcttgtcatccggaagaacaccgccgtagtaccagtcaggctgtttctgagcatcttttacgaactttgtccagccttttctgacaccgatgtttacaacgatcataccgactaacatagccatgatcagaccgaaggttgcaagtaccataccgatggacatgtttcccggaataccgaggttctcatatgtctgtcctgctgcaccggcatttccgtggccgccctgaaatgcgaacacgcccatggttccccatcctttcgggagacccggccagatcactgcgagcagagcaccgagaccggcgccgacacacatctgcattccgtagattccctgctcaacgcagatgtaatccatgtatccgacaactttctttttgttgatcgtaacgccgaataacagagccgccatgatcggagcgatcaggacgttggagaacttggagaaagactccggaatctcaacaaggccaagcatctgctgaccaaggatcagtgccagaagtcctccgatcagggatgccggaaggaacagcttctggataggtttcacgatttctcttacaaaaaatcccgcgagcatgaacacgccgatgaggatcatgtcgctaaatagtgacgcaactgtcatattgtacccccgtaaatcatttgcagccgttcaggttttcacagctgcaggttttcttttgataatggatagtcagggtcaggtgaggttttgacccatctgaaagcatatttttttgatctatggtattgatctgattggcccaatcactttctgcggatattgtatctttgttccttcaaaaacacaaacaatgtatttcgtttattttaacaaaaattctttgttatgtaactataatttataaatattctaaataaagttttcagtgttttccgcttttcagaacatatcccgacacattttccgctccgggtacagccgcctacggcgatcttccatcgaaatttcctgttgcgcaaaaagcgaacaaaggacagaatgggagttctgtcccttgctcgcttttcgcaaaataaggtttggggtataacaaacataaagtataggggtcttcattatgaaatgaacggagctaaatcctctccagacatttgaccgcccggaaagacatgttcaagtcaggctcacgtgggagccggcgcaattttgcccagctcccagtgcaggctgacaatttttcttaggattacggctcgtaaacgtcgtcaatgatctcgaactcttttgctgcgagagtcttctcgacccattctctctttgctgtgccattctttgcagctgcaagcttgctctcgtctgctgcctggaacttcttcgcatcctctaagatctgcggagcgtcttttctcgggataacgataacgccatccggatcagccaggatgatatcacccgggtttacgctgactccgccgcaggataccggtacgttcacttcgcccggaccctctttgtacgggccgcccggtgttgtgcctgtacagtataccgggaaatcccattttccgatctcatcgatgtcacggatcggtccatcaagaacgataccagcgatctttctgtcgtaacgaaggtaagccatcatgatctcacccatcagggaacgtgtatcatcctcttcgttggatacaacgatgaagtcaccttcctgagcgatgtttaatgctgcatgaagagccaggttgtcgccgcctcttgccttaactgtgagagccggtcctactgccatctgctctttcggctggcttaccagatgaattctcgggttcatcgctgcgtttctgcccattacatcacaggtgttggacgccgggatgttcttgaactgcatcattacatcgtgatccggcatgtgtctctttaaatagattcttttacctactgccattgtcataatctccttttccgtggatttttatgtggttgaggttgcttttcgctccctcatctctttctgaggatattgtatcgcaggatcatgacaattacaaacaatgtatttatttgctttttacaacatttttttgttgagtgctttacatctgatcttcgcttttatataatgaaagcggcgggttcatcctgccggatttccgtgtatctgcattgatttcagtcgttaaaaccggctgtttcacatcatggaatccgtcacaaaacaggaacctgctgccctgttaatcttttgagtaacagacggttactcccgaacatggattttcatttggaagatcccatatatttcatatctacttttacaaaggagtctttttatgaacctgttgagcctctattatttcgtagaacttgcaaaagagcttcacgtcacgaacaccgctcagaagctctacatctcccagcagaacttaagccagcacatccagcgtctggaacagtactacggcgtcccgctctttcatcggaaaccaaagctcgcgctcacctacgcaggtgaacagctctacgcagtcgcagtccggatcctcgccgaggaacacgaattccagaaccgtctcgccgacatctcagaaaaaagcatcggcaacctgaagctcgggatcccggcctaccggggacagatctgtctcccggagatcctgccgcgcttctatgaaaaatggccgaatatcaagatcgaactgtgcaacgaatcttccagcaagatggaggaacgtctctacgacggcgaacttgatattttcatcgggatcatgtaccaggataatcccaaactggaatcgtatccgcttttgacagaccacatctatctggtctgttccgacgaacttcttcagaaatattatccggattcctggcagagtctgaaggaggaatccgccggcggagtcgaactggcacggttttcaaaaatcccgtttctgctcccggccccgtccatgaaactccgcaaaacgttggatcaatgttttctcgatgtaaaagtaaaaccgaacattttcctggaatcccagaccacggagctttttgtatccctctatccttataactacggagcattcttctgcacccagatgcgtctcccgacgcttttagccgcaaacccgaacgcaaacgcattccctgtcgccctgaagaaatcgctcatcaaccaccgcctcgtcctcgcctaccacaaagagcgcttcctgccggactacgcacatgattttatcgagatcacgaaggatgtgtttggtgagattgcgaaggtgcggccgaattaggaggaaccgttgtaagataggccgacaaccacaactcagctttacacaaggagaatcttatggataccaacagcctctattactttgccgaggcagcaaaagatatgaacttcacgcagaccgccaaacgactttttatctcccagcaaaatttaagcaaccatatcatgcgcctggaatcttattacgatacaaaactatttgaacgaaaacctcatctttccctcacttatgccggtgaagttttattgacctatgccactaattttaaaattaatgaagataatttgaaaaatgttctttccgatatcaaagagaaagaacgcggagttcttcgaatcggctgcagtcctatgcgtaccagtattgtaatgcctcagcttgctgtccgctttgcaaaaaaatatcccaacgtagagctccacttttatcattgccacagcaaccaactaactgacatgcttctgtccggagagcttgatatggctgtcacagtagataagataaagcatccgtatcttacctccacctatctttttacagatacgatctatctaatggtatcaaagcaattactgacacaatattatggcgacaaggcagattccctgattaaaaagtcactgaatggcgctgaattaagagattttgcttctcttccattcgtcaatgttcgcctgacaaaaatcattcaggattgcttcgatgttcagaattgcaaacccaattttatcatcactacagatattcctcgtttttctctgtccgatttttaccaggaaattgcagcctctatcattacaaagacgaattatctgatcatgaaacatcgggtcgatgagaatgtactattttttcctttaaatacatccgctgacatgtcactgcacgatatcgcttttgtccgccatcaaaaaaaatatctttcccgatacggtcagcattttcttgatacgactgtccgttttttccaggaattaaacaatgacagtacatcctcacatcctcacaattaaaaactccatcacatttctgttatacacaaaaagctgcagccccatcagggtaccgcagctttttattatcaggcagcttcttttgtctttttactctctttatactctctgtacagcggagcaacaatcgagattacagaaacgaccaataagatcaggcagattggagatgtaaagattccgccgatcgccggaaggacaccttttttgatctggattgcccgtgccagtccaccttccgcaatcggacctaaaataagtcccaacaccatcggcgttacatcaaattcaaatcgcacaaggaagaatccaatcacaccgaacagcagaatgatataaacatcaatgatcgcattattgatcgcaaacgcacctaccgcacataatacaacaataatcggagccagcatatagatcggcactctggcaatatacgcaaaatattttgcacatgtaacaccgatcaggaggaaaaataaattcgagaaaaagataccgcacataaccggatatgtgatcgccgcctgttttgtaaacagatcatttcccggaaggaggccatggatcatcataccgcccaacatgaccgcacatgccgtagatcctggaattccaagtgtcagcatcgggatcaatgagcctccggatactgcattatttgcacattcagatgcaccaacaccttctcgtaatcctgtaccaaacaattccggatgctttgacgcacgttttgcttcattataacctaaaaatgcagcaatacttccgcctgcaccaggtacaattcctacaatgataccaataatcgcagaacgaaggtatgtgatcggatataagcagagttcttttaattggaacttttctttctttactcctttgatcagttcatcatttacaattgcattcttcgaatcactcacaagtgttaaaacctgagaaatcgaaaacagaccaattaaagcaacgatcaatccaatacctgtctgaaggtatgcgattccaaatgtgtatctctgtgctccgacaatggagtccatgcctacacatcccattaaaagaccaatcgcaccgcttaaaagaccttttaacatattttttgatgcaatggacgcaatgatcgtcagaccaaaaattgcgatcataaagttctccagcggtccgaaacgaagagaaaattttgcaatcggaggtgccaatgtcagcaatgctacaacactgatcacaccgccccaaaaagaactgatcgccgcctcacgaagagcaatgtgcgccttgccctgctgagtcatcggatatccatcaaaaatcgttgcagcagcagccggagttcccggtgtatgcagcaaaatagcagagatcgatcctccgtataaggagccgcagaaaattgagatcataaacagaagcgctgcgatcggctgcatgctgtatgtgatcggaagaagcactgcgattcccattgtaccagataatccgggaagtgctccaaatacaattccgagcacagttccgataaatgccacaagcaggtttcccggcagcgcagcagtcataaatccttgtataatatattggatcatactcttacctcctaaatcaagaatccctgtgggagcggcacatataacatcttcttaaacactacatatatgatgactgtgaccgcaagagaaaccgccacaatcttgatcatatcctttttagatgccgttcccggaaagttgatgatcatggttgcgatcaaaaagataaatgtcgcaacacaaaatccaatatactgcattcctacgacatatatgatcatcgctgcaagcataatgccgaccatttttttcccttttaaagtcagtccttctttttctttggcttctttcgatgtcataaatccgttaatgatcaataagatacttaaaaatacacccagacctgatacaaaaaccggaaagtacattgccctgtccggaaatccaagtgccatttttaaggctattccaaaaactgccagaaggataactcctgcaatcttatttccttttgccatattatttccccctgtttcaatctgaggggaatgcagaaacattcccctcttttcggtcttcatgcatctttcttactgttttgcaattccaaggctcttgcataactccatgtaattgttgtattcctctgctgcgaaagctttgtaatctgcggaatctttgtaattaatgcagtttccaagtcccatcttttcacattcttcaataaatctcggatcttctgtaacctttttcatgagtgctgacatataatttacaatttccggatctgttccttttttatatccatatccgcggtttgttccggtaatctttaaattcatgccaagatcttcagatgtcggtacacccggaagttcacttgaaaaatccatatcgccaaaggtacatacgcatacgctctgaccttcatccatcatgcttttcgtttcaaggatcgtctcacagaatgcatccacatgaccgcctaaaaatgctgtttttgcatttgcacttccatcaaacggaactaattccatctcatatccgcaatcctgaaccatagaaagtgctgccatatggtttgcgttgttaataccggataaagcaactgtaatttcgcccggatgatcttttacatactgaaggaattcctctcccgttgagaaacgatcatcacccgttctaaagctgagtgcatacggtacactatcctgcagagcaataaactcgatatcatccagataggaataagttgcagttcccgtacaatcaccaagtgctgctccggaagccagtgtaacaacagtatatccatcagccggtttcttcaaaacatccgtaactgccacaactccggatgctccggttgtattcgtaacaacgatcggaacatctacatattcctgtaaatattttgtcattaatcttgttgcagtatcaacgcctcctcctgccgcaaaaccaacaacaaatgtgatcggatcttttgggaaaccttccggtgctttaatatcagttgtatctgctgtttttgcactgtcacccgaagctgctgcagtttctgcttttgtttctgctgccggtgctgctgttgtagcagtcgctgccggttggctgcatcccactaacgatgctcctaaaagtcctgcacataccattgataaaattctcttcttcatacacgtatctccttttttaataatgtttctggattcacatgaaccatcttccagatttcttcttttgaaattccttcctgatacaagcgatccaaataccaggaaaatgcaatcgtcggatacgggaattttacctgccccgtatcactgcttaaaataatgtgatctgcaccgaccatttttatttcatttagagatttttcaaatgtactttggccttcgataatgtgaccacaggaatgttcgatcattgctcctgattctgcacagcacatttgctgttccacacttagcgcacacgccggatgtgtcacatgcgtgatcaggattttatccattttcatttctgcagcccgttctaccaaaatcattgtttcggttgggctcagatgtcctgttgccaatatcaaatcatacattttaatcagtttcaggatttctatgacctcatttttgatctctccatccggtgtcaaaatggaaattcctccggaaaaacctttgaacgatcgaaaattttcggcatccattgttggcatccatacaatgtcaccattcatttttccaaaggcctccactgcatatggatttaatccaccaacctgatgattaaggactaaccccgacactgttttaaagtccggatacagttcattcatgattgacgctctgcccgccgtggagctcacatgactcttcagagtaattccattcatacctgccttttttgcctgcattacagcctgacaatccgacagttttcgcgggatcacatccgggccggtatgaatatgcagatcataagctcctctaaggaattcagattctttctgctgtccgcaatcgatcaattttcctctcccttctgtcacatatccagatatttctgattgacaatattttgtacttttcccgtctctgccagaagtttcacctgctcagcaatctttgggatcatctcatctgccagatcattggaagttcctcccatatgcggtgttaagatcacattgctcattcttgccagcggattttcttcgagattttcgttttcaacacaatcaagacctgcagcagcaacttttccagatgctaatgcctctacaagtgcctgatcatcaatcaatccgcctcttgccgtattgatcaggatcacgccttgcttcatattgtcaatctgttcttttccgattatatggcgtgtgctttcaagaagcggtacatgaagcgaaatcacatcggaaactttgatcagatcttctaacggaaggtatttcattccattttctgtttccttttcttcgttcattcgatatgcatcgtaataaacaacttctgcaccaaacttttgtacctgccctgcaaccattcgtccaatatggcctccgccgataattccgactgtcttatgattcaaagttgccatctgttttgagtaaagcttgttattccagattccgtcatgtgtaagacgattctgatcaataactctgcgtcctgccgaaagcatcagagcaacagctaattccgatacagcataagcatttacccccggcatatttgccgtgatcacacccttcctgcctgcttcttcgatatctactgaatcataccctgcaccccagcggataattgcttttaaattcttttttggtcgaattgcttctgccggtgtttttaatacgcggacaataatgcaatccccttcctccatttcttcatattctttttgatcattgaccggaatcactgtatgttcaggaagaagttcctcgaatttttctttggtaccttccggataaggtcctgccagaattaccttcatgccttttcccctttcatggattctgccacttttttcattaattcctcagatggactcttacgatcaatctttgatacctcgacgattaattcttttacatctacgccgtactcagcagccactgctttaaattttttcacgaaagaagaatgacatccggaatatccaaggatcagttccagtggagtgatcgctgtcttatatccgtgtttctccatcgctgggatcaggtctttttcgagataatttaaaagtccatagaaatcaacttcctgtgcttcaccttttttgtgagcaagggctgttgcaacctctgttgcaaggtttcctgcacttcttgccattccgagaagtccgcaatccagaagatctgcaccgctctccattgccgcctgggcgtttgccgctgacattccaaggttgttgtggcagtggaaaccaacagggatggaaactttatcctttaaagctttcacatactctttgacttcatccggaagcatacatcccgcggaatccatgatcgtcacttcatctacgcccatcttctggagctttaatgcctcttctgtaagttcatctggattcagaaggtatgctttcatcagggagtaacgacattttaatccgttctccttgactgttttgattacctctatgtacttttccgcatctccggcatctgcaccgacacgcaagaatgcaagtcctgcttttgctgcatgctcaacattttcttttttgtaacgtttcgcattcagaaacataccgatttccgctttatccagataaggttttgcaagttcaaaatattttgcatcgctaaccggaccttcaaagccaagattctcagctccaagtccttttgcatttccatattcgattacagaaactccattttctgtcagcccttttaacatcaaaacagttaaatcttccggaaatccatttccaagaacattcgcaccatcacgcagtgtacaatccataattttcattttgtctttcctccagtcccatttatagttgtgcatcatttatgatcttgtacttattgtacatgttacatcagtatccatcgctcatctttcacaataaattattgttttttttgcttttcttgttctcttttcacaattattgtatcagagttatttctgtctgtgaaacattgtatttttgttagtacacaaatttattttgttacttttttagaattatacatttttgtttgttattttattaactagttcattattttgcagattgcttaacaacatttccttttcatttttacaagaacagattgttttattttgtgaacaataccgactataataaaggcagtcaaaaacattgaaaaaaagatgttttatcataggaggtattatcaatgggttggaaaattttactcccgcaggaaattatgtccgagggccgcaagcttcttgaggatgctggccacacagtcatcgacggacgcggttttgagacagaagatgttctcgctgatttcaaggaatatcagccggatgcgatgatcgttcgtatcacaccgatcactcgcgaagtgatcgagtctaatccgaacttaaaagtaatcgttcgtcacggcgctggtttcgacgctcttgacgtaaaggcttgccatgacaacaatgttcaggctctctacgcaccggttgcaaacagcacatccgttgcagagactgcaatgttactcatcctcgagtgcagccgtaacgtaactgttcttcacaagacatgggttgacgatttctacaaagcaaaattaaaagttcgcaagaatacattaaacggcaagacgattggtatcatcggctgcggcaacatcggaagccgcgttgcaaaacgctgcctcgctttcgagatgaacgttctcgcatacgatccgtacaaaccggcatctgagttcccggacggcgttgaggttgttcgtgatcttgaccgtatcttcaaagagtgcgattacgtttctctccactgtccgaacactccggttaccaagaacctggtaaacaaagagcgtctcgcaatgatgaaaccgaccgcattcctgatcaacactgcacgcggcggctgcgtagacgaggatgctctctacgaggcatgcaagaacggcgtgatcgcaggcgctggtcttgacgcaatcaagaaagaaccggttgatccggcgaacccgctcctcacacttgacaacgtgatcatctacccgcatatcggcggcaacacagtagaggctgctcaccgcgcttcctacttcgccgctatgggagttcaggaagtttacgaaggcaagaaaccgacatggccgatcaacgatgtagactacgcaacagcaaagacctacacagacacaaagaaaccggatacaaaaccggctggaatgttcgatttctaatttcttacgacattttcttttctcataaatctataaaagcaggcaggacttatcggatgataggttctgtctgtttttgttataccgttccagatatagttaaaagattttcgggattatttacaaattttgtttacgaaatttgtcatctttccagttgacatacatgcaggaattgaatatacttctacatacagattgcgtatctgtattcaaggttgttcgctaccggtcatgcgaatcataaatagaccgtgtaaacgttgttcgctgccggccatgcgaatcacaaataggccgtgtaaaagtatttaagccttctgagaatcttcagaaggctttccttatattacataaaagtcctgtcaggtatcacgaaataccaggcaggaccttttcttttttctcttacaggaacaatctctccggattgcgcctgatcaatttgtcgatctcttcctccgaaaatccacgttccagaagaccttccgcaaacatgcggagtccatctgcggatcccggggaatttaattgtccgaaatcagtgacaagatacgtattgtctgttccgactgcacggatctgctcgatcacaagctcccagctcacgcggttatggtacaccgtaaagaagctgtgctccaccatcgccccggctttcacgcagagtttctgatcttcgacggaaaagcttgttgccggattctccgcatgggtcagcaccaggcgtttcacgccgcgcttcgccgcctccagcacgacaggaaccccttcctgtccaccgatatgtccggtcccaacgaccagatcatactttgcagcgatatcgagaacatcataaaccgccgggagaagctttccatcctctcccagaacagacagatacggactcaggtccgcggacggatcattccggaaatggaacttccggtaagccagcgagtccatcgtcgggaaccagacgtattttccgcctgcctgacggttcaaaacaagaccgccgtaaattttaaggtccgggtataacgcagaaagaatggcagcacggccggtcgtgtcagcgaagtggcattttaccactccgcctttcattccggctgtcttccattcttctgctatttcaagatctgttgactttctcgggcttacatccggagaagtatgaatgtgcatatcatatgcacctttcaggatatcttccatagcacaaaactccttctttctgccggacacggatcacgcatccggcagtatatagtttccggttcctaacgatacggaaggaataccgggatcagagcgacaacaacgatatacgtaagaatgaccatcgggataccgatctttacaaagtcgaggaatttgtattttgtccagccgaccgtcatcatgttctgcggtgctgcaaacggagttgcgtaggatgccgcacctgcaagagtgatgatcatcgcgatcggatacgggcttactccgatcttctctgcgatggagagaccgattggcatgaagatcaggatcgtcgggatgttggacattacctgtgtcaggatcgatgcagcgataaagatcacggtgctgatcatgaacgggctcgggttatcgccgaggatgttgataatgatatttgcaaccgcatcaccggcgccgcagttctttacgcctgcggagatcgcgctgagcgcgccgaccaggatcaggcagttccagtcgatcgccttgatcgcatctttgactgtcatgcagccgcttccgacaatgatcagagcgcctacgactgcagcgatgtgcatcgggaaggtcttggatccggatgcgatcaccacgagaacggcgatcatcgtgatcacgcagatcgctgcgtttttcttattgaactctttcttttccgcctgcgcgaactccggcacatatccggtatccgggatcatcttcattccgataaatgtgtaatataacacaccgagaatgcagattccgataccaaacggtgtgatcgcaaaaaatccaaacggctcatagccgagttcctgcataacgcctgctgcggatgcgttggaaccgacaccgacaagtgtcacaaagccgccaaactgtgcaccgaacagaagtccgagaagtgctttggacggtccgatccccgcggaaatgcacattgcagtcacgagcggagccatggcaaccatgacaccgatgttgctgcaaactgcacttaacaggcaggaaacgatcaatgttacaaggataatgtttctttcactttttccggtgatcttcaccatcttttcaccgatgatatctgtcacaccagtgtggaacaaggatgcgccgacaaccatcatggctgccagaagaacgatcgttgtactgttgtaaccgctgaagatcgtattgacttcaataattccggtatacgcgtacagaattgatgcgccgatcgcagttaccacgatcgggatcggctcccagataaagagtgcgatcgtagctgcaaggatcagcaatgcgataaccatagagttcatggatgtacccccttatattgttttgatgagtcataagtttagaaatcctcttttgagcaagactgcaatggctttccgaccttttgactctggtatcatgacatatagtttttttgttcaatctgtacagaaccggttttaaaaactactgtttttatgtacaaaatcattctatcatggcataccataaaaataaaacaatataatattctgtttttgacaaagatttgttgtcagcgtatccgggaatataccaaaaaaggaccagcgagctttctgatctgatgggaaagttcactggtctttttgtggttggtctgtatgccatgggtgaggcgagtttcgtttctagcttaaaatgattaagaatcaagcaaacaatggattgtgtcaatgccctgaaaagggcgaccttcatttctacaaggcagggtaccgtcttatttttcagttctaaaaggtgtcaatgccctgaaaggggcgaccttcatttctactaaaaattgtgattactatagtgcttgggaatattgtgtcaatgccctgaaaggggcaaccttcatttctacgaaacacagccacttgtgaacaaattaagtgctatgtgtgtcaatgccctgaaaggggcaaccttcatttctacagaggatacaaatgaagaaatttgttttagttacagtgtatcaatgccctgaaaggggcaaccttcatttctacacttgcctctgggaacccgcataaataaaggctttgcggacccgtttttgcaagtattttccagaatattctgaaaaaggcttttttgaaggtgatttttggcatgttcacagtttgttcatatttgtcgcagaagcaaaggtaatttctcgctttcagctgcccccattataacagacttcttcaggttccacaagcagattatttcccattattgtgaccattatttgcgatcccaccatcccccagcggtgagcttccggacaggagtgcatgatccggggatctggcttcctcttagctcgcgggtgactgcgttagaaaatcgatgacacttgtctgagcgcagcgagttgtgtcgtcgattttctgcccttagcagtctcccgggaggttagaggaaccatccccgcatccccggcactcctgtccggaaactcaccgcgtaccctcgccaacacacctcaaaaatccttttccagattttcacggcactcctgttcggaagctcaccgcgtaccctcgccaacacacctcaaaaatccttttccagattttcacggcactcctgtccggaagctcaccgcgtactctcgccaacacaccaaacaagcacatacacaaaaaacgcacgccctgcataccgatcctccctgcatgcaaaacgtgcgttttctaatccaatctctattactcgttcttcagatcctctttcagcttactaaagaaccctttcttcttcccttcctccggcgcaattcccttcatcgcgtcgtcaaaccgcttcagagcctccttctgctcctcattcagcttctccggaactgtaacaacaagcgttacataatgatcaccgcggatattcttatttctcagggacggaacacccttaccgcggagacgtaccttcgtgtcagtctgagttcccggttttacctcgtactcaacctcaccgtcaacggtcttgatcttgatcggaccgccgagagctgccgttgcgaaagaaatcggtacagtcgagaagatggaagtctcctgacgcatgaataccgggcttctggatacagtaacctcaacgagaaggtctcctctctcgccgccgttcgtacccggctcacccttcccggcgatacggatactctgtccgttatcgataccggccgggatcttaacctggatcttcttcttgctggagatatatccggtaccgtagcaatccggacatttctccttgacaaccttaccggtaccgcggcagtccggacatgtctggacattctgtacctggccaaagaacgactgctgtgtatagacgatcttacccttaccgttacatttcggacaggtgatcggggatgtaccaggctttgcgccggttccgtgacacttcggacactcatccttcagggtaagctcgatctccttctcacatccgaagatcgcctcctcaaacgtgatacggacacccgttctcaaatttgctccgcgcatcggaccattgctgcctcttccgtatgcggaacgtccgccaaagaaatctccgaagatatctccgaaaatgtctcccatatcggctccgttaaagtcgaatccgccgtatccggctccgcctgcacctccgtcgaaagccgcatgaccgaactggtcgtacttctttctcttttccggatcacttaagacactgtatgcctcggaagcttccttgaactttgcctccgcctctttgtctcccgggtttgcgtccggatgatatttctttgcaagaactcgatatgctttctttaacgccgcttcgtccgcatctttcggcacgccgaggacttcgtaataatctctcttggtctctgccattgctttctttacctttcttgttaatgaacggtaccacgtaccttttgcggaattctgccgccggaagatctgccttcacacgccgtaaccagataacgccagaacccattccagacatcacggttttatcttctgccgtgataaattttctccggatcattcatcgtccggaaacaaggcagccgaaagaacgcccttttgcgggcgtccttccggatctgctttgcctgacagactattttcagtctgtcaatttatttttcgtcttagacctctttgtagtctccgtcaacgacatcatcgccgtagcctgcctggcttgcgctctgacctgcctgcggaccagcctgaccctgagcacctgctgcgccctgagctgcctgagcctgctcataaaccttggagaataacttctgggcactgttcatgagtttctctttcgctgccttgatctcatcgacctgagcatctgtcatctgatctgccggagcttttgcgattgcttccttgagggcatttaagtcagcctcaacagcagtcttgtcgtttgcatcgatcttgtcgccgacttcctcgagagctttctctgtctggaataccatggagtcagcttcgtttcttgcgtcgattgcttcttttctcttcttatcctcagcctcgtaagctgcagcttccttaacagccttatcgatatcatccttggacatgttggatccggatgtgatggtgatgtgctgctctttgcctgtgccaaggtccttagcggatacgtttacgataccgtttgcatcgatatcgaaggtaacttcgatctgcggaacacctcttcttgccggaaggataccgtcaagacggaactgtccaagagtcttgttgtctcttgcaaactcacgctcaccctgtacaacgtggatatctacggctgtctggttatcagcagctgtggagaatacctggctcttctttgtcgggatcgttgtatttctctcgatcagcttagtagcaacgccgcccattgtctcgatggaaagggaaagcggggttacatcgagaagaaggatgtcacctgcaccggcatcgcctgctaacttaccaccctggatcgcagcaccgatggctacgcactcatccgggtttaagctcttgctcggctctttgcctgttaactgtttaaccttttcctgtgcggaaagcatacgtgtggaaccacctacgaggagaaccttggagagctctgctgctgttaaaccagcgtctcttaacgcattctgtaccggaattgctgttctctcgataagatcacttgtcagctcatcgaatttagctcttgtgaggttcatatccagatgcttcggtccctcagcggttgctgtgatgaacggaaggttgatatttgttgttgttgcggaagagagttccttctttgctttctcagcagcttcttttaatctctgaagtgccatcttgtcaccggaaagatctacgccctctgtcttcttgaactcatcgatcatccactgtgtgacacggttatcgaaatcatcaccgccgaggtgtgtatcaccgttcgtcgcaagaacttcaataacgccgtcaccgatctcgatgatggaaacatcgaatgtaccgccgccgaggtcatataccatgatcttctgctctttctcgttgtcaaggccataagcaagggctgccgctgtcggctcgttgatgatacgctttacatcaagaccggcgatcttacctgcatcctttgttgcctgacgctgggcatcgttgaagtaagccggaactgtgataacagcttctgttactttttcaccgaggtagctttcagcatctgcttttaacttctgaaggatcatcgcggagatctcctgcggtgtgtacttcttgccgtcgatgtctaccttgtagtcagtacccatatgtctcttaatggaggagatagttctgtcagcgtttgtaactgcctgacgctttgccggctcaccgacaagtctttctcctgtctttgtaaatgcaacaatagacggtgttgttctgacaccttctgtattagcgataactgttggtttaccgccttccataactgctacgcagctgtttgttgtacctaagtcaataccaatgatcttgctcatgatttttcctcctgttatatttggaattaagtgaatttcaatgttaattttgataccagatcgatctgcacttacgtgctctcacgatccttagttcgcaacctgtaccatgctgtgacggacgatcgactctttgtaggtgtaacccttctgaagctcagctgccacaacattttctccgagattctcatcctccacatgcatcactgcgttgtggaaattcggatcaaacggctttccgacggcctcgatcggctttacgccgagatcatcgagcgtctttacaaactgcttatatatcttttccattccctctgcaaatgcggttcctttcgcatcctccgggattgtgttaagacctctttcaaagttgtcgacgatcggaaggatcttttcgatcacgtccttcgcgccgatctcatacatcgcggacttttccttgtccgttctcttgcggtaattatcaaattccgccatcgatcttctgagtttgtcatttaactcatcgatcttctcgtccttcggatcctttttcttttccggagctttttccttctttccggcatcctcggacttctcagtttctttatcagtctcagaggctttcgcttctttctcttcggaagcttccgtctcctgtttctctttttctaactctttctcttccactgctctcttcacctttcatttttaaatgtttcgttcagctgcgcgacaagcgatcgcaaggttgttacgactttctcgtaatccatccgctttggtcctacaataccgatcgttcctcgcattccatcgccgagcgcataatttgcggttacgatgctgcagtctttcatgctctggaccggagtttcatctccgatgtagacctggatctcattgtccgggtcatcggtcttattctgctgctgttcatcgatcagcccacggagaagttccttatgttctaacgtgctgatcagctgactcgctttctctgtatcggaaagttccggatatttgaaaatattggttgccccgctcgtatagatctgaagatcctcatcctgggaacgaatcacttcgctgacctcattcaggaccagatccaccactcttctgtggcttccggcctgctccttcatcttcgcgatcacaccaagattgatctcctcgatcgtcagaccgttcagattgctgttcaggagaatattcagattcaggatctcctcatcactgagttcctcatcaaccgtaacaaaagagttccggataatatttccttccacaacaattaccacgagaagcttatgttcctcaactctggagagttggataaatttaagcttcgtctggctgtaactcggtccgctgatcagagtcgcataatttgtattctttgcgagaacctttgcaagctgcttcaaaagcagttccacgcggtcaacccgctggatcatcagttcctgcatgtgctcgacctgactgtccttctctttaatgatctggtcaacataaaaccggtaacccttatcggaaggaatccttccggctgaagtatgcggctgaagaatgtaaccaagctcttccagatcagacatctcatttcggatcgtagcggagctgagcttcagatccgagtatttggaaatcgttctggatccgaccggctcaccggtctccaggtacgtctggataatcgctttcaaaattttctcttttctctcatccagttccaaacctctcacctcttctctctgatttgctagcactctcttttgaggagtgctaacatctacagttgctactatattacttcgcaagttttttgtcaagggcttttgataattttcacatttttttcacaaatataggaataattcctgtttttatccagaaacctcccggaaacccacaatttcccgtgcactttaccgacagtaatcttctccaaccaaactatttccttataaaatatcgatccttcaccctcactcccgcaactccacagcggtgaagctccgggcaaaaatgctttgatccagatatacacttcctcttaatccgcagctgactgtgttgaatacaaaatagcacacgtccgagcgtaggcagcgagttacacctcttcccttcctcccgccattcccacagcggtgaggctccgggatggcgtgctttgatccggggatctggcttcctcttagctcacgggtggctgcgttagaaaatcgg

SEQ ID NO: 2025 - DNA, 1896 bp, Unknown
  gut microbiota DNA sequence
gccgttcccgatcgaggagaacagcaagacgaaagaagaccttcgattaaaataccgttatcttgacctccgtcgtccggatctccagagaaacatcatgacaagaagccgtgtggctacgatggtccgccagttcttagcggacgaaggtttcctcgagatcgagaccccgactcttatcaagagtacaccggaaggcgcaagagactaccttgtaccgagccgtgtgcatccgggcgagttctatgctcttccgcagtctccgcagttattaaaacagctgctgatgtgttccggtatggaccgttacttccagctcgcaagatgctaccgtgacgaggacctccgtgcagaccgtcagccggagttcacacagatcgatatggagttatccttcgttgacgtggaagacgttctcgaagtcaatgagagactcttaaagaaactcttcaaggagatctgcaacgtggatgtccagactccgatccttcgtatgacatggcgcgaggcgatggaccgtttcggttccgataagccggatatgcgttttggcatggaattaaaaaatgtatctgacgtcgtaaaagactgtgagttcgttgtattcaaaagtgctcttgagaacggcggttctgtccgcggtatcaacgcaaacggacaggctggaatgccgagaaagaagatagatgctctcgttgagtacgcaaagggcttcggtgcaaagggacttgcataccttgcgatccatgaggacggttcctacaagtgctcattcggcaagttcatgaagccggaagagttagacgctcttgtaaaggctatggatggacagccgggcgaccttctgttcttcgcagcagacaagaataaagttgtattcgatgttcttggaaatctccgtctcgaaatcgcaagacagttagacctcttaaagaaagacgacttcaagttcctgtgggtaaccgagttcccgctcttagagtactctgaggaagagggacgttatgttgcaatgcaccacccattcacaatgccgatggaggaagaccttccacttatcgacaccgatccgggtgcagtccgcgcgaaagcatacgatatcgtattaaacggtaccgagctcggcggcggatccgtccgtatccaccaggatgacatccaggagaagatgttcgaagttctcggcttcacaaaagagagagcaagagagcagttcggtttccttcttgacgcgttcaagtacggagtaccgccgcacgctggtctcgcatacggtctcgaccgtgtcgttatgctcatggtaggcgcagacagcatccgtgacgtcatcgccttcccgaaggtaaaagacgcatcctgcctcatgatggaagctccggctccggtagatccgaagcagcttgaggatctcgatatcgcgatcgtggagaagaaggaagaagaataaaacgagaaatttcatccagagaaatgcccgtgaacaacggaaatatccctttgtgaaatgttcgtgaacttatagaaatcccacttattatctgctaaaatatagctgatgataagtgggatttttctattctataggaaatttgtgagacaatagatacggaggtaatactcatggatgcaataaaagtacttatggtcgacgatgaagagagaatgcgcaagctcgtaaaggacttcctgacgatcaaaggataccgtgttctggaagcaggggacggcgaggaggcgatcgatatcttctttaaagaaaaggatatcagccttgtgatcctggatgtcatgatgccgaagatggacggctgggaggtctgcaaaacgatccgccgctactcgcaggttccgatcatcatgctgacagcgagaagcgaagagagagatgaacttctc

SEQ ID NO: 2026 - DNA, 2081 bp, Unknown
  gut microbiota DNA sequence
cggagaatcacctgtataagaaaatggaagagaggtaactatagatggaattacaaacaaaacgcctgattttaagaccatggcaggagagcgatgcagagagctgctacgaatatgcgaaagacccgcaggtcggtccggaagcaggatggccggtacacacgagtgtggagaacagcagagagacaattaaaaacgtattgtcggccgatggaacgtatgcggtcgtattaaaagcttccggaaaaccggtcggctgcgcgggattaactgtgggagctgccagcaatttaaagcttccggaagatgaaggtgagattggctgctggctcggcgttccgtactggggacagggaatcatcccggaggcagtacaggagctgatccattatggatttgaggatctgggattaaaacggatctggtatgcgttctttgatgggaacgaaaaatcaaagcgcgtggcggagaaatgcggattccgctatcatcacacgaatgaaaacctggaatggaaattactgaacaggacagttacagagcatgtgtatgttcttgacaggcatagaaagttatctggtgcgcagtaattctgagagaaatttgtcagcttgcgctgaccggaattaagcgccaagtcttacgtgtgctcgacttaaaagaaagaaggaaccccgagaatgaaaaaacttatgatcgcgtccgatatccacggctccgcatactattgccggaaaatgctggaggcatttgaccgggaacaggcagaccgcctgttgcttttgggcgatattttgtaccatggaccgagaaatgatctcccgaaagagtatgcgccgaaggaagtcatcaaaatgttaaatgagcggaaaacgaaaatcttctgtgtccgcggaaactgcgatacggaggttgaccagatggtgctggagtttccgatccttgcggattacgcggtatttccggcggcagaccgcctgatctacgctactcatggccatcactttcatatgaaccagctcccgcctctccagccgggagacattctcctccacggccatacgcatatcccggcgtgggaaccgttcggggatggaaatctgtacctgaatccgggttccgtgtcgatcccgaaagcggaaagtgaacatagctatatgctccttcaggatgggaaagtgatctggaaaacactggaaggaaccacctatcatagtgaatgtttataaaaacgtctcaatggtccttgcataataaacccgaagatgctaaaatatctcccataacaattgaagaggcatccggtgctgctgccgccctgaagagggcggacagcaggtaaaagggaaacaggtgaaagacctgtgcgatctcgtcactgtgagcagggaatacaaagccatgcgcgaacgcgcggtcactgaaaaaacggagcagcctgacaggactgttttgaaatatttgggaaggcggctttgtgtgatgatctgtgagtcaggaaacctgccggaatgctggtacaggaagaaaaattccagatcacgaggcattgatcgtaccgtttatatgtcggctgattccagcggacatctttttctgatgcttaagcattcggtattcgaaaaaattctcagatggaacatctccatactaactccgaaattgtaaaaacaatgaaactgttcagaactttcatgattacgggcaaaaaatgtatttcagatggctgaaccaataggacttttgctttaaaaccagtggggttattacagtcggcgcagcaagtgcgcaggcctggtgaacagttgcaaaaaaacattataatctttacacaacatggaggacaacatgaagaagaaacatgtaagtctgctcttagcggcagcaatggcggcatccgtaatttccggatgcggaagcagcgcgaataacagcacggctgagacgacaaaagcagagggagctgcagcggagacaacggctgcaggagagacagaagccacagcagaggcagtggaagacacagagaaaaacgagacagatgaggttgtcatcgcgactccgcgtgatgctgtgcaggg

SEQ ID NO: 2027 - DNA, 2994 bp, Unknown
  gut microbiota DNA sequence
caaaaaaatatatgaggaatttggggtatggaaggaaatttaacaaagggacctattatgaagaccctggtgaagcttgctgtcccaatcatggcatcggcatttctggggacgctttacaacattacggatatggcatggatcggtcttctgggatcaaaggcagtagcgggagtcggcgtcgggggaatgtttacctggctttcgcaggggctggcgtccatggcgagaatgggcggacaggttcaggtggcacaatgtatcgggcgcggggaccgggaaaaagcccacggatttgcccaggctgcagtgcagctttcagcggcaatgggaattgcgtatgcggtcctctgtctcatatttgtcaatcagatggtgggattttttaaacttgaggatgcggaagcccaggcgtcagctctggcctacacaaagatcgcctgtggactgatcgtattttcatttttgacattgacactcacgggactctatacggctcagggagattcaaaaacgccgtttatggcaaatctgatcggactcgtgacaaacatgatcctggatccggtcctgatcctcggaccggggccatttccgagactgggtgtagccggggcggcgatcgctacggtgacggcccaggcgatcgtgatgagtatcatgatccttgggatcattgcgcggaagaaggagaatgtgttaaaaggaacccggctctttgcgaagatccctgctgagtttttaagggggatctgcaggatcggaattccaaccgcgattcagggcatggcgtactgcggaatttccatgatcctgacgcgaatggtgtccggatacggtgcggaggcagtggcaacgcagagagttggcggtcagatcgaatcgatctcctggaatacggctgatggcttcgcggcggcgttaaacgcgtttgtggcccagaactatggggcaggggagagagaacgcgtccggaaaggatatcaggtatccctgtggacggtcggaatctggggagtgctggtctctgccgtatttatctgtttcccaaatgcgatcgcggatatcttctttcatgagccgaaggcggttgcgacagctgtgggctatctcgtgatcatcggattcagcgaggcatttatgtgcgtggagctgacgacgatcggagcactgtcgggactcggaagaacgagactctgcagcgtgatcagtattgtgctcacgagtgccagaataccgcttgccattgttcttagcggtatcatggggcttgacggaatctggtgggcacttacgtccacgtcgatcgtaaagggaattatatttacatgtacgtttttctggatcatgagagaaaaaagcgtgtgagcaggcagtgcggcaggatgatctgagacatgatatagaaaggtttcctttgcagtgcctgaccgaatgaggagacggaagtcctggaaagttctggtatgaggaaaacagtatggaacggttgatatttcatgtggatgtgaacagcgccttcctctcctgggaggcggcgaagcgcgtaaaggaggggctgccggatcttcgggagatcccgtcctgtatcggtggggatccgaagttaaggcgcagcatcgttgtggcaaaatcgatcccggcgaaaaaatatggggtgacgacaggggaacctgtggccctggcactgcggaaatgtccggatctcgtgtgtgtgccgggtgattttgcgctgtaccagaggtgttcccgggcgtttaaggaaatctgcgcatcctatgcgcctgcgatggaatcgttttcgatcgacgaggtgtttctcgatatgaccggtacccatctgatctatccggatccggtggcggtggcccacgagatcaaggataagatccgggatgagctgggctttacggtgaatgtcgggatcggaacgaataagctgttggcgaagatggcatcggattttgaaaaaccggataaggtacatacattgtttccggctgagatcccggaaaagctgtggccacttccggtgcgggatcttctgttccttggaaaggcatcggagcagagactcttacaggaaggaattaagaccatcggcgatatggcgcggagcggagaggcggagatcaagcggatcctgggagaaaagaccgggcatcagctttatcggtatgccaacggcatcgacgattccccggttcgtgcggagcgggaggaagcgaagggctacagcgcggagacgaccgtggaagaggatcttgtgacgtatgagcaggcactggcgcttctgcttgcccagtgtgatgtggtggctgcaaggatgcgcagggatgggaaaaagtgcagctgtgtggcggtgacctatcggacactggattttaagacaaggtcacatcagagagcgttcgaggatcccacggatgtgacggaggagatctttgtgcaggtgaaaaaactgttatatgaatgttggaagtgtgagcctctgcggctgatcggaatggcgttgacggatcttacaacggatgacttcagacagatctccctgtttgagaatcccgaggagcgggaaaaacagaagaaagcagatgaggcgttcgatgatatccgcaggcgttttgggaatggaatgatcgtccggggcagtacgatgagtacggccgggaaggttgcgagaaaggcgaaagcgcagatggatcaggatgtgcggacaaagaaggaaaaagaaaaataggaaattctttacttgcaaattttcaaagatgcgctataataagtcttacaaaaaacaggggagctcgttggcgggctgagaggaagtgatcgaacttcgaccctttaacctgatgcggataatgccgccgtaggaagtcatgatatgaatttttacaggggacatgccgcgatgggtgtctcctgtttttatgtcatctgatttaaagagttcgggatcattgtgtttccgaaacaggtggcagaaaaaaagta

SEQ ID NO: 2028 - DNA, 25572 bp, Unknown
  gut microbiota DNA sequence
atcgctcgtgaatgctttgcccaacggggcaatcgaacgagaagcccccacttcaagcgtgagctaagtggtaggagtatgtcacgaattcgtaagggaaaatgaatggattccggggaagatcagcggtaggatatagaaaacggaacggtccggaaaacgcggatcccgatctgcgtcggcgttccggcggataacgacgaataaaacaggatttggagaagaaaagcatgagaaagtatggattatatcttttgatcgcggttggtcttcttgcgggctgccagaaaaaatatacggcgatggatacgacgactgcacagacttctgcggaagagacaaaaacgacagaaagtgcaaaagtgacggtagaggaagaatcaaaagcagctggggagacagatacaaaggagacggaaagcacaggaaagctggatccgatcccgatcgcggtgacaggcgagtacgatggagagtgggacgacagtcagactccgatcatcacgtcccggtgtgacagggtctttgtccagggagacggatatgaggcgttaaagagcgcactctcggcaaaaaatgatgagatggcggctgcgcacaaaaaggaatacgaggaatataaaacggaagcgatggatatgcggaaagagtttacagacgcaaagttcacgtatgcctgcaattatgaatttcagccgatccgctttgatggggcggttgccagcatgtcctggctgaagtattatgatatgggcggtgcgcatccgacctcctacaacgattattacaattttgatacacagaccggaaaacagctggagctttctgatgtagtgaaagatatggacggattccggagctatgtaaaggaagaacttgcgggacgcgcggcggacggagagctgttcgatgactatgaagatacggtggacacgctgtttgatggaacgaacgcagattccagcctggagtgggccatcacggaaaatggggtgagcgtttacttcgctccatacgagatcggaccgtatgcggcgggcgagatcgagatcgctgtcccgtttaaggaccatgagtcgatgtttgaggaagcctacatgggtgcttccacggatggatgggcaaaaaaagtggatccgtgggataccgtgacttatcgttcaggggatgtgggcgcaagcgtctgctatacatatgaagagccggagacggaagatgactttacaagaaaactcacgatcgagcgggaacagaacgggaaaaaggatacgtttaccgaagatgtttacggaaagatcggggacacctggcttgtcatgacggatgacggacgttcctatctctacatggagctttccagtgaaaatgactggaagaccatggaggtgtatgatctgaacggtgagaaggtggcgaaagccggcagttccacagacagcgtaaacggcgcgccgatccagactccggatgctttttatctcacaagacggatcgatgcgctcggaacatacagtgcgtaccggaaattccatgtgggagcggacggtatgccggaggcggacggaaatgtgtatacaaagatccgcacttccgattcccatgaagacgaaatgccgctcgtatcgacgagagcgctgccggtaacacttttcggagctgacggaagcgagacggagacaactatgccagtcgggactaaattctatgtgagagcgacggatgaagagacgtttgtggacatggaactggaagacggaagaaaatgccggatcgcggtcagacagtccggcgatggctggggattcctgatcgatggtgtctccgaggaggagtgcttcgagtttgttccgtatgcgggatgatgatttgcttgacaaaccatatcctcatgctaaaatggacttatacagagctgacgcccgcatgcgcggagacggcagcagaacatgattatgagagataacaggagggggaaccaatgaaatttttcattgacacagccaatgtggaggaaatccgcaaagcaaacgatatgggagtgatctgcggagttacgacaaatccgtccctgatcgcaaaagagggaaaagattatgttgagaccctgaaagagatcgcgtcgatcgtagacggaccgatcagcggcgaggtaaaggcaacgacaacggacgcggaaggaatgatcgcggagggacgtgagatcgcgaagatccatccgaatatggtcgtaaagatcccgatgaccgttgagggattaaaagcaacaaaggtccttgcatcggaaggcatcaaagtaaatgttaccctgatcttttctgcaaaccaggcacttctcgcagcaagagcaggtgcagcttatgtatctccgttcgtaggccgtcttgatgatatctcccagccgggtatcgacctcatcgaaactgttgccgagatcttcgcacttcatgatatcgagacagagatcatcgcagcaagtgtccgccacacgatgcatgtgacagagtgtgcactcgcaggtgctgatatcgcaacggttccgtacaaagtgatcgagcagatgacacatcatccgctgacagatcagggaatcgagaaattccgcaaagactatgaagcagtttttggtaaataagaaacattcatgaggacgccttcgggcgtcctttttttgcgcgcttttttgtgataaagaggtagagggaagaacagtaaagacacagaaaagcagattttgaacgcagataagcattcccccgcttcaagtgcgcggagcactaagcggtaggtgagtgggatgcttatgtcagtgggagttgaaagctcccactgacagatcgcgaagcgactgcgttcatgagcaagtagcgaagcggattgcgaatgtccgctttactgataagagagagcaggacattgggagatgtgtactgtgttaaccggtaaaagctttaccggatcataaaacagatcagaatagttcataaaaacaaaaaagaacaaagaatacatataatatagacaatttaaaaagaaaggtgataaagaaaaacatggaaacaccagaaacaaagaaaaataaggcggcggccgccgtcattcagaccgcgatcatcctgttctgcctcacggtctatgccgcaggagtcgttctcttcatccttccgtcggacatgatcgcggcgggggccacgggcctgggactttttgcggaacactacttcgggatcccgctctccggctttgtggcgatctttaatatcgccatgttcggactcggatggctggaactcggaaagaaatttgcggcgacaacactgatcgcgactttttattatccatttatcctgaacaggttaagcgcgctggcgggaaacttcgttttcacaaatgatcccatgctctgcgcgatctttgcaggagtgatgatcggattttcgctggggatcgtgatccgctccggagcgtccaccggcggtatggacattccgccgctcgtgctccagaagcggcttaagatcccggtttccgtgtccatgtacgtgttcgacgtggcgatcttactgtctcagcttcttttccgtgaccgggaaaagatcctttacgggatcatcatggtcatgatctacacggtgatcctcgacaagatgctcatgatgggcaaaaagcaggtgcaggcgaagatcatcagtgaaaaatatgaggcgatcaaccttgcagtacagcagcagcttgaccgcgggacgaccctgttcaaggtcgagggcggtcatctgagaaagccgtccatggctgttgtcaccgttgtttccggacgggagctccagaaattaaaccgcatcgtgatggacatcgatccggaagcattcatggtggttcaccaggtcggagaagtccgcgggcggggctttactgagatgaaacgtcatctggaagcagaaggtttaaaaaattaactgcatcacgagacaggcattagaaaaaaagtttcttaaatttttctgacgaaaagggataaaaatgttgctaaggcggggaaaaactccttgaattttgcatcaaatccgtttattattacactaggcagaaatttgattttcgtcaatttaaggaataatggaggaaagcaaaatgacaaaaacgtcggcaatcaacagaattcatgatttgcttgatgacaacagctttgttgaagttggtgcttatattactgccagaagcactgattacaacatgcagtctcaggaaacccctgcagatggtgttgttaccggttatggcacgatcaatagcgctctcgtttatgtgtacagccaggacgcgtctgttatgggcggatccatcggtgaaatgcacgcaaaaaagatcgagcagctctatcatatggccatgaaaatgggtgctcccattatcgggcttgttgactgtgcaggtttaagactccaggagagcatggatgctctggacggtttcggcaaactttatgtctgccaggcaatggcatccggtgtgatcccgcagatccaggctgtgtttggaaactgcggcggcggaatggctgtagcatctgaaatggctgatttcacatttatggaacaggacgcaagattatttgtgaatgctccgttcgtgatcgctgagaatgatgcggacaattccggtgccgagtaccaggcaaaagagacaggaaacgtatgcggaactggttccgagaaagaaatctttactgagatcagaaatcttgtttccattctcccggccaacaacgaggacgacatgtcctacagcgaatgcgaggatgacttaaacagactctgcacagacattgaaaattgtgcaggcgatacttctatcgccctgtccatgatctccgacgacaatttctatatggaattgaagaaagactatgctccggagatggtaacggcatttatccgtttaaacggagctaccgttggctgtgttgcaaaccgcagtgaagtttatacagacggtgagaagactgcttcctatgacgcggctcttaccgcggcaggatgtgagaaagcggcagcatttgttaatttctgcaatgctttcgagatcccggtacttacactcgtcaatgtagacggttataagaactgcaaatgcaacgagaagaagatcgcaaaagcggcagcacgcctgacgtacgcgtttgccaacgcggatgttccgaaggtaactgtcgttgtaggcaaggcaaacggaacagcaggacttaccatgaacagcaaatccatcggttctgacattgtatacgcatggaagaacgcgaagatcggtgtcatggaagcagtaccggctgtgaagatcatgtatgccgatgagatcgcgaaggctgataacgcggccgtagtgatcaacgaaaaagcagcacagtataatgagatgcaggcaagcgctcttgcggcggcaaagagaggatatgtagatgatatcatcgaagcttccgagacaagacagcgtgtagctgctgcatttgagatgctgttcacaaaaagagaggatcgtccgtccaaaaagcacggaacgatctaatatgaggtggctgaaatatgaaacagagaattagaaaaatctggcttgcactctgcatggcagtttgcctcttcgcgcttgcaggatgctctgcagccgttgacaccgctgaaacaatcgatccgcagatcgagatggcgatgcagtccggctcccagcagtacctggatctgttcaaccagatggatgacgcttccatcgagcaggcccttgcgacaagcgtaaagaacaaagatactgttatggagaatgcgttaaaatcctgggattccgtaaaggatgacctcggcgcgttcgtttccagcgagacagctgttgtaacaaaaagtgatgacggctatgtcgcaagaatgaataccgtttacgagaagagaaacatggagttcactctgatcgcagacgaggacctcaacaaggttgagacaatttccttctctccggtttacacaacaggcgagaagatggcgaaagccggaatgaataccttaatgggtatgggcgttgtattcgtagtcctgatcttcatcagctggctgattagcatgttcaaatacatcaacgtatttgaggcaaagatgaaggcaaagaaggctgcagcagcaccggcaccggcggcagcaccgcaggcagcaccggcagcaccggctccggcaccggcagcagcaccggctgaggaagagaacctcaccgacgacacagagctcgtttccgttatcacagcagcagtagccgcttacgagggaaaagagacggttgacaacggacttgttgtccgctccatcaagcgtgtttctaacaaaaactggaattaatcaattatcaggaggaaattacaatgaaaaattatacaatcacagtaaatggcaatgtatatgaagtaacagtagaagagggcttcactggcgcagcttccgcaccgaaggcagcagcaccggctccgaaggcagcaccggcagcagcaccgaaggcagcaccggctccggcagcagctccggcagcagcaggcagcgtagcagtaacagctccgatgccgggcaagatccttggcgttaaggcatctgcaggccaggctgttaagagaggccaggttcttctgatcctcgaggctatgaagatggagaacgagatcgttgctccgcaggatggtactgttgcaagcatcaacgttgctgttggtgattccgtagagccgggtgctacactcgctacattaaactaattttctgctgactgcagattccacatggagggattaacatggaatacattcaaaatacacttttgaatcttcttcagcagacagcattcctgaacttaagcgtaggaaacctgatcatgatcttagtagcttgtatcttcctttaccttgcaatcggtaaagggttcgagccgcttcttcttgtgccgatttcctttggtatgctgctcgtaaatatctatccggatattatgctgagcattgaagattcttccaacggtgttggaggacttcttcactatttctacttactggacgagtggagtattctcccgtccctgatcttcatgggtgtcggcgctatgacagacttcggtccgctcatcgctaacccgaagagcttccttttgggcgctgccgctcagttcggtatctacgccgcttactttatggctattttcatgggcttcaacgacaaggcagcagctgcgatctccatcatcggtggtgcagacggcccgacttccatcttccttgctggtatgcttggacagacagagttcatgggaccgatcgctgtagcagcttactcctacatggcgctcgttccgatcatccagccgccgatcatgaaacttttaacaacagaagaagagagaaagatcaagatggaacagcttcgtccggtatccaaacttgagaagatcctcttcccggttatcgttacgatcgttgtttgtatgatccttccgacaactgcaccgctcgttggtatgcttatggttggtaacctcttccgtgagtccggcgttgttaaacagttacaggagacagcttccaacgctcttatgtacatcgttgttatcgtactcggtctttccgtaggtgctacaacaagtgctgagagattcttaaaagttacaaccatcaagatcgttatcctcggacttatcgcatttgcgttcggtacagcagccggcgttatcttcggtaagctcatgtgtaaggtaactggtggtaaggttaacccgttaatcggttctgcaggtgtatctgcagttccgatggcagcccgtgtatcccagaaggttggttctgaggcagatccgacaaacttccttctgatgcatgcaatgggtccgaacgtagcaggtgttatcggtacagcggttgctgccggtaccttcatggctatcttcggggtttaatcagatccgaaacttttaatattggggatgtccattttttggacatcccggtttaggaggataataaaatggcagaagttcagaaaaagccggttaagatcgttgagaccgttcttcgtgatgcgcatcagtctctccttgcaacaagaatgacgactgagcagatgcttccgatcgttgacaaaatggataaagttggctaccacgcagtagaatgctggggcggcgctacttttgatgcctgcctgcgtttcctgaaagaagatccgtgggagagactcagaaagctgagagccggttttaagaacacaaagctccagatgctgtttcgtggccagaacatccttggatacaatcattacgcggacgatgtggttgagtactttgtacagaaatccatcgcaaacggaattgatattatccgtattttcgactgcctgaatgatatcagaaaccttgagactgccgttaaggcgacaaagaaggaaggcggacatgcccagatcgccctttgctacacattaggcgatgcgtatacacttgattactggaagaatatcgcttccgagatcgagagcatgggcgctgattccctctgtatcaaggatatggctggtcttttaactccgtatgcggcttccgagctcgttacggcattaaaacagggcactaaactgccgatcgacctgcacacgcactatacctccggtgttgcttccatgacatacttaaaggctgtggaagcaggctgcgatatcattgactgtgcaatgtctccgctggctctcggtacatcccagccggcaacagaagttatggtcgagacattccgcggaaccaaatatgatactggttacgaccagaatctgcttgcagagatcaccgattacttcactccgatccgtgaggaagctttaaagagcggactcctgaatccgaaggttctcggtgtcaacatcaagactctccagtaccaggtaccgggcggaatgctttccaaccttgtttcccagttaaaggaagcaggacaggaagacaagtaccgcgcagtgcttgaggaaatcccgagagtaagaaaagatttcggcgaaccgccgcttgtaactccgtcctcccagatcgttggtacacaggctgttatgaacgttctgtccggcgagagatacaaaatggttccgaaggaatccaagaagatcatgatgggcgaatttggtaagacggtgaaaccgttcaacaaagaagtccagaagaagatcatcggtgacgcgactccgatcacctgtcgtccagcagatctgatcccgccgcagttaccgaaattcgagaaggagtgcgcacagtggaagcagcaggatgaggatgttttatcctacgctctgttcccggctgtagcgaaagacttcttcgagtaccgcgaagcacagcagacgaaggttgaccagaagactgctgacaaagcgaataaagcttatccggtataattttgcagtaaatctgaatatcaattgacgaaaaaagagagtccggcatttccgagaggaggtgccggatttttttaacaggaaattccgatggaacttcctgttaaaaaaaggcactgcgtgcctaagatgcacactcgcgcgaagatgaagataaccaaacttttacaaaacccttaagaaaatgcggcaatatttggaatttgtgtgaagttttccctgcgcggttgacagaaaagtgcctttgtcattataatgggtatgatgtcggttttatgcaaaaaatcacgaaaccggcagtgggagagaagaaaaacatgacaaaaaaacaaaaaagaattctggcgctgatgctgggagcggtccttttgggggactgcgcggctcggaccggaacgatgatatccggactgtctctggcgtatgcggcgacaggttcggcgacggtaaatgcgactaccctgaatgtgagaagcacaccggggacgacgggatccgtcgtaaaaaagctggcctacggggcggccgtcacggtggtctccgagacagccggatcggatggaaaaacctggtataagatccagttttcttccggatccgggacgcaggaaggctacgtccggtcagattatattaaattcccggtgtcctacagctatgactccacgtttgagaattatctgaacagccagggatttccggaaagctataaggtgtctctgcggacacttcacacggagcatccgacctgggtctttcaggctcagaagacggggctgaactggagcgacgtgatggcggcggagggagctgtcggagcgaatctggtatcaaaatccagcatttcttcctggaaatccacagagtacggtgcctatgactggaataccggaacctggacaggctttgacggatcgtcctgggtggcggcatcaaaagatattgtcgcctactatatggatccgagaaactttttgaatgatacttacgtgttccagttcctgcatcatgcttacgacagcaatgcgcagacgagagagggacttacaagcctgatcaccggaacattcctggaaaaaacaccggagtcgacaaccgcagcgacccagagcgtgcaggagaccatcggttccggaagctctccggtcgtcaataacagcggaagcacagggacttccggctcgctccagcagggagagagctatggaccgggaatgagcacgggcacatccggagggacttcttcgggaagcagctccggcagtaccggcagtcagggcgtgagtcttgagggccctggttccacagtgagctccacgatcagccagagaaaagtgatcacgacggcactcccggaggtcgagtatggcccgggaatggatgcatcctcgattaccgatgacaataccggtgcgtcaaacacatctccggtaccgaccgggcagacttatgtggatatcatcatgaaggcggctgcgcagaccggtgtcaatccttacgttctcggagcgatgatccttcaggagcagggaaccggaaagtcgggaagcatttcaggaaagaccgcaggctatgaaggatattataacttctttaatgtcggcgcttttgcgtcgggatccatgtctgcaattacaagaggactctggtatgcatcccagtcgggaagttacggcagaccatggaattccattgagaagtccatcattggcggagcgacctactacagcgagaatttcctgaaaaacggacaggataccttctacttaaagaagtttaatgtacagggcagcaacctgtacaagcaccagtatatgaccaacgtggagggagcggccggagagggcgcgaagctcgcgagagcatatacggatgcgatgaagaaacaggcacttgtctttaagatcccggtgttcaataacatgccggaaacagcgtgcgcgaaaccgaccgtgaacggaagcccgaacaataagctgtccggaatcacgattgacggatattccctgacaccgactttcagcaaggatacggagaaatatgatcttgttgttgattcttccgtttcctccgtcaatatccgcgcgacggcgatcgactccaaggcaactgtcagcggagccggtacgatcagtctcggcagcggaacgacgatcgttaagatcgtagtgaaggcagaaaacggtgatatgagaacataccaggtttccattgcaaaaggaaacgggaacggcagtacaactattgtctccccgtcaacgggcagctcgacgggaagtcagtccggatcaacggtgggacctggcggttcgacaggtacatcaagctccggaagcacttccggcagtagttccggaacttccggtccgggaagcagcacttccgggacacagagttcctatccggaaggtgcttccggctccggaaagctcgtgacgacatcttcgggcacgaccggtacctccggaagtacgaatccgggaagtacaggttcgtacccggaaggcgcctccggcagcggaaaacttgtgacagcgtcatgacagaacaaaaggtattacaggtctgtttctggaaagactatgcctggatcaagatgatataggagcttattctgacagggaccgtgatttacccattgcctttgcgggcaggagatccggtatttgtctgaatgagctggaataggagaagaatatgaaacaatgtatgaaaaaactggcggcaggactgctggcgttcgcgctgatggtcatgctgctgccggcaggatccatggtctcttttgcggcctccgggaaactctcattttccgacccgaccgcttcggtgggagatcaggtatctgtcacgatgaaaatcacttcggacggagctctcggttcctcggacgtgatgctccagtatgatgcggatgcccttgaatttgtcagcggaacaaatgcaaacggcggcgccggttcggtccgtgtgaccggttctgcggaagccgcagaccagaaggtattcagttttacactgaaatttaatgccttaaaggcgggaacttcctccatcacggtgacatcccaggaggtttatgatgcagattccaaggcggtgacacttgaccatgtcggaagtgcttccgtgaagatcaatgcggcggcgtcttcctccaaagatgcgtccctgtcatcccttgaaatctcacctggtacgctgaaaccggcgttctccgccgatgttacggagtacacggctgcggtttccagcgatgtgacttccataacggtcagtgcacctgcaaaagatggagctgcaaaggttgccatcagcggaaatgatgatcttcaggacggggagaacacgatcacctgtaccgttacggcggaagacggggagacaacaaagacatacacgatcgttgtgacaaagtctgacgaggcggcatcttccgatgaggagacaactgcggattccactgagacaagcggaggtgttgtcggcgaggaaggcaactggacggttgcggatacctttgatgattcggaactcccgtcaggctttactgcaacggagatcgagtatgagggaagaaccgtaaaggcagcgacagatgattccggaatgaccctgctttacatgaccgatgataccggcaagggagatttctttgtatacaacagtgagaccggaacattatccgcatatgtgatcgtcaagatggcggagaagacggttgtcgttcttcctcctgagtgcatccctgagggaacagctcttccggacggatttgccgagtgcaccatcgatatcggagatcatacggttcacggctggatctggaaggacagcggagattctgctccggaatactgtgtagtctacggccggaacgaaaatggcgatgaaggcttctaccgctatgatcagaaagagatgacgctccagcgttatttccaggatccggatgcggcagatgcgcgcagcaagtacttaaaggtagcggaggattacaacagtctgttaaaggactacgagatccgcggattctttgtgatcggactctttgcactctgcattattttagtgatcattgtggtcgttcttctgctcagaaagccgaaggcaccgaagaacccgggccgcgacagatacgatgacgaatatgatgactacgaagacggacggaaaaacagaaagtccgggaagcagacagcgaaaaagtccggaatgacagcgaaagcaccggagagaagaccggccgcaagaccggctgcccgcacagaaacacttccgtatgaggaagtggaagaagcgccgcgcagaagacagccggctgcacagacacgccgtccggcggtacaaacccgtgaaacggtaagaacggaaagaccttccgcagaaaccggaacagcagcaccggagagaccggcaagacctgccagaaagaatgtcgcagatgtggaaaaagatctgtcgagaaatcttgcgaaggaagcggaagccgcgaaagcagctcctgataagaagacagagaatgatgatgacttcgagttcatcgatctggatctgtaaaggaatgtaaaaaaacgaatatgccatgaaagaaactgattgcagcgcatggacagaagcgtacatgtgctgcagcagaaagctctttcgtggcatatttcatttatgcgaacaacgagccaaagtccgtgcttgcgcgagaccttggcgactgttgtgataacaaggggaaactcgcgaagcgtgttttcacttgcctgatcggcttaaacgctgcgtacatggagaatgatagaataaaaaaggtctgagcagcattaaagactcagacctttttgtgcaaaaagttttatgtgataaaatcagctgtttcttaccggttcatctcacttaccggacctgtggaatgatgttcgcggatgatccggtcgatctctttgaaatcggaggacggaagatcgccaggtaccgtgttcttgacgctcgatgtggcatttccgaactgcatggccttttcagggtcgccgtattttaagagtccaaagaggacaccggccacataggcgtcaccggaaccgatccggtcgatgacatcgatgtcgttgtaaggcgcctctgtgtaaaatttatcagagcgggcgtcgtagacgatcgaagtgaagttgtgctttctcgggctgatgaccgtgcgctgggtggtggcaacgatctttacgccataatcagtggcatagctcttcatgatctccttcaggtcaccggtctttttgaacatccggcggcttgtctcctcggagacaaagagcacatcgacgagcggaaggatctcctcgatcgtctttctggcatcttcctcactccagaggttcgcgcggtagttgacatcgaaggagatcgtagctccagcggccttgaatcggcggatcagctccacggcaacattctgcatgttctgacagagcgctaacgaaattccgctcgtgtggaacattctcgcggagtggtagatgtcatccgggatctcgctcattttgatcctcgtgacggaagcctgatggcggtcatagacgatcgtaggctttctcggggcagcgcccatctcgtaatagtagagtccgagtcttgcgtccggtgtgtcgtcatagacgagatagtcatcggatacgccgacaaaacggatcctgtttttaatgaaagttccgagctcattctgcggaagtttggaaacgataccggtacgaagtcctaaaagggcaacgccggaagcaacattgagttccgctccgccggcacgcttttcgaagatatcgccatcgacgatgcgggcatggcgcggcggggaaaggcgcagcatgatctcaccaaatgttatcagatcgaaagaattcttgtccatatcatttcctccggattttatatattgtgaaaaaattagcaggctatatggacagtataatccctgaatacagattcgtcaaaggattttctgcattttcagtcaataattttcaccctttttcattggcagaaatttcggtttggaagattcctgccggtgaaaaggaaagataacacagtcgatgatgtaaatcctgtaaaatttcccctttaattctttgataaagtatgctaatatttagtattatatctataacagttcgatatctgatcctgccggaaaaggaaatacggcggaaattgaaaatagaaggatgtacgggcatgttattgaaaaaacgaaatggaggaaattgatatggctgagaatatgacaccggctgaggaaacaaaagaagtagtttccaaaaactttatcgagcaggaaattgataaagatcttgcggaaggagtatatgaccatgtccagacccggttcccaccggagccgaacggctaccttcatatcggacatgcaaaatcgatcatcttaaactccggtctcgcaaaagagtatggcggaaagtttaatcttcgtttcgatgatacaaacccgacgaaggaaaaaacggagtttgtacagtcgatcactgaggatgtaaagtggcttggcgctgactttgaggacagattgttctttgcttccaactacttcgacacaatgtatgagtgtgcagtaaagctgatcaaaaagggaaaagcgtttgtctgcgatctttctgctgaccagatcaaggagtaccgcggtgacttcacaacaccgggtaaaaacagcccgtaccgtgaccgttcgatcgaggagaacctccagttattcgaaaacatgaagaacggtatgtacaaggacggtgagaaggttctccgtgcgaagatcgatatggcatccccgaacatcaacatgcgtgatccggtcctctatcgtgttgcccatatgacacaccacaacacgggagacaagtggtgcatctacccgatgtacgacttcgctcatccgatcgaggacgcagtcgagcacatcacacactccatctgcactctggaatttgaggatcacagacctctctacgactgggtcgtaagagaatgtgaatttgagaatccgcctcgtcagatcgagttcgcaaagatgtacctgacaaacgttgtaaccggaaaacgttacattaaaaaactcgttgaggacgggatcgtggacggctgggatgacccgcgtcttgttacgatcgctgctctcagaagaagaggatatacaccggaatctttaagaatgttcgtggatctcgtcggtgtttccaaggcaaacagctccgtcgactatgcgatgctggagtactgtatccgtgaggacctgaagttaaaacgcccgagaatgatggctgttcttgatccggtcaaactcgtgatcgacaactatccggaaggacagaccgagatgttaagcatcccgaacaaccttgaaaatccggagatgggcgagcgtgaggttccgttctcaagagaactctacatcgagcgcgaggacttcatggagaatccgccgaagaagtatttccgcctcttcccgggcaatgaagtgcgtctcatgggagcttacttcgtgacatgtaccggtgttgagaaggatgaaaacggaaatgtgacagtgatccactgcacatacgatccggagacaaagagcggttccggatttaccggaagaaaggtaaaaggaacgatccactgggtatctgttccgacagccggaaaagtcgagtgccgtctctatgagaatatcgtggatgaggaaaaaggaaagctgaacgcagacggaaccctgaacttaaatccgaactccaagaccgtcacgaccgcatatgtagagccgaagctcatggaggcaaaggcttacgacagcttccagtttatgagaaacggttattactgtgtagactgcaaggacagcgaggaaggaaagccggtatacaaccgtatcgtttccttaaagagctccttcaagcttccgaaataaagatttatggaattgatcgtaccgttaaatgtacagggggacaggcctctgtatgaacagatctatcaatatatcaaagatgagatccgaaaaggcaatataagaccggaaaagcagctcccttcatccagggatcttgcgaagagccttaaagtcagcaggagtacgacacagcttgcgtatgagcagcttgtgtcggaaggttatcttgaggcagttccgcgaaagggttattttgcggcgtcactggacggaatttttcctccggtggcgcggtctgccgctgccagaacggatcagaaaaaagagctgtcctccggcatggaacaggaaaatgccggggagcagctcttttcggaaaaaatggaagtggatttttctccgcgcgggatcgacctggagggctttccctatgcgacctggagaaagatcagccgtgctgtcctgaaggaggaggaccgggatctttttttgaagggggatccgcagggagacctgatcctcagggaggcgatccgggaatatctccatgcggcgcgcggcgtgaactgcgatgcatcccagatcatcatcggagcgggaaacgaatatcttctgatgctgctctcccagctgctcggaaaagatgcagtgatcgcaatggaagatcccacttaccgacaggcgtaccgggtattatccggcgtggggcataaagtcctgccggtggggatcgataagaatggattctgtgtaaaagagcttgaggatcagactgcgcaggccgcgtatgtgatgccgtcccaccagttcccgacagggatcgtgatgccggtaaagcggaggcaggagcttttatcctgggcgggggagctgcccggaaggtatctgatcgaggatgactatgacagtgaattccggtataagggaaaaccgatcccggcgctccaggggatggatcagacgggttcggtcgtgtatatgggaaccttttcgaaggctatcgcccctgcgatccgtgtgggatacatggtgcttccggagagtctgctttccgtataccgcaaaaagggaagattttattcctcgacggtatcgagagtcgatcagaggatcctggcgaattttatttccgggggatatttcgagcgccatctgaacaggatgcgcgagatctacaagggaaagcatgatgtgcttcttggtgcattaaaaccgctggaaaaacggtttgagatcaagggggaatacgcgggacttcatgttcttctgaccgacagaaagggtgaagcggaacaggcgcttttagcgaaggcagaagaaaaaaaggtccgtgtctacggtctgtccggattttgtatggaagaaaggcgggcaaaggaatcccacacgatcgttcttgggtatgcaggacttacagaagaggagatccggaagggcgtgggacttttgcgcgaagcgctggagtgaaaaaaggatagaggaaaagatacaaaaagggatatacatttgaaaatgtatatcccgaagattcaaaagtgactattgaaatacatcgtgcttctcgtatccgaggtcggaggagagagcagatgcataaaactggacaagatctctctgagtctcaagaagttccggagagccgatccggatctccggggcaataatgccgatggaacctgcaagctcgccttcagagttgaagaccggggcaccgatcccgacagcatcgttgacatattctccgcgggtaatggcgtagccgtcctggcggatcttttttaactcttcgcgcagatcatccgggcggacatgcgggaacgcctggtcgtggatgatgatggttcggaaatattcgtcgatgaaggtcggagtctgccatgcaaggaggacctttcggatcgctccgcagtgcatatacatctcgtagccgaattcctcgacgacctttaagtggctcggaccatcgactttctcgatcacaaggcccttattgccgaccgggatcacgagataagcgtcctcctttgtctgctttgcgagctgtgtcaggatactgtgggcagcatcctgaagacggatccctctggcggcagcctttcctaaaggaataagtgccggaccgagccggtaggtgtgggatctgtcatcgcggatcacatactttttctcacagaatgtctgaaggatccggtgtaccgtacttgggggaagctccatcgcttccgccagttccgcgatcgagaaattgcggtttttttctttcaaaacttctaatagctccatggagcggagaagactttgtatcattcagtttttccttcctccgtatcgtcctcaactacaacggaggatgctttttcatttgctgcagatccctctgccgcagagctgctgtctgctgttgtttcgcaggttccctctgctgctgaacattctgctgtatcgggatcttcttctttttctgctgcaggatcatcggcggtctctgcgtcttttccggagttgatcgtaatataagttctttccggagcattttccgctttctcttcattttcatcagaaggggaatcttcttcctcgtattcatgaaaatcctgatcgagctcatcattgaaggattttaatttcagatagtaggagataccggccgcaactgcgccgccgagcatcgcgccaaatgcgataagaaggcctgatttcttttttgacatggttcattctcctttccgctgcatccagaggatcgaagatcctgcctgcagccgccagtctgctatttataatcataatcgaattcatgggaaaaagaaagagataattatgaaaaaagttaaaaaaatgtataaaatcaatgaaaagtttttacagtatacggacattccatgcccgcctactgtaacaggaagattcccggaaggcttgtctgtatgaagattctccgcgtaaattgacatatattgaacgattgacggaggaaaatgcagaaaattcatagggcacaaatttttcataaaataattagcactcatgacttgacagtgctaacaacatgtgctataacatgatttgtgacgaggggtcagggaaaagacctgagtcagactgaataagataaaagaaaaaaagaattgtgactgaaaattacagagcggtcacaagagcttgtaaaatgacaaggaggagtcagtaatgaaattagtaccattatttgacagagttgttttaaaacagttagttgcagaagagaccacaaaatccggtatcgttcttccgggtcaggcaaaggaaaaaccgcagcaggcagaagtgatcgctgttggccctggcggagttgttgacggaaaagagatcaagatgcaggtaaaaccgggcgataaggtcatctactccaaatactccggaacagaagtaaaagttgaggaagaagattacatcatcgtaaaacagaatgacattcttgcagtgatcgaataatcacttattattgattggaggaatcttaacatggctaaggaaattaaatatggcgttgaggccagaaaagctcttgaagctggtgtaaataaacttgctgatactgttcgcgtaacgatcggaccgaaaggaagaaacgttgttctcgacaaatccttcggtgctccgctcatcacaaacgatggtgttacgatcgcaaaagagatcgaactggaagacccgtttgagaacatgggcgcacagctgttaaaagaagttgcaacaaagacaaacgatgttgccggtgatggtacaacaaccgctaccgttcttgcacaggctatggtaaacgaaggtatgaagaacctggcagcaggtgcaaacccgatcgtattaagaaaaggtatgaagaaagctaccgacgaagctgttaaggcgatcgcagagatgagtgagccgatcagcagcaaggaccagatcgcaagagttgcagcaatctccgcagcaagcgatgaggtcggcgagatggttgcagacgcaatggagaaagttacaaacgacggcgttatcacgatcgaagagtccaagaccatgaagacagagcttgaccttgtagaaggtatgcagttcgaccgtggatacatttccgcatatatgtgcacagatatggagaagatggaggcaactcttgatgacccgtatatcttgatcacagataagaagatcgcaaacatcaacgatattcttccgttactcgagcagatcgttaagacaggtgcaaagctcctcatcatcgctgaggatatcgagggcgaggctcttacaactcttatcgtcaacaagttaagaggtacattcagcgtagttggcgttaaggcaccgggctacggcgacagaagaaaagagatgttaaaggatatcgcgatcttaacaggcggtaccgtgatttccgatgaactcggccttgacctcaaggatgctacaatggagcagcttgggcgtgcaaaatccgttaaggtccagaaggagaacacgatcatcgttgacggtctcggcgacaagaaagccatcgctgacagagttgcccagatcaaaggtcagatcgaagagacaaaatccgactttgacagagagaaacttcaggagagacttgcaaaactcgctggcggcgtagctgttatccgtgtaggtgctgctactgagacagagatgaaagaagcaaagcttcgtatggaagatgctcttgcagctacaaaggcagctgttgaagaaggtatcatcgcaggcggcggatctgcttatgttcatgcagcagagaaggttgcagctcttgtaaacggcatggaaggcgatgagaagaccggcggaaagatcatcttaaaggctctcgaagctccgttattccacatcgtatccaacgcaggtcttgagggtgctgtgatcgtaaataaagtaaaagagcttccggttggccagggcttcgatgcttacaacgaagagtttgttgatatgatcaaagctggtatccttgatccggctaaggttacaagaagtgcattacagaacgcaacaagtgttgcttccacactccttacaacagagtccgttgttgcaaacatcaaagaagagactccggcaatgccggcaggcgcaggcggaatgggcggaatgatgtaatttcttccagatccgtgcaatctgaatgaaaataaataagaccatcggcggttctttgggccgtcggtggtctttttttaacaagctggcgctgcatctggcggaaatatctgcctgtgaagagatttttgaggagaagacaaagaacttacgacatttttgaaagcttgctgttctggtattctccggaccaggtcacatcccggtcaaaccaggggagcggaggaaaggcttttgcgtcctcctcggaggaaaactcaatctccgcgagcatgagtccggcgaattttccctcaaagatatcgaattccacggtgagatcctcgcgtcccgggacagggagcaggtagcgttttttcgtgaggacgttcccgtccgcttttgtgagcaggtgggcgtaggcctcttttgtgagcggaagattatattcttccctcgcgagaagtcctttggatttgtaggtgaggtagtagttgtcatcttccttccggatcctcaccacaggttcggtgcagaggtatgcctgttcgatctcatgaagagggaaggacccatagttttcaggaggtgtcgtgacgagaaatttgcgttcgatttccatgataaatatcctttctggaatgccggcggttgcggcagaagatttgatcgccagttcttatgaaattaccggcagtgattgaaacaaactgtaataaatcatatcatatcgcaaggaaaaagtaaggtcttttgtaaaaaaacatgttacaatatcagtaaacaaatgtagatgaaagttcggcggttccagtatgcggaatccgggagaacgtcctgtttttgcatatcggtcaacaccgttcatgaaaaaaggaggaagtgcgtatgtggacaagggcagagttaaagaaccgtgcaaaaatgtgtctgagcagatattactgggcggcatttgcggtaagcctgatctttgcgatcctcagcggattcggcggattgaatgcaagcacgcagagagttacaagctacctggagcagaatgcgacgggaagcagccgggatgaccagagcggtcttttgatcggtgaattaggaggcgacggcagcctcagtggaagtacccagagtggtcttgccagcgggatcgagcttgtccctggacttggcgacgcttacggaccgggagccggaaatgccggatccatggttgcgagcaacctgttttaccgtcttttcgcgggagcggtggtcgttattgtgatcgtctctgtcgtgatcgggatttttgtacagccattgtttgaagtcggacggaaccggttctatctggaaagccgtgtgacggggcagtcggcgggtgtcggaaagatcttctggggattttccaatggatatttaaagatcgtgggaacccagttccttcggggactgatcacagagagtgttgtgatcctggccagtctgttgggatttcttgtgatcttgtttaatggtgttgaatggatcggtagtgtattttgggcagtaatgatatgcgctacgataggagcttttgtttctgtttatttccagtactgctatctgatggttccatatattcttgctgaaaacccggatatgaagacgatggaagttttaagactctcgaaagagatgatggatggacagaaatggaacgcctttgtactcggcctttctttcctgggatggcagcttttaggaaccctgctctgcggtataggaaccttcttcgttcagccatatgtggatgcaacctttgcggagctttacgcagtgcttcgcggaccatattcgggacgcctgaatggattcggaggggaaccgtttgtacagaataacgcgcgctatggcggacagtatgtggaaccggacagtgtgagagatgtcggtgggaatgaaaacccgggcggcggatacggtgcgtatggaaccggaaatatgaacggaggctatggacagaatggcggaaccggttattcgtacggacagggacagaacagcgcctcggacagctggaatgatatgccgcaggagccgtatcagtatcatggaccagagcagaccgtggattcttccgcacagcagcaggcggctgcagaggatcgcggaacagaagtgaaacggtcggagggcggaccgggatgcggatattatctgaatggaaaattctatccgtatacggatgatgagaaagacggacagtgatgttgaaaaaatgtaactattcagtaggtctgcgcacttgctgcgctgaccgtaataaagcacaggtctggaggcaaaaatcccatcggcgaagccgatctggaatggatttttgctcgtaactgtgagggtactgaacagttacgaaaaaatgagatctgcgggggatttctactgcgttataaggcagggatttcccccgcactgcgatcagaaaggtgcgtaaatgaaaatggcaagagtatatgcgtttgtggcagacggaatggaagaggtggagtgcctcgcggtgtgtgactgcctgagaagagcgaaagtggatgtgaaactggtctccatcatgggaagaaagatggtgacgggatcccacggttttaagattgaggcggactgtctgttcgaggagatcggggatgacgcagatgtgctgttcctcccgggcggacttgtcggaacgaataacctgaaggcgcacagaggtctggcagagatgctgaaggcccatgctgcagcaggaaagcggcttgcggcgatctgtgcggctccgagtgttttaggggagctcggtcttgtcgaaggccatcgtgcgacctgctatccggggtttgaggatcagatgaagggtgcggactgccgcggcgacggtgtggtgacggaccggctgatcagtaccggacgcggaatgggatgggcgatcgaccttgggttggagctgatccgtattctggtgagtgagaatgaggcggagaagatcaggaaggcgatccagtatgagagataaatagactcgctgagggtgttggctgaggtacgcggtgagtatccgggcagatgccgcaaactcgctgcgctcagacagtg

SEQ ID NO: 2029 - DNA, 23048 bp, Unknown
  gut microbiota DNA sequence
caacgcagtcacccgcgagctaagaggaaccagatccccggatcaaggtgcgcctgcccggatactcaccgctgtggggcaggcgcgttatgtgagcgtggtgtgccgggaacggtatggactggcaggcgtggggagagaatgcaggtatttgcagcaagaatatcccgtattttctggattttttgtaatttaggtctggtctttttatgcgtcttatgttataatttcatgcggcgctatgtgcgcgtgacggagaagtgatgcctgcgggcggatttttcgctgagcggccatcataatgccggaaaacgtgtaacgcccaaaaagcggcagttacgagatcatacgggcgggaccatccgatccccgctatcgatatatttaaggaggaactcataaaatgagcgtacaggttgagaatttagagaagaatacggcaaaacttacaatcgaagtgccggcagaaaagtttgaggaggctgtacagcattcctataataagaataagggtaaattcaatatcccgggcttcagaaaaggaaaagctccgttcaacatgatcaagaagatgtatggtgttggcgtattctacgaggatgccgttgatgaagtgatcgacgcaagctatccggatgctgcaaaggagagcggacttgagatcgtttcccgtccggctgtttccatcgagcagatcgaggaaggaaagtccttcatctacacagcaaaagttgctgttaagccggaagttactcttggccagtataagggcgtagaggttcagaagacaaaatctgacgttacagaggaagatatcgagacagagatcaagcgcgcaagagagaaaaactcccgcctgatcacagttgaggacagaggcgttgaggatggcgatcaggtaacgatcgacttcgatggttccgtagacggaaagagattcgagggcggcaaggctgaggactatccgcttacgatcggttcccatacattcatcgacaactttgaggagcagctcatcggcaagaagaccggcgaagagtgcgaagtaaacgtaacattcccggctgagtaccatgtagaagagttaaagaacaaaccggctgtattcaaagtaaaagtaaaagagatccagagaaaagagcttccggaagcaaacgatgagttcgcaagcgaagtatctgatttcgatacaatggaagagtacaagaaagatctctccgagaagttacatgctgagaagatcgaagcagctaagacagcagacgaggataaggttgttgcaaaagttatcgagaacgcaacaatggaaatcccggatcagatggtcgaggagcaggttaacggtatggtcaacgactatgcgcgcagacttgagagccagggtatctccttcaagcagtatgttgagatcacaggcatgacagctgagaagatcggcgagcagatgaagccgcaggcgatcaagagaatccagacaagacttgttctcgaggcagttgtaaaggctgagaacatccaggctgacgatgctgcagttgaggagcagttcgacaagatggctgcagacttcaagatggataaagaacagatcaagggtatgttcggtgaagagcagatggcacagttaaaagaagaccttgctgtacagaaagcgatcgacttccttgtagctgaggcaaagttcgttgactaatcagggcaacatactttagacggatctgcacagaaaacatggtggaaagtggtccgatgacggaccatgacccgcattcagagggggttgctgcggagagcttttcgcagcaatccccagtcggttatacagggatagttccgaaatgtgtgtagacagccggaattttgacggtgagcgcaggttccggacagatatttctgtgtgccgcgatcataaaagaaaagatggaggaaataatatgagcttagtaccttatgtgcttgaatctacaagcagaggagagcgttcctacgatatctattccagattattaaaagaccgtattattttcctcggtgaggaagtaaacgatgtgagcgcgagccttgttgtggctcagctcctgttcctggaatccgaggatccgaataaggacatcaacctttatatcaacagcccgggcggttccgtaacggccggtatggcgatctatgatacgatgaactatattaaatgcgacgtatgcacgacctgcatcggtatggctgcaagcatgggagcattccttctctccagcggtgcgaagggcaaacgttttgcgcttccgaacgctgaggtcatgatccatcagccgtccggcggggcacagggtcaggcgacggagatcaagatcgttgcggagcagatcttaaagacaaaagaaaagctcaacaagatcctggctgcaaacacaggacagccgctcgacgtgatcgcccgcgatacggagagagataattatatgacagcggaagaggcagccgcatatggcctgatcgaccgcgtgatcacaggacactaggtccggttataaatttagaattgaggtgcgaacatgccagtaagaccagaggaaaagatcagatgttccttctgcggaaaaaatcaggatcaggtaagaaaaatgatcgccggttccaacggcgtctatatctgtgacgagtgtatcgaactctgcagcgagatccttgaggaagaactcggaaacgaggaggaggaaagaccggatttctccgggatcaacctcttaaaaccgaaggagatcaaggaatttctggatgactatgtgatcggacaggatgaggcgaaaaaggttctttccgtggctgtttacaatcattataagaggatcacatcgaagaaggaaagtgatgtcgatcttcagaagagcaatatcctgatgctcggtccgaccggatccggtaagacctatctggcacagacacttgcaaagcttctgggtgttccattcgcgatcgcagacgcgacgacactgaccgaggccggttatgtcggcgaggacgtggaaaatatcctcttaaaactgattcaggcagcagacaacgatgtgagccgtgcggagtacgggatcatctacatcgatgagatcgataagatcacaaagaaatccgaaaatgtctccatcacccgtgatgtttccggagaaggtgttcagcaggcactcttaaagatcctggagggaactgtcgcaagcgttccgccgcagggtggaagaaagcatccgcagcaggagctgatccagatcgatacgacaaatatcctgttcatctgcggaggagcttttgacggccttgagagaattatcgagtccaggctggagacaagttccatcggtttcggtgcgaagatcgtcgacaagaagaatacggatatcagcaagctgttaaagcaggcgatgccgcaggatctcacgaaattcggtctgatcccggagtttgtcggaagagtcccggtgatggtatccttagatcttctggatgaggatgcccttgtgcggatcctcacggagccgaagaacgcgctcgtaaaacagtatcagaagttatttgagctggatgacgtgaagctggagttcactccggaggctgtccacgagatcgcccatatggcggtggagagaaagacgggagcaagaggactccgtgcgatcatggaatctgtcatgatggatacgatgtacgaggttccgtccgattccaacgtgggtatctgtaccgttacgaaggatgcggtggacggaaaggaaaagccggaagtcgtataccgcgatgtgacggtgccgaaaaaggcgttgtccggaagatccagaaaagatggaaacggggagatcgcgtaagagaacggctctccttacaaaatgaacctgcaggacccgtatcccgcagataagaggggctgctgcgcacagaaatgtcacggcagcccttttgacgcaatgtatccggaaactgccggagacgttttttacaaatacgatcgacaggacagccgcatgatccgatgggatgcgctgacctgtctgaaactgtctcatagaaaaaggcggaaatcacgacgatcggaatgccggaaacggatttccgctcaggagaaatgaatggaagataagaaaattacgatgccggctgtggcactccggggacttacggtcctcccgggaatggtgcagcattttgatatcagccgggaaaaatctgtccgcgcggtggagacagccatgatgggagaccagaaggtctaccttgtgacgcagcggaatccacagcaggaggtgccgacggccgcagatctgtatcagatgggaacggtatcccagatcaaacagatcgtgaaaatgccgaacgggatcctgcgcgtgatggtggaaggattagagagagcggctcttctcacactgttcgaagacggacagtatctggaggcggagatcgaggacgctccgatgcaggaggaacagctctcggataccgtgaaggaagcgatgagccggatcgtcaaggaaaaacttgaggagtttggaaacgcgaacccgaaggcggtgaaggactttatcggaagtctcctcgtgatcacagacctggagccgctcctgacccagacggcgaacgaattcccgtgggattttgctgtaaagcaggagcttctggaatgtgactatgtaagccacctctacgaccggatcgtgtattatctgatgcgtgagatcgagatcctgatgatcaagcgtgattatcagggaaaagtaaaggaacatatcgataagaaccagcgcgactacatcctgagggaagagctgaaggtcatccgcgaggagctgggagatgatgccggggcggaggacgctgacgggtatctggaacagcttgaaaagctgaatgcggataaggagacaaaggagaagatcaaaaaagagatccagcgtttcaaaggcatgccgggcggaagccaggaggcaaatgtcctgcgcacctatatcgagacggtccttgagatgccgtggaagaagacgtccagggacaatcaggacatcatccatgcgaaggaagtgctggaggaagatcactatggtctggagcaggtaaaagaccgtgttctggaattccttgcggtccgcgccctcacaaagaaaggcacaagcccgatcctctgccttgtgggaccgccgggaacaggtaagacctccattgcgagatccgtggcccgcgcgctcggaaagaagtatgtaaggatcagcctcggcggcattcatgatgaggcggagatccgcggccacagaaagacgtatgtcggcgcgatgccgggccggatcgccgatgcgatgcgccaggcaggcgtggcgaacccgctgatgctcctggacgagatcgataaggtctccgcggactacaggggagatgtctcgtctgcgctccttgaggtccttgacggagagcagaatgggaaattccgcgaccactatctggaaatcccgttagacctttccggagtcctctttatcgcgacggccaacgatgtgtccacgatcccgagaccgctccttgaccgtatggaagtgattgaagtgtccagttacacggagaatgagaagttccatatcgcgaagaaatatctcgttccgaagcagttagagagaaacggactcacaggggaaatgctctccttcagcgataaagcgctggaaaagatcatccacaactacacgagggaagccggagtcaggaacttagagcgccggatcggcgagatctgccggaaggcggcaagagaattccttgagaaaaaacggaaatccgtgcatatcacagagggaaatcttcagaagtatctcggaaaagaaaagatcaccttcgagaatgccaacgaggaggatgaagtcgggatcgtgagaggtctcgcatggaccagcgttggcggggatactctccagatcgaagtgaatgtgatgccgggtgacggaaaactccagatgacaggccagatgggcgatgtcatgaaggaatccgcgcagatcgcactgacgtatgtaagatctgtggctgaccggtacggtgtggaaagcaaatattttaaggaacatgatctgcatcttcatattccggaaggtgcggtgccgaaggatggaccgtccgcgggcatcacgatggcgactgcgatgctctccgcagtgaccggcaaaaaggtcctcgccagcgttgcaatgaccggcgagatcactctgcgggggcgtgtactgccgatcggaggcttaaaggaaaagacacttgcggcgagaatggcacatatgaaaaaggtgctcgtgccggacaagaaccggccggatatggcggagatctcgaaggagatcacgaagggcatggagatcgtgttcgtgaagaccatggacgacgtggtgcgcgaagcgttcgcgtgatacaggaaagctgcaccagccagatagaaggagaataggaatggttatcagaaatgtggaacttgagaccgtctgcggtgtgacgagcacactgccggagaatacgctgccggagttcgcgttcgcgggaaaatcaaacgtgggaaaatcttccctgatcaacgcactcatgaaccggaaagcgttggcgagaacgtcctcccagccgggaaagacccagacgatcaacttttataacatcaacggagatctctattacgtggatctccccggctacggttacgcgaaagttccgcagtctgagaaggtaaaatggggcaagatgatcgagaattatctccataagtcccagatgttaaaatgcgtcttccttctcgtggacatccgtcatgagccgtctgccaacgataagactatgtacgactggatcgtttacaacggcttccgcccggtcatcattgcgacgaagcttgacaagatcaagcggagccagatccagaaacaggtaaaactcatccggaccggtctcggaatggagaaacaggatatcctgatcccgttctccgctgagactaagcagggaagagaggatatctggacgctcatcgacaagatggctgccggagaagatcttctgaccgccgaggaggagatccaggcggagaaagccgcggaatgggctgcgaaaaaggctgcgaaggaagcggaaaacgcaaagaaggaacaggaataagagaatgtaaacaaaaaagcggcattgccacagaacgtgatctgtggcaatgccgcttttgaatatcatcccttcatcagcgttttcatcacataggagtagatctcctggctccgctccttccagtggctggccatcgtctcggcctggtctttgtcggggacggagagatcgaagccgatgaggatggattttccctcccggacttcgcagtgaacgatgtagtcctggtttgttgatttatagaagtcggagatgacgccaacctcgttgcggaggcggaatttgttctcttttaagtagctgtcgatatcctcgatgatcgcgggggagatattgtttccgaagaaagagagcgtgtcgtcaccctcttttgtgatctcgtagcgggaggaattgtgggtggattccatccggatcagccccgcctctttcagctcatttaatgcctgctggagcgtaaaatacgttgtatattcatgatccaggaaaaaatccgtgagctgggagtttgtcagcggaaagttgacatggtccagcatatataagatcatcagtttgtagagcgtgatcggatcagataacataggggttgctcctttattttagagtctgtaaaaatctttgcgaatacatctattttacaggtttcactgaacggattcaagtcctttttccggcttcccatgaaaaaggtcgaaaattgtagtgaatttgaacggaaaatgtgctatgatgataccacgaatatttcagcagatcgcaaaagcgcggggcgcagagcgatcgggtatcggataatgaatttaaggtgaatgaatatatgagagaacggatcatgcgcctttccagaggaatcgtggacgcggagacgccgaagctgttccttgaacctgcgaaggtcgaggagactctggggagcgatacagtttataaaagagaactatacctggcaagcgagaataatttgtatatcaaaggtcttgcctactcaagccacagccgtgtaaggatcttaaagggtgccttcggaggcttaagaaaccatattgtctacgaggtcgacacctcctggtgcgagaacggagacctgatcaggggaaacttcacgcttgtcacgaacagcggagaactggaggttccttttctttttcgtgtcgagatgatcgagtccgtccgtgtcctgtcaaccctgaagacgatggaagactttgtggagctggcgaaaagagatatggatctggcgctgcgacttatggagtaccgggattttacggaagcgccgttctttaaggacctgaagatccgcacgatctatgagggattgaagggacatggaaaccgccagaatgcattggaagagttcttcctggcagcaggcgtgaaggagccgatcgaactgactctttcgacggcgaaaaaggtctacgacagaccgaaggatatcgtgagcgataaagtagtcctccggaagaacacctggggatatatctatatggaagtccgtgctgacggcgatttcatcgagatcccgaaaaaagtcatcactcaggcggattttgaggatgaccgtctggatctccgcttccggatccatccggagcggatgcaccgcggaaagaacttgggtgcgatccgtcttctcacggtccacggagatacggtgatccggatcgaggcgatgggagaggaaccggagaaaaagcgcgccgagggcgagatcagcaaggccggtgtctgccggtatatgaaactccgcgaagcttatgagagcggactttacgacaaaaaactcgttctcggaaagatccagaatgagctggatgcgatccgcggcgcaaacggcggttccgtgatcctgtccttactccaggcggagacgtatctggatgcgggaagaccggatcaggcagcgttatgcctggatgattcctgggagacggtcgcggctctgagagaccgtctcggaacactttactgctactatcagtaccttcagtaccggttggagccggatgaggagaaaaaggacgcggtgatccgcctgttccggaagaaactggaggatgccaacggaagattttatctgcagcttttacagctgaaaatgatgccggagatgtatgaggaggaggaagcgctcgcggagagctttaagatgcagtataagaacggctgccgcagcccgttcctctatatcgagacgatcaggcttttcgggaagaacccggagcttttaaagacgatggatgtctttgagatccacgctctctactacggggcgatgaacggacttgtgggggaggaactggcggagcggatctgtgcgctggcgccgggggcgaaattcttccaccgcctgtattacagactgctcgcaaagctttatgaaaagtatccgacgaaggagatgctgactgcggtatgctgtctcctgatcaagggaaatgtccgcggaaaagagagcttttcgtggtatgaaaaggggatcagccaggagatcagtctcacgaggatctatgaatatttcctctatgcgcttccggattcctacgagcagatgatgccgcgccaggtccttttatacttctcctacgagagcgcccacctggaccagaagagccgggcggctctctacgcgaacgtggctgcctatattcctcaggatgatccgctctataaaaaatacgagcgcgagatggaaaagtttgccatggagcagctgttcgagtcccggatcaataagagactcgcggtgatctacaaacatatcatctaccgggacatcatcgatgaacaggtggcgcgggtcttaccggggatcttaaaggcgaaccggatccgggtcaaagattcggcgatgaaatatgtgatcgtctccaacgagatcctgaccggcgaggacgcttacccactgcaggaccagacggcctatgtgccgctgttttttgaggacagtgtgatcatgttccaggataccttcggaaacaggtatctggacgtggaatatacgaaagaaccggttctcgacgagaaagaactggaagaaaaatgctttgagatgtatccggagcacccgatgttaaagatgaaggcgtgcctggagatcatgaagaaaaaagatctcgataaagaggaggtgactgagctcgagacggctctggacaacctcccggtgaaatctgcctatcagcagaagatgctgacgaggatcatttcctattaccgcgcggctctctcaggcgatgatgaggtgatggacgcggagggcggtgcgtacctcttaaaacttgataaaaagacactctccagaccggagcgtgtggatgtctgcgagacgctgatcgtccagagttacatggtccaggcctacgagatgatcaaagagttcggcgaggagcagatccgcgtgaaacggcttgcggcccttgtatcccagttgatcctggaccggatgttcgaggaggatgagctgcttctccacctcgcgggccgcgtattcgcggacggtcacggagacagcgtgatccttgattatctctgtgaacattataacggcagcggcgaatccatgtaccggatccttgcggaggctgtgaagacccatgtggagacatacgatctggaggagcgcctgcttgcccagtacctgttctccggctgtgagaaacatatggacacggtatttgatctctatgcgtcgagaaaagagaccagcgatgtgattgtgaaggcgtactttacggtgaagtgtacggagtattttctgcgggatgtcgtcccgggggataaagtgtttgcgtacctggaaggcgcaatccatgggatggaacttcggaaagtcccggaaatctatcttctggcactggcaaaattctactctggccaggcatccatctccgaggagcagaaagagcttctctcccggatgatggatattctctccgcacgcggcatggtatttgcgtggtataaggatctggcgagatatgtggaaatgccgggcgaagtcatggacaaggagatcattgagtaccatggacggccggacggaagaccgatcttaaagatccggatcctgccggatgaggaagagttccatgaggaagagatgaacatggtctataaggggatctatgtgcgtcagaagctcttatttgacggcgagatcatggaatacgagatctgggagaatgaggacggaacgatggtgaagaaggcggagggcgaagtgacctgcagcgaaccggcgaccggggacaaaggcaaccgctttacggctctgaattccatgaatctctatctcggaatgaaggatgaccggaaattgaaagaaagcatgacagaatatgtgacggacagtcagatcgcgaaaaaactgttccgtctggcgtaacgaggacaaaggaatggagaaactgatcattggcatcgacctctgcgataactacacccaggcagctgtcctggggcgtgaggatgcgtggatgctcccgaccgtcatctgcagaaagaaggctgcggaagagtggtatgtgggggaagatgcgtacaaatatacgctggtgggcgagggagtcatcgttgacaagctcctgagcctggcggcaaaagaaggaacgtccactatcggaggcgtgaaatacggcggaatggagctgctgcagagattcctgggcagcatcctcgccatggtccgggcagagtacggcgggcagaagatcgacgagctggtcatcagcctgaaaaacatggagatgaagcttttagaaggtcttacggccagcgtggaggccctcggcgttccgaagggatgcatccatatcgcaagccacacggaatgttttgtccactatgtgttaaaccagaggagagacgtctggggaggccaggtggggatgttctccctgtcggatgaggacctgcgctactacgagttaaaggtcacgagaggaccccgccagatgacggccctggcggagcacgaggagctggaagagggctttagcctgagcgtcctggatacaggctccggggcaaagatggcggataagatcctctgcgcctgcggggagcgttttctgcagaaaaagatcttttcctcgatcttcctgacgggaaaaggctttgcgagaacagactgggcgccggaattcatgaaacagatctgcaacaggagaagagtctttgtggagacggctctctttgcgaagggcgctgccatgaaggcggaggaatacttaaatgagagcgattccccatcatttgtctgcctctgtgagggcaaattatggtccacggtctccatggaggtcatgaagcgggacgcgaagtcggagctcgtcctggcatctgccggtgagagctggtatgaggcgagaagtgtggtcgaagtgatcccggacggggaacgtgagatcacgtttacgatcacgccgcagcaggagccgaaaaagaaacgccaggtgaaggttacccttgacggattcccggagcgtccgaataagacgacgaagatccgggtggctgtcggcttcctcgatgagaagacgatggtggtcaagctcacagaccagggattcggggagctgttcccgaagacggacgcggtggtccgccaggaggtgacgttatgagtctgattctctgcagacaggagcctgtgaagattcctctttatatcgaagatcttgggatccatatctattcttcccaggagctctgctatgtgatctacaataacccgctgctggttctggaggactttatcgacagccgcctcacggagttcctccggagtgagctgcgcatgccgttcctcgcggagaagatcgaaaaatggatggagagccgcggtgcgacggaggagatcctgtatctgatccttcaggagtgcaactattattccccgaaggagcaggctgcttaccgtcagacggtaaacggattaaagaagctcacggaggaagaatacaagaaacgccgtgcggattatttttacggtcttgatctcttcggaaaagcagtcacgatctacgagcagatcttagacggggcaggacgccatctctccggggatttccgcgggaaagtctggaacaacattgcagcctgctatgcgaagcttttctgctaccagaaggcgatgcatgcctacgagaacgcctggaatgcaaaggcggaggcggagtatgtgaagcgcatgtacttcctcacggcgctgaatccggagcttaaattaaaagataagttccaggagatgatcggggaggacgacaagaaagtctgggatcaggaagtgaaggaggcaagggaagaggcggaaaaagcgccggagaccttaaaacttgccgctgtgttcgagaaagacccggccggccggatcgcggcggcgggggatgtgctgaaccgctggaagatggaatacaggagaatgctgtaagatcattttcacgggcagaagtttttggaccggaaaatcctgtgtgatacagggacagtggtggattttgctgactttttccttgacattttatcaggattctactatattaggaaagagcagtcggaaaatatttgcggctgtgaagcgaaccggatgaaagaaagagccggtctgggaaacaagtgaaaagctgggaagaagaggagtacattttttgcgcctccagagagaactgtccattggctggaagacggtttgggaatgcggaaatggaaggtagcttcggagccggagcagtgaacggaaagtagctgatcccggggagaaacctcgttaagaacaaatgcgatactgtctgaaggatcggaaggtcctggggatggtgaataaaggtggtaacgcggtgattcgccctttgcatgaatgtgcagagggcgtttttgttttagcgggaaagtccggcaggatttccggaaaaacaaaaggcaccggcaacaggagtacaaaacgatgacaaagaaagattccaaacagaaaaaagtacaaatcacaaactgcgagacctgcgccttttacacatatgatgaagagtatggctactacgtctgcgaggcggatctggacgaggacgagatgtctgcgttccttcggggaagtgatttttcctgcgggttctaccagcttgatgatgaatatgccatcgtaagaaaacagatgtagaaaagaataaggagaagaccatgaaagaactggaaaagacctacaatccggcggacattgaagaccgcctgtaccagaaatggctggacaacaagtatttccatgcagatgcggagagaggaagacgtgagggcaagaagccgttcacgatcgtaatgccgccgccaaacatcacaggacagcttcatatgggccacgctcttgacaacacgatgcaggatatcctgatccgttacaagagaatgcagggctacgaggcactctggcagccgggtactgaccacgcagccatcgctaccgaggtcaaggttatcgacaagttaaagaaagagggcatcaacaagaacgacctcggacgtgagggattcttaaaagaggcctggaagtggaaagaggagtacggcacaaggatcatcaagcagctccacaaactcggttcctccgcggattgggacagagagcgcttcacgatggacgcaggctgctccgaggctgttttagaggtatttacacgcctctatgagaaaggatatatctataaaggatccaggattatcaactggtgcccggtctgcaagacatccatctccgacgctgaggttgagcacaaggagcaggacggcttcttctggcacatcaactacccgatcgtaggcgaagagggaagattcgttgagattgcgacgacaagaccggagacactgctcggcgatacagccgttgccgtaaatccggaggacgagcgctacaaagacatcatcggaaagatgttaaagcttccgctcacagaccgcgagatcccggtgatcgcagatgagtatgttgacaaggaattcggaaccggctgcgtaaagatcacaccggctcacgacccgaacgacttcgaggtcggaaaacgccacaacctggaagagatctgcatcatgaacgacgatgcgacgatcaatgttccgggcaaatacttcggcatggaccgctatgaggcgagaaaagccatggtcgaggatttgaaggaaatgggacttctcgtgaaagttgttccgcacagccacaatgtcggcacccacgaccgctgcggcacgaccgtagaaccgatggtaaaaccgcagtggttcgtaaagatggacgagatggcaaaaccggccatcgaggctttaaagagcggcaaattaagattcgttccggagagcttcggaaaaacatatctccactggctcgagggaatccgcgactggtgtatctccagacagctctggtggggccacaggatcccggcttactactgcgaagagtgcggtgagatgacggttgcaaagatgatgccggagaagtgcccgaaatgcggctgcacacacttaaagcaggatgaggacaccctcgatacctggttctcctccgcattatggccgttctccacactcggctggccgaaggagaccgacgagatgaagtatttctatccgacagacgttctcgtcaccggatacgacatcatcttcttctgggtcatccgtatggtattctccggacttgagcagaccggtgagtgcccgttcaatacggtcctgatccacggccttgtccgcgattcccagggacgcaagatgagtaagtccttaggaaacgggatcgatccgctggaagtcatcgacaagtacggtgcagatgctctccgtatgactcttatgacaggaaatgctcctggaaacgatatgcgtttctactgggagagagtcgaggcgagcagaaacttcgcaaacaaggtatggaacgcgagccgtttcatcatgatgaatatcgagaaggcaccggcaggcgaggcgaagctcagtgaccttacggcagcagataaatggatcctctccaaggtcaatgatcttgcgaaggaagttacggaaaacatggacaagtacgagctcggaattgccctccagaaggtttacgatttcgtttgggaggagttctgtgactggtacatcgagatggtaaaaccgcgtctctggaacgatgaggaccagacgaaggcagcggcgatctggacattaaagacagtcctgatcaattccttaaagcttttacatccgttcatgccgttcatcacggaagagatcttctgcaatttacaggatgatgagccgtccatcatgatctcctcctggccggtatataaggaagagtggaatttcgccgaggatgagcatgcagtcgaggtcatcaaggaggctgtccgtgcgatccgtaatgtgcgtacatccatgaatgttccgccgagcagaaaggcgaaggtgttcgttgtgactgaggatgctgatctcacaaagatttttgagaacagccgcgtattcttcagcacgcttgcttctgcgaatgaggttgtgatccagaaggataagacaggaatcggcgaggatgccgtatccgcagtgatcccgaaggcagcgatctatatgccgtttgcggagcttgttgatatcgagaaggagacggagcgcctgaagaaggaagaggagcgtcttacgaaggagcttgcgcgtgtaaacggaatgcttgcgaatgagaagtttgtgagcaaggcgccgcaggcgaagatcgatgaggagagagcgaagcttcagaagtatacagagatgatggagcaggtgaagactcggttggcgcagcttggaaagtaagtgatagcgcgaaagtgctgatgatatagggggcagccgcaggtgttttgggcctgtggctgttctgcgttttggcggggaaagtgcggacttcgggtgttggcgagagtacgcggtgagcgtccggacaggagtgcccggggatgcggggatggttcctctaagctcccgggcgactgctaaaggcggaaaagagatgacacaactcgcttcgctcaaacaagtgtcatcttttttccaacgcattcacccgcgagctaagaggaagccagatccccggatcaagggcactcctgtccggatgctcaccgctggtggctggcaatgatatatgggtcgctcgctggcgctttgcttggtggtggcggtgagttttgctggaatgcgtcgaattgttccgatatgtttgggttgcaaaacgcaggagaaacaggtatcatatgtgggagaagcaggtcacgacgaggaggagttttcttggagtacataacgatgcaggacgcgtgggatcagatcgaggctattccggggtatgcgaggaagaagagcgggatcccgaagatacgggagtttctcgggcttttgggcgatccggaccgggagtttcaggtgatccatgttgccgggacgaacggaaagggttcggtttgtgcttttttgacatcgatgctctgcgaagcgggaatcccgtgcggaacgtttgtttcgccgcatctggtggatatccgggagcggtttctgattggcggggtgatggtcccggaggcggattttgtaagggcgtttctggaggtgcaggctgtctgtgagaaatggactgcgcggggaacgcttcatcctacctactttgagtttttgttttacatgggactttgtattttccggaatgccggtgtgagggttctggtcctggagacgggaatgggaggtacatatgatgtgacgaacgtggtggaggatccgcttgtttcggtcatcacgtccatcagcatcgatcacacggcgtttctgggatcgacgattgcggagatcgctgcgcacaaggcggggatcataaagccgggccatcctgtggtatatgactgcagttctccggaggcggcagcggtgatttctgcgaaggctgaggagctgggagtacaaaagtttcctgtgacaccggagacggcaggtcgcgggattcgaacccgtctcgcggatatggaggctgatacggctgcccggctggacagaaatctgctggagctgtcttaccgcggcagagaggtaccgtttgagatcccgtttgaggcgccttaccagtttatgaacgcggcgctggcgatccgggcgttagatgtctcgggacttccggtgacgccggagcaggcgaaggcaggggttcggaaagcaaaatggcccgcgcggatggaacagatctgtccgggcgtataccttgacggggcgcacaatgaggatgggatccgggcgttcctggatgcggcctgcaggctgaagaaattgcgggatccggatcatgtgaggatcctgtttgcggtctccgcggacaagaagtacccggagatgctggctgagatcagagagcgtctgcagccggatttctggatccttgcgaagatggagtcccatcggacgctttccgtcagggaactggaggaggcggcaaaagtgcttgccgatcaggaatgcgggaaaaaaacggaaatcctggtttgtccggatgtgaaagaggcgttaaaccgtctgttccgcattcacggggaacatgatctgactttgatcgccggatcgctgtatctggcgggggaagtgaaggagtgtttcgggaactcaggctgagaaaagtgataacggatgccgcggaagatacgaaagcggcagcaggagcggcggtctcgtgcatggaacggactgcagcgataaaggagagacagatatgatcaattttgaagaagagatcgagcgttttaaaccgagtctggaggtcgaggcggtcagcgatgcgatcgtaaagagtgacctcacagatatggctgacatcatgatggacatcatgaaggatatcaagaaggaaaagtaatatatggatgaaatgcagaagatccagtacgcggcgaacagctattataaccgtggtctggaaatggcaaaggagagaaacctttccggggcggcgagatttttaaagcgcgccctgcagtttaataaataccacacggatgccagaaaccttctgggactcatcttttacgagatgggggagacgtcggatgcgctgatccagtgggtcatcagtatcaatctccagccggacaacaaccgcgcggaccattaccttgacgaggtgcagagaaagccgggacagctggagatcgcgagccagatggtgaagaaattcaaccaggcactgttttatgcgcagaatgacagcgatgatctcgcagttctgcagttgaagaggatcgtcgacgagaagccgaattttgtgaaggcgcatctgctcctcgcgctcctctacatggagcacggcgattatgtgaaggcaggaaagtccctggtcaaggtgctccagatcgacaacaacaacgagaaggccacccggtacatggagtatgtaaaagagcataccggaaaggcggaggtggaaaagagaaagctgaaaaatgcgttctcccaccgggaaatgcaggatgatgatgtgatcctgccgccgacttataaggagaatacaggctggcagtcgatcatcaatatcggcatcggtcttgtcctgggcgcggtcatggtcgtattcctcatcatgccggcgagagagcgggcgctcaattatgaacataatcaggagatgcagtcctacacggataagctgaatctcgcaaaccaggagacggacaagttaaagctccaggctgaggattaccagaagcagaaggaggacgcggaaggtcagttaaatgacctgaagggggattcaggaagcacggtaaaccagtatgcgacactcgcaaagatcctcgatgcgtaccgaaaaggggacatgaacacggcggttttaagctatgtggacatggatcagtcgaagatcacggatgacagttctgtggcgatcttaaatgagatcaaagcggacatggacacaaatgccccggcggtccttatggcggcggctgctcagtccacagctgccggtgactatgacacagcgctccactattatgaaaaatacatggagatcgacgacaagaacccggaagtcatctacgacatgggcatggtgtacaagtcaaagggcgacaccgacaatgcgaaccagatgttcggacaggtcatcatgaactttgcggattcggagtttgcggagaaggcgaagacggagcggggatactagaaatcaaataaaaatgatcaagagactttacagaagaaaagctgtgaggtctctttttgtttggccggaaataatcagattatagaaaaggagaggaagaacatatggaagattcatttgtatacgaggcgaaaggtccgacacttatcattcatctgccgaaggagtttgaccaccataactgcaggaatctgcggtatgagacggatcttctgatggcggaaaattatgtttccaggatcatctttgattttacgcggacgcggtttatggacagctccggcatcggggtcctcttaaaccgctacaagcagatgaaggcggggcacacaagtttttacggcgcctgcccgcaggtcatgcgcgttctgaaggttgcggggatcctgggactgatgcaccagtatgagtcaaaggaagaagcgatctacagcagggaggtatagggatggagacgacggtgaagaatgtgcagaatgggaaaggcgaggagacggcggcgtgtgagacgatggaactcgtgatggagagccggtccgagaatgaggagtttgcgagagttgtcgcggctgtctttgcgagccgcctggatccgaccctggaagagctggatgacatcaaaacggcagtctcggaggcggtaacgaatgcggtgatccacggataccggggcgggaaagggaaaataactctcgctgcgacggcatgggaaaaagagcggctgttttccgtgacggtccgggacgagggcgtcgggatcgcggatgtggagcaggcgatggagccgatgttcacgacatgcccggaggacggtcggtccggcatgggattttccttcatggaggcgtttatggaccaggtggaggtcgtctccgcgccgggaaagggaacctccgtcacgatgaaaaagaagatcggcaggtgacgggatggcggacactgcggaacttttaaaacgttcacacgcaggggataaagaggcgagagaccggctcgttatggagaatgcaggacttgtctggagtattgtaaagaggtttgcgggccgtggaacggaagtggaagatctgtttcagatcggaaatatcgggctcatgaaggccattgaccggtttgacacagagcttggcgtccagttttcaacgtatgcggtgccgatgatcctcggggagatccgccggtttctccgcgacgacggcatgatcaaggtcagcagaccgttaaaggagcttgccgggaaggtaggggcggcgagagagaagctggaagcggatctcgggagggagccgaccgtggaggaacttgcaaagtccgtcggggcgagccgtgaggaggtggcggcgtccatggaagccggggcgagagtcggatccatctatgagccgtttgatcccggtgatgggaccggcggctgcctggccgataagatcgcggaaaagacatcagagaacgaccgtgtcctggatcggatcgttttgtcagagcttctctctgacctcggagagcgggaacagcagctcataaagctgcgctattttgaaaaccagacccagactgcaatcgcatcccgacttggaatttcacaggttcaggtgtcacggctggagaagaagatcctgcgggagatgcgggagaggatgatggggtgaaagggacattatagggtgatttaaggaaaaggataaggataagagtgtattggctgtagctgatacacttttttctttggaacgaacagcaggtaaagaaagatcacatttgcagatcagaattgcagtcagaataaatttaaaatgcgagtttgtaaagcatggatacgaaaaagtgctgtatcgattgtactgttcgcattcctatggtatgataaaagaagtgaaatactgaagatgaaatagataatggtaagaggtgacaatatggcagtgtgctataaaaaactttggaaaatgttgatcgataaagatatgataaaaaaggatttacgcctgcagactggtttcagcacgacaaccatgtcaaagctgtctaaggatgaaaatgtcagtatggatgtaattgaaaaaatttgtaccgtgttaaattgcgatgttggagacatcatggagttcatacctgataaaaaagaggaacagtaaggaggcataccattatggatcattcgtatccttatattgcatctttgaccagagaaccgttccttttttatgagatgcgttccactgcaaagctgatgagcgaaggactttccgatgaagcgattgcagaagaaatcatgaagcagaatcttttccagtatccgacggagaagtcgattacccggatggcaaaagcctgtattaaaaggcttcatgcgttggaagatgatacactggtgatggcgattgcatcacatccgacggacgaggcaaagcagatttgtctgtatgcaatgatgaagcagagccgacttgtctgggagtttatgctgacagtcattggcgagaagtacagattaagggacacgtcctttggtaagatagatttgaatacattttttatgcgtttacaggagcagaatgataccgtagcttcctggagcgacagcacaataactaagttaaaacagattattgccagagtgcttgtggagacagaatatctcgacaatctcaaggcagatcatttg

SEQ ID NO: 2030 - DNA, 1503 bp, Unknown
  gut microbiota DNA sequence
agtctataatttccacgtataaagacatcaatgataaaacagttaagcataacgataagattgatgcacgtctgttagaatttttattataccagacgggattactgatccgtatggtattaagagtatctggacagatagagggcaactaaatagtgttataagagtcaggagtcgtaacagtttccctgactctttttctttacccatatgttgggatttttatgtcgatcaattttacattcttggaatcctggtatgtggagtatgaagtcacgtttccctttgaatcaagcaatgcacatacaaaagaattatcgccgtcatcgacttcccgcatagacatgggtgagcggtgaatcttgtggagatcttcgctccagctgtttcccattggcaggatccgctgataagggagattcgaacaaaaaggatcggcggccggagtcttggagagtgaaaggattactggacgcggaataaggttttctgttgggaaagaatggatcgcatagtccaggttcttcggatccagggacgagagagcaacgtagattcccggttcctttgtaagttcatagaggcttatggcatccagaggtgactcgcagatgaagagtggatagtcatcttcataggtttcgatgttagtttccatcatggagaaaacgtgattgatggaaagaaaggtatcggaggagaaccaccagaatcctaaaggattctctgtataaataagcttctgagatccgctctgttttgtattctggaggaggtagtaattttgatcagcatttccgaagcaggcatagtgacgtcccgttccagggactgccgtggcatataactttttcatgtataccaggtttcggaagatccggttgctgatgttacactcattgatgatatagttctgaagggcactgatgtcgccagtgtccggcggaacacggaaagtgtggatgtccgctttcagaggtgccgctggctttttatatttgtgagtgacatcatgaccaagtgaaaattcaagcagcgaggagacggcatccgcccaaccgtattcctggtatttcgtcaggtatgagatgctgtcaccggcttcatggagagagtagcgaaagtaactgtcatgatagatcaccagactgtcgtgattacagtcgcggagggttccggtacaatagatgacccgatccggatgttctgccaacatatattgaattaagtcggcctgctttgcaagccgcatatcgttttctgtaaattttatgtatgaactcatgaataagctccaatcattttgtatttgagaaggtagaggaaagattttcttatagatattatgtaagatctgagaaaaaaagtgccataaaattacaaaaaagtaaaaatatttttcaaaaataataaaactatcctactgagagtaccatatagaacagtacaccatcttatgatgaaatgtatgacactgagagtgaaccacttagaagaggatca

SEQ ID NO: 2031 - DNA, 7705 bp, Unknown
  gut microbiota DNA sequence
gtgatcggcggtctgtcggtagctgtacctggagaagttgctggttttgagtatcttcttgataactacggttctgatgccgtaagccgtcagcagatcttccagcctgctatcgacacagccaacaacggctatgtagtgggagttacctttaaggaagagctggacagcgagtataccggtattgccgcaaacgagactttaagcaatatctacctggatgagagcggactgccgtatgaggttggtgatgtgatcaaaaacccggatctggcaaagaccctgcagttgatcgctgatggcggtaaagatgctttctataccggcgatatggcacaggctatggtggatgctgttgcggcttggggtggcaatatgaccatggaagaccttgcaaattacgaagtaaaggttcgtgagcctgtcgttggtcactataaagattacactatctactctttaccaccggcatcttccggcggtacacacctggttgagatcctgaacattctcgagaactacgacgatatggacaagattggtgtaaacagcgctgagtatgtacatcgtttctctgaggctttcaagattgccttcgcagaccgcgcgcagtatatggcagatactgactttgctgatgttccgttagctcagctgacaagcaaagactatgctgcagagcgttatagcgagatcactgacaagagcggcagctatgtggctgtagagccggaagagttagagcattatgcaactacaagcttttccgttgttgaccagtggggcaacatggtagcctgcacaaagactatcaactacggctttggttccaaggttggtgttcctggctatggatttattatgaacgacgagatggatgatttctcagctgatcctgagagcgtaaactgcgcagaaggcggaaaacgtccgttatccagcatgagcccgtctatcgttttatatccggatggatctccgtacatgacaatcggaagcccgggagctacccgtattttcccgacgatcgctcaggttattgagcgcatgattgactacaatatggatattcaggacgcgatcgattgtgcacgtatctacgacaacgcatctgaaaatatctgctatgagtccggcggtgtgaacccgatcactcctgaggttgctaaagaactgcaggatcgcggacatgaagttaccgataagggagaatggcagctgttcttcggcggcgtacagggaatctcgatcggtaaggacggaaccctgcgcggtggtgcggatcctcgccgtgatggtaaggctctggcatattaattttcatttccagtaatacatgaactatcagtgctgcccgattcccgataacggggagggcagctgtaaaataagaaaaggagacatacgattatgaagaaacttggtatttttattgcggctagtgccttgacattatctttggctgcttgcggctccggcgcttccagcacaacaactaccgcagcggctgcagaaaccacagcagcagcttccgcagaaactacagcggcagcaggtgctgcaactgaactgactgagatcagcgcaggtatgtgctctactccggctatcctgaccagtattggacagagtgctgatgtagacattgcaaatacactttgcacaaaggctggcattgaagtaacaatgaataagaacatcacaggcgcagatcttccagatgactgcaaaactctgatccttgcagtcggtggatcttccaagggacttggtgctgccggtatcgatgctgaccaggagcttgcacgtactgacgctctgatttcctctgcaaaggaaaaaggcatcattgttcttgctctgcacactggcggatccgctcgtcgcggtaccttatctgacagctttatcactccggctttccagggctgcgatgctgctatcgtagtttctgagggagattccgatggtctgatgtctggtatcttatccggcaacggaactcctgcaatctatgtagataacactgcaggtactcttgacgctttaaaaactgcatttggtctgtaaatctgagttactaaacaaacaaactaacctgcggcctggctgaacaggccgcagtgattttgaagaggagaacatcattatgacaccttacgtgatcacttttattgtgatggtcggtgttttcatgatcggctgttttgcattcaaactgcctgttggcgtatcaatgctgatagcagcgctctgcggtgctcttgagggcggcctcggcaccgagactatccgtatgatggtagagggcgagttcggttatgtagataccattctgactattggctgtgccatgattttcatgaaggtcattgagggatccggtgctctggatgctttaagcagcctgattattgagaaattccatcgtttccctgctgttttactggttttaatcatgctcatcatcatgttccccggcatgatcaccggttcttccactgcagcagttctttcagcaggttccattatggctccggttcttgcattaatgggaattgatgccgttacctcaggctccattatcgctatgggtgctctgcttggtatgatcgcacctcctgtaaataccgctgcattaattatctgcgcaggtatcgatgttccttatgttggttttgagggtccgctggccttaatcactttcccgttagcgattctgttcgtgcttttactcggctacaagcaggcacgccacatggactatgaaaaactgaaacctgctcttgaaaagcaggatgcgatccgcaagcagtacggtgtgcgcatctacattccgttactggttctggttgctttaatggttatctttaaggttctgaagttaggcgaagacatcggtatgccactcatgttccttatcagcgctgccgttggtctgttcaccggaaagaagatcaatgtactgactgctgtaccggaagccatccgtaccgcagcacctgttatgggtattctgatgggtgttggtatgttcatcgaagtaatgacagcgaccggcgttcgcggtctggtagttatcagctgtctgcgtcttccgagcacattgtggctcttagcctgcgcgatcagtattccgctgtttggtgcagtttcctcttacggcgcatgctcggttttaggcgttccgttcgcttacatttatgcttcacttttaggcggaaattccgttgtggtcttagctgctatcagcctgatcgctgctgtgggtgatatgatgcctcctaccgctttagcgggtctgttcgctgcacaggttacaggtgtagaaaaatacactaagatcctgaagcgttgtattgtgcctatcatcattctgctggtttacgcttgtttcttcctggcaaattcaaaactgattgccggactgttttaaaggagggactgaattatgagtattatcacgatcatttatttagccatcgcccttctggtttttgtaagcacactgtacaacatgatttttaaggaagaacgccttgttgatcagatcaacgcagctatgattttaattcctctgctgctgcggatcttcctgatcaagtaaggagggtgaatgaaaatgaagaaaacgtatctgtccgccgttgccgttctggtttgcgcggctctcgttggcggtattgccggtacgagcttttataccaagcgccatttcaaggaagacatcgtgactggtccgaatgtgaccgaggtatttaagctgagccgttataatccaaacctggaaggcaccatcggcgattccgatgtatatgtactgaaaggtgaaaaagagggaggttcccttgttgttctgggcagcactcatgccaacgaaccttctggtcatatggccggcattattctggaagagaatgcaaaggttgaagcgggaaccatttatgtgatcccgaacatcaacaattccgctttgacccacaatgacccgctggatggttccccgcagtacatgcacttcaccacaaaaaatggtgagaccagaacattccagtatggctcccgtgcaaccaacccgatcgatcagtggccggatccggatatttacacacataagtcttccggtcagacactttccggttcagagactcgtaacctgaaccgctgctatccgggagttgaggatggtactttatctgagcaggttgcttatgcggtaaccaacatgatcaagaccttagatattgacatggagatcgacctgcatgagtccagcccggagtatgctgtaaacaatgctaccgtagctcacgagcgcgcttctgctattgcatctgagggcgttctgaatctggaattagagggaatttccatgagcctggagccgtctccggtttccttacatggtctgactcaccgtgagttgggtgactataccaatacttacgcactgttaatggagactggtaaccctagtcagggccgtcttcgtggctatacagatgaggatctggtaaagacaggtgaggatccttgctatgtgatagcctatgatctgggtcttctgtatgttgactacagctccggcaacttcccaattgagttgcgtactggccgtcatcttgctggtatcagcgcttacatcgatgcgttcaacaataacagcagcgaagataagcagatcattgtgaaaggtattccgacctatgacgagatgatcaacagcgatttaggtgatttccttctgtaaaaattttatacagacccaatgaaaaccccggtctgcagtgcatgaacattgcggaccggggtttttgttacgcaaattttgcctttaatgttcggatcgccggggactgtacgaggatcgtgtaggctacgccgccgaggacgatccctgcgatggtctgcatggacagggtgaacatttcaccgaaggcaacaacggtgccgtagagcgggatctttacgagcgtgtagccgataatatgggcgatgccgccgacgatagcaccgacgagccaggaatatttaaagttcggcagaagcttgtaggcaatcgttccggcgatgaacgcccagagaccttttaataccatggtcgggagaacccataccgcgtagccgccgagaaaatcggagagacctgcgccgatggcaccggcgaggacgccgcgtcttgtgccaaataagcagacggtcaggatgatcatgcagtcgccgaggtgggtgtagccaaaggcggaaggaattttaaagaaataggttccgacaaataccagagcgctcattaagccgatgatggagatatcgagggtggtgtcctggtgtgagtgatttttcataggggtgtcctccttgaatacaataatttcaaatttttaataaatttaaatgattcaaacacatgcaacaaaactctgtgatatgcagatgaaaaacttttggcaggcttgaatgaaaacgatttggcttttcgaagtcgaaatttcagtgacacaatttaaaaaattgctgtaacatttaccccctgtttctgcagtggatacaaaaacttctattttaatcccataaatttagctgcgttatgatagaaaatgttctccagtccttcatcatccacgccgcatgccatgatcttctggatctcaacggtcggggcatggaacggagagtcgatgccgaacatgactttctcgtggccgacggtatggtaggcgttggcgatctggacactcatggaggttccggaggtctcaagccagatattgtcgtatttttttgccatggtgatcgccgcatcgacataaacaccatgggcatgtcccatatggatcatgacgatcgggagatgcgggtggcgttcagccagaagtccgatctgccacggaagggagaatggcggatgaccggaatggatgaacaacggttttccgtatttctcacagatctcagctaccggatccacacacggatcatcggcacagtagccgtcaaagagggactgaagctttgcaccggcaaagcgttcgtcacggatataatgctctaaggcatcgtaagccggttttccttcggcacagttgatccacatgagcgggatgatcttatccgggtgagccttgaaggcagcaacggtctcttcatttgtgtgcgggccgtcggaacagaggatcgtcttttcaatattgaattcttccatctgttttaagagaaggtctgcattaaagtggatattgaacggactgccgaaggtgccgatatggctgtgggcatcgatttttttaaatttgctgaaatcgcttgtaatactcataatatcgctccttttatctcagtcagataagactcccactttttctggtggtgagccatagcaaattgtcgggaaaatctcgcatgcggtaaatatgtgattatcatatctgagatatggcattgttaaaatatccaattttaaataatttgaccagtccagatgcggcaaatactgagcttaaacaggtgaaaaggcggcattccatcttttttgcgtggaaccacaagggtacggaatggttgcaggtttacttaaacggccggcggtgagaaggaaaaacaaaaattcacttgacaaaacagcagacatctattaccattagaatcaaacattttgaatatcaaactatttgaaattaaaaactactgcggggaataaaattccttctgcataaacgaaatggcaggatttagaagatgatgacagccagaattgctggaatcggcgcgtatgtgccggagaatttgattacgaacgacgatctggcgaagatcgtggacacgaatgacgagtggatccggacacggaccggaatccgggaacgccggatctcctccggagagggaacgcgccatctggcggcgaaggcagctgagcgggcgcttgcggcagcgggagttgccccggaagagctggatatcatcattcttgggacttcatccccggaccggaattatcccagcgatgcctgcagtgttcaggcggccatcggggcagtgaatgcagttgccttcgatatctcggcggcatgcgcgggatttattttcgccatgaatatcgtggaaggattttttaaagccggaatttacaagacggcgctgatcatcggggcagaaaccctcagcaaagtgacagactggagtgaccgcggcacctgtgtcctcttcggagacggagcaggggcagccgttttaaaagcggaagagaccggaatcatcgacatgatgatgggagcggacggaacaaagggtgatgtcctcgcctgcacgtccagaaccgttggaaacttcctcacagggacaaagccggagctcgggttcatgaccatggacggacaggaggtcttcaagttcgcggtgcggaaggtgccggagagcgtcttggagcttcttaaccggacagggacaaaaaaggaagatattaaatattatgtcctccaccaggcgaacgagcggatcatcgaggcggcagccagacgcctgaaggagccaatggagaaattcccgatgacgatcagtcagtttggaaatacatcaacggcatcgattccgttactgttagacgatatgatccagaaggacatgttgaagcggggcgacaagatcatcatgtcaggcttcggagccggaatgacctggggtgcagtgctcatggagtggtagatat

SEQ ID NO: 2032 - DNA, 4924 bp, Unknown
  gut microbiota DNA sequence
tgggaaactcgcgaagcgtgttttcacttgttatattcacaaattactgtatgaccagaccgcagccattactccagctcaaacgccccggtataaagctgatagtacacgcccttctgcgcgatcagcgtctcatggtcgccgcgctcgatgatgtgaccgtggtcgagaaccatgatcgccttactgttgcggaccgtggaaagacggtgcgcgataacaaagacggtacgtcccatcatcaggttgtccataccttcctggacgagtgcctccgttctcgtatcgatcgagcttgtcgcctcatcgaggatcatgaccggcggatccgcaacggctgctctcgcgatcgagatgagctgtctctgaccctgggaaaggctcgcaccatttccggtgagcatcgtattgtagccctccggtagtctctggataaagtcatcggcattcgccagtctcgctgccgccatacactcctcgtccgtggcgtccagatgaccatagcggatgttgtccatgaccgtgccggtaaacaggttgacatcctgtaaaacgacgccgagagatcttctaagatccggctttctgatcttcgtgatgttgatgccgtcgtaacggatctttccgtccggaatgtcgtagaaacggttgatcaggttcgtgatcgtcgtctttccggcgccggtcgcacctacaaacgcgatcttctggccaggtttcgcataaagagtgatatcatggagaacaagcttctccggtgtgtagccgaaatcaacatcctccaaccggatatcgccctttaacggggtgtaggtgacggttccgtccgccttgtgcggatgtttccatgcccagatgccgttcttgtcgtttgtctccttcaaggttccgtccgcagtccactccgcgcggacaagcgttacataaccttcatccttctccggctcctcatcgatcagagagaacactctggaagctcctgcgagtcccattgcgaccatggaaacctgcatggatgcctgcccgatcgtctgggaaagctgtcttgccattccgaggaacgagacgatgataccgatcgtaaggacaccgtttccgccgaggcttaagtttggcgctccgcagtagacgagaagtccgccaacgatcgccagtaccacatacatcaggttgccgacattgtttaagatcggcatcagggagttaccatagcggtttgcaagttctccgtcggagaacagtttctcatttaacttgtcgaaatccttcttgcactcttcttcatgacagaacacctttacgaccttctgtccctggatcatctcctcgatgaaaccttcctctttcgcgagcgacttctgctgctccatcatatagcgggagctcgcgccgccgaatttcttcgtgaccgtcagcatgagcaccgagaacaggcagaccaggatcgtcatccacacgctgtagtagatcatcatgaggagcatgactgtgatcgtcaaagatgcctggaataccatcgggagcgactgaccgatcatctggcggatcgcgtccgtatcgttcgtgtaggtactcatgatatcgccgtgtgcatgtgtatcaaaatatttgatcggcagggactgcatcttatcgaacatgtccacacgcagatgctttaacgttccctgtgtcacgatcgccatgaggtgcgtgtaggtgaacgccgctgcaacaccgaacgcgtagatcgtgagcatggagaggatcgtctgcatgaacggctgtttcacactttccatgcccgatttcaggcccggaaggatgcaggtatcgatcagccgctgtaaaaataccgtctggacaacggaagccgccgcgctgacgatgatgcagcagatgaccacgatcaggtggatcctgtaattctggaagatatagcggagcaggcggccgaaagtgccttttttcttattgttctgtttttccatatcactctgcctccttgctctttgtctgggaatcattgacttcccggtaaattccgtttaaagcgagaagttcttcatgcgtaccggactccacgatccgtccgccgtccatgacgagaatgcggtccgcatcctgcacggaggagacacgctgggcgatgatgatctttgtggtatccggaagctcattcttaaatgcctgacggatcagggcatcggtctttgtgtcgaccgcagaggtggagtcatcgaggatcaggatcttcggcttctttaaaagagctctcgcaatacagagacgctgcttctggccgccggagacgttcgttcctccctgctcgatgtaagtgtcatagccggccgggaactgggtgacgaactcatccgcctgtgcaagcttgcatgcatggatcagctcctcgtctgtggcgttcttgttgccccagcggaggttatctttgatcgttcccgagaacaggacgttcttctggagaacgacggccaccgcgtcacggagcgcctggagatcatattctctcacatcgcgtccgccgactttgaccgaaccttccgagatgtcatagagacgcgggatcagctggatcagggaagtcttggaggaaccggttcctccgatgatcccgatcgtagcgccggacgggatctcaagatcgatgtccgtgagcgcatatttcttgttctttccggaatagcggaaggaaacatgatcaaactcgatgctgccgtccctcacttccttcgctccgttttccggagatctcaggacactctcatgcgtcaggacctccgcgatacggtcgccggattcctgcgccatgctgcacataacaaataccatggacagcatcatcattgaagacaggatctggacgccatagctgatcagggaggaaagttcaccggtcgagagcgatgttccgccggatccgatgatgagcttcgctccaaagaagcttactaaaagcatcgcaagatagatgcagaacatcatgagcgggttgttcaatgcgaggatcttctctgccatcgtgaagtctttccggacttcctctgcggcttttccgaacttttccttctcgtagtcttcacggacgaaggattttacaacacggatgccgccgacgttttcctggacggaattgtttaaggcatcatacttcttaaagatccgcttgaagatcggatgtacatagaaaaagatgccgaacagcgcgatcgcgaggaccgggatcagtgccaggaagatgaaggacatccggacattgatactcatgctcatgatcacggagaagatcatcatgagcggggcacggactgccatccggatgagcatctgatacgcgttctggacgtttgtgacgtcggtcgtcattctcgtgaccagagaggacgatgaaaacttgtcgatatccgcaaacgcgaaatcctgggttttaaaatagagatctctccggaggttctttgcaagtccgcatccggctgttgccgcggatcttgcggagaggactccaaaacacagggacatggtcgcaaggaccagaagaagcacgccgtactttaagatcggcgtcatggaagttcccgtcatgtcatcgatgagctttgacatgatgagcgggatcgtacattccagcacgacctccatggcaacgaacacgggcgtctcgatggatgcccgtttatactggcgcacgctttttaaaagtgttttaaccatgaatcttacctcgtttccatattatgatttgttatgataaaagttcaaaaggttcggtacagcaggtccgtatccttgcagaaccggctgtatcttcccccttttgtcctcataacggactttctcctttcagataagtcttctgcctcccgctgccggaaagagagcggagtcttatctgactaatctgtatcaggacatgtttcggatcatccggctgatgacgcggaaaaatgtcgcgagatcatcctccgtgatcccctcggtcagccttcgttccgtctcctccagactctcccggatcattccctggtactggagtcccttttccgtcacaacgatccgctttaatctcgcatcgtagggaaccgtttcccggcggatcagaccattcttttccatatcctttaggatttttgtggccgtcggcggccgcaggctgtattcttcctcaacatctttctggaacacatccgtgtccatgcttctcgccagaataaaatgaagcgtttttccctgcgcggggctcagagtgtcgtgaaaagaaaaggtactaaaatgcctccggatcaaattggacagcattccgatacttctgccaacagtttctttcataaatcaaaatcccccttaaaaaagaatgtgccgcagctcattctcgcaccgagcgcgatcgctatcatctttgtctgcatcatatttcagcgcttctttccattctccgctctgaccgtaagaaaatgtgaaaccaaaatcagagttcctgtcgtctccgaccgtattccattgattttattcttagcaaatacttagcaaactaatttgttagcttgctaagtatcataaaacatccatcattaaatgtcaacgaaaaaaatgtgaaaattctgtgaggaaatctgttcatgaaactccatatgggaatgtgaataagagcatataagaatattgtatacaatttgtgcatgtttccgaaaatgaaaaaaatggaaaaaaagacttacgaagtccggaaaaatattgtatactgcgttcacatagagattggaaacgcagtgagatgcacacaaaaagcagtggagtcgcaacgagttttgttgacttcgctgcttttttctgccccttgcagtgagaagcgcatccggcagaaaagccattccatgtgcttttccgatcatgaaaaagaatatgtacgctggcacgtacaataaccaaa

SEQ ID NO: 2033 - DNA, 1776 bp, Unknown
  gut microbiota DNA sequence
ataattttggaagattatgatacttttggaggggtttttatgagccggacaagtatggatatgacgcggggatctttgaagaaacagatcctgtttttcagtattccgctgatgctttcgaatttgctgcaggttctgttcaacatgtcggatattgcggtgatcgggcagtttgcgggggcgatgtctctgggggcggttggttctacgacgacgttgatctcgatgtatacgggatttttgatcggactttccggtgggatcaatgtgctgacggcgctttatatcggggcgaggaaccggaagtcggtttcggagacgatacattcggcgtttcttgtcagcctggcggtcggattgatcctgctgattttgggagtttctacatcgcgcggtgtgctggtgcttttaaatacgaaggaggagctgatcgacaaggccgctctgtacatccggatctatttcctggggattccggcgcttgcgctttataatttcggaaacgcggtgttcagtgcagccggggatacggggcgtccgctgagatatctgtttttgtcggggatcgtgaatgtgatcctgaatctgttttttgtgatcgtctgtaagcttgatgtagttggagtggcgcttgcgagtgcgttgtctcagtgcctttcggcgtttctgatcgtgatggcattgttccggagtcatgaagatttcggactgcatcttgcaaagctccggctttcgaaggataaggcgcaggcgatcctgcggctcgggatcccatctggttttcagaatgcgatcttcggaatcgcaaatctgtttgtccagctcggcgtcaattctttcagtgccgtgatggtagcgggaaattccgcggcggcgaatgcggatgcgctgatctacgatgtgatggcggcgttctatacggcctgcgcgagctttatggggcagaactacggctccggaaacaaaaagcgtgtgcgggacagttattttgtgagtcttgcatattcattcgggatcggacttgcgatgggacttcttcttgtcgtgttcggaaagcagttcctgtccttatttacgaatgatccggaggtcatggcagcgggaatgaagcgcctgacgatcatgggattttcctatgggatctccgcgttcatggactgcacgatcgcggcatcccgggcactcggaaagagtctggcaccgatggttatcgtgatcttgggttcctgcgtattccggatcgcgtgggtctatacggtctttgcgtattttcagacgatcccgtccctgtatctgctctacagctgttcctggtcgctcacggcgatcgcggagatcctgtattttgtacatgcgtaccggagggcgatggagaagatcgcggatacacggagctgatagggggtgttgagcgggagatgattcttgtttggatggctggaagatgggtgatagaaagagcgtaataactcggaatttgtggagagatttcctgaattttccttattttacaggcttttcagcccattatatagtgaaatgatatgtattttcccttatttttgcccttatgcggaatccgcaagggaaatgagggaaatttttgttgcattgcatatcaataattggttcagtgaaccaattttgatttaagcattgctcgctactttatcaagaagtcttgcggaatcccgttttgcttttcttgttgagtgagcgtaaatattcattgtggtactgacatcagagtgtcctaacagttcctgtacatctttc

SEQ ID NO: 2034 - DNA, 17253 bp, Unknown
  gut microbiota DNA sequence
gggaaggaaaaaacatgatctgccaatcggtctataggctttggcagatcacagaaaggctggtatctattaatggaaaatgtaacgtatattgaccacccgctggttcagcacaagatctccatgttaagaaagaagaccacaggaacaaatgagttccgtactcttgttgaggagatcgcaactctgatgggatatgaggcactccgcgatcttccacttgaggacgttgaggtcgagactccgatcgagacctgtatgactccgatgcttgccggtaagaaacttgcgatcgttccgatcctgcgcgcaggtcttggaatggtaaacggtgtcctttccctcgttccgtccgcaaagatcggtcatatcggtctctaccgcgacgaggagactcatgagccgcacgaatatttctgcaaactcccgaatccgatcgagcagagaacgatcgttgtcacagatccgatgctcgcaaccggcggttcagcagtcgctgcgatcgactttatcaagcagcacggcggaaaacacatcaaatttatgtgcatcatcgctgctccggaaggagtaaagaagcttcatgaggcacatccggatgtgcagatctatgtcggccatctcgaccgtgaattaaacgagaacgcgtacatctgcccgggtcttggcgatgccggcgaccgtatcttcggaacaaagtaattgatccgtgaatatccggaacattccggtcttttctcctgagaagaccgcgaatgccaggctttaaacagataaaagacaaaaaccacgatacctgttttttttgcaggcatcgtggtttttcttttaccttttttatttacgcgaacaacgagccaaagtctgcgcttgcgcatgaccttggcgactgtcgcgataacaaggggaaactcgcgaagcgtgttttcacttgtttgccgggacttgttctttttatctgttttcagagaaaacagttattcctgtactttctttgcgatctcgccctgttttttatagatagagttctcatccacacatccgcggacgctggaaagcgggtagatattgcagtttctgccgatcacagtgccgggattcaggacggatccgcatccaacttccacgcaatcgccgagcatggcgccgaatttcttgatcccggtctcgatatcgccgtcctccgcatggactttgacaagcagtttatcggactttacgtttgaagtgatggaaccggctcccatgtgggcgcggtatccgaggatcgaatcccccacatagttatagtgaggaacctgcaccttatcgaacaggatcacatttttgagttctgtggagtttccgacaacagcgccctctccgaccaacgcatttccgcgaaggaatgcacagtggcgaacttccgtgtcctttccgatgatgatattctcaccgagatatgcgctcggcatcacctttgcagacttgtggacccagacggtctctccgcgcttttcatattcatcctccgggagtgtctttccaagctcaaggatgaactctttgatatgggccagtgcctcccacggataggtgaactggcgaaggaagtctgcagcctgggtgtgggaaagatcatagagatccacgatttttgtttcttcttttttcatatcattctccaatctgccgtctgatcagacgacgcaagcgaccgtacccggcgcgagaatgtgccaaagcacattttttacaggcatgttcctgctactttttataaaattgtgccgcagcgtcaaagtaaggccgcagcatataggcattgttcgtctgtttgacgccgtttgtccggagagtcacaaaacgctccagcttttccatatattcatccggcgtgatcgttccctccgccacatacgtcaggcctttttcccagctcgccgtgagttccggatttaagagctgcctcatggatgcctgacagacatcaaagacgatctctccgaggagggtcggcgtgatgacctgggtcttctttgccaacgccagatatttgatgttgaacagctttttcaggatctccgcgcgggtggcgcttgttccgatcccgcttcccttgatctgggcgcgcagatcttcatcctcgatgagctgacctgcgttttccattgcaaggatcatggaaccggacgtatagcgctttggcggggaagtctcgccttcttttatctcaagctttaggagctttaatttctgtccctttttcaacccggagagcatggcaagaagatcctttgctttttcatcatgacccggatccagctcctccgcctgggaatcctgggacacaccggaattttccgctttgctgttaccgctgctttccgccttcttttttgacgggacattcgcaacttccagatatcccgcttccgcgaggaccttgtaggctgcaaagaactgttccccctgtttttcgatccgcagggaaaacttctggtagacggccggcggataaaaaatgctcaaaaaccggcgtccgatcagctcatacacctttgcagccagcggattcaggcttcgcagcgctccgaatccctgaccggtcgggatgatcgcatagtggtcagtgatctgtttatcattcacatattttgtcttcgcgatctgcttccatgttccgctgttaagtgccttcgcggcaaaatccgcgagaggagcaaaattccggagaccgccgatattcttatagatctccttcgatactgcggtggagaggactcgtgcatcggttctcgggtatgtcaccagctttttctcgtagagttcctgaatgatctttagagtctcatccggactgatcttgaacattttcgaacaatcgttctggatctcggcgagattgtataagagcggcggatttttcgtctcttttttccggtccaaagcgagaagtgttccctccatcggatcggcactcaggaaccggatcagctcttccgccgtctttttctccttaaatccattctccttgtagagcgccggtgttccaaaataccgggaaccttccacggctctccactctgcctcgatgactgctgtctcgtgatccgggacatcgaaggagccgatgacgcggtagaacggagtctttacgaattcacggatttcccgttccctgcggacgaccatgccgagaacgcaggtcatcacgcgtcccacagagagcaccgcccgcttttcccggagataggacgccacggacggaccgtatttcagggtgagcaccctggaaaaattgatgcccatgaggtaatcctcttttgccctgagatatgcggacgctgcgagattgtcatactctgcgaggtcctttgcctctctcactccgcgcaggatctcctcctccgtctgggagtcgatccagacacggcgacgtttttttccttttactccggccatctgctccaccaggcggtagatatattctccctcacgcccggagtcagtgcagacatagatcgtgtccacgtccgcccggtttaagagcccgctcacgatcgtaaattgtttcttcacatcgtcgatcacctggtatttgaatgtttttggaagaaacggcagagtttccatgctccagcgtttcagggccggatcatacgcatccgggtaactcatggtcaccagatgtccgacacaccaggtcacgatcgcctgatcggactcgatatatccgtctccttttctcccggaaacctttaacgccttcgcaaattcctgggcaacgctcggtttttcggcgataaataatgcttttcccatgaaacctctttcctagttattttattctctcccaccccagaccgcaattcttcgggatgaaaggatcgttattttttcttctgcggaagctccgacaggattagtgccgcaaacatcagggcgcatccgactaacatctttccggtcagcacatcctttaagaagatcacggaaaacagtgtcccaaacacagattccagggaaagaaggatcgccgatgtggaggcgcttaaatatttctgaccgatattctgtaagagatacgatacggtcgtcgagaaaactgcaaggtacagcaggcctacgatcagagactgattcgccaggaccgcgaaatcaaaggatccgtcgtgaaacggcgcgcagatccagttgatgatggcagccgcaaggatctggatcacggtcagtgcgatcggatcatggtgctccgtgaatttatcgataaataccatatggactgcgaacatcagaccgcacaccagtgtcagaaaatctccgaaattgatcgagaggtcgccctgcagagataaaagtgcgagaccgatgactgcgataaacgctgcagcgatatttcgccctgtcggtctcttttggctgacgatccagtagagaaacggtacaatgatcacatacagggtcgtgataaaggcgtttttgctggccgtcgtgtatttcagaccgtaagtctggaactggtaggacaggcagagaaatattcccaggatcgcgccgcagaggatcgtctggcggtccgctgcgaacagatttttatgaaataatagagcaagcaggaccgcagacatggaaaaacggatcgccagaagatacgtcggcgggatcagatccacagaattcttcatcacaacgaaggcaaaaccccagatcatggtcgtcaggatcagccccagtgatgccaggatcctgacgctgcgttcatttaaatttttcatttttggtcctttactcatgaatatagaaatggtatcctgtcacggatttccactcttttccagcttttacgatcggtgacgggaaatgaggcttgttgactgcatccgggaagttctgggtctcaaagcagaaagcagttctcgcatggtagaaagcacctgattttccgttcccctgctccagccagtttgccgtatagaactggacccccggctgatccgtatagacatccatggctcttccgctttcctcggagaagatctgcgcggaaagacccaaatcaccgcgaacgtgggaaagacaccagttatgatcatagccatgtccctgaacgagctgatcgaaatcttcatcgatccgctctccgatcacatgaaagtccgtaaagtccatcggagttccctttaccggaagaatctcaccggtcgggatcgacgtctcatcggacggagtataaaaatcggcaaggatccgcgcctggtgctccaggacagaaccgccattgtttccaagaaggttaaagtatccgtgatttgtcaggttcacaggcgtatccgcatcggaaagaacgcggtaagtcagtgtcagcgtatcctcgtcagtcagcgtgtaggtgacggatacgatggcgtttcccggatagccctgatccccgtccggacttaagagtgtaaaagtgacgctgttttccgactcttccttcgcattccagagtcttgcgtcgtagtaatcaagaccgctgtgaagattattcggaccgttattgatcgccagtgtgtattcggtcccgttcagggaaaatcttccttttccggtgcggtttgcgatacgaccgacgacggaaccgaagtgcggaccgttctttaaataaccggcagcatcgtcaaaccccagcatcacatcgtccataaccccgtttttgtctggaacgatcatgcggacccagacagcccccagatctgtgacggatgccatcagcccgtttttatttttgatcgtgtagaggcttacttctcttccatccggcatctccccaaaatgctcttttgttactgacatgataatacctcctctgcgtaaaaagagcccgcgaaaaagcgggccccctgtttttattttgctgtgatatatccctgctttgtgagaagctctgcgcagaggactgctccgcctgcagcgccgcggactgtattgtgggacagaccgatgaacttccagtcgtagacggtatcttctcttaaacgtccgatggatacgcccattccgttctcgaaatcgacatccagcttaacctgcggacgattgtcctcttccatgtactggatgaactgcttcggtgcgctcggaagctctaactcctgcggaagtcccttgaagtttacaagtttttcgatgagctgttctttggatgctttctttctgaactttacaaatacagcagctgtatgaccgtttaataccggcacacggacgcactggcatgtgatcaccggctcttttgcctttacgatcacgccgccctctaagtggccccagatcctgagcggctcctgctcgctcttctcttcctcgccgccgatgtacgggatcacgttctcgaccatctcaggccagtccttgaaggtctttccggctccggagatcgcctggtatgtagtagcgactacttcatacggctcaaactctctccatgcactgagggccggagtgtagctctggatcgagcagttcggttttaccgcgatgaatccgcgtgttgtgccgagtctctgcttctggaatttgatcacgtcaaagtgctccgggttgatctccgggatcaccatcggaacatccggtgtccagcggtgagcgctgttgttggatacaaccggtgtctctgtctttgcgtaagcttcctcgatcgcacggatctcttcttttgtcatatcaacggcgctgaatacgaaatcaacggtccttgatacggcatcaacgtcgtttacattcataacgactaaattttttactttttccggcatcggagtcgtcattttccaacggcctccaacagcctcctcatatgtctttcctgcagaacgcgggctggcagccacggtcgtcacttcaaaccatgggtggttttccaggagagagataaatctctgtcctaccatacctgttgctccaaggataccaactctaagtttcttttccatcacacatatctcctcatctttgcctgacagtcatcttcagttgacggcttgccatttttccacccgtcacggacatatgtctccatgtacgcaacattcgtgttgatgtctatcctaactcaaaatgacaaaaaatgcaagcattaaatgacctcaagcgctacgcggatcatatctgcaaaggaagtctcgcgttcctcggcggtcgtcttctctcctgtcaccatggaatcggatacggtcatgatggagagtgcccgtgcttttccgagggcagcgttcgcgtagagagcagctgtctccatctccactgcgagaactcccatatcggcgaactggagtccgtcatgctttttcttttccggctcatagaaaagatccgatgtgaggacatttcctacatggtaaggaagattttcctgctccgcattgaagactgccttgatcagaagaccaaagtctgcgatcggagcgaagtctcccggaagtccgaattccttcacatagtttgtctgtgtgcacgcgcccatggcgaatacgagatcacggatatgaacatcttcggagatcgctcctgtcgtgcctacacggatcagtttctttactccgtatccctcgatgagctcgtgggtgtaaattccgatcgacgggcatcccattcccgttcccatgacggaaacaggtttatcacggtaaaatccggtataaccgaacatatttcttgtggcattaaactgtcttgctcctgcaaggaaattctcagcgataaattttgcacggagcggatcgcccggaagtaagatggaaggtgcgatctcgccttcttttgctgcgatatgaggtgttggtacgttcatggtagttcctccttttttatcgaatgctattcctatatattatattataaccgaactttcgtcccttttccatccctctttgcggcttttaaccgtccgagggcaacttcttttcctttatagtgagcagttccgtcgacatccggcagatagacatgttccagcgcatcttccttttcgagacggatcccgcgaacgccgcggctgttctttttaagttccgggatctccgcgagcgggaattttaagaacattccatccatagtctggagaaccacatctcgctccccgtcgacttccgtgccgatttcccggatctccacaagtttatcatcttcggcgagcttcgttgcgacaacggtcttgtttgccgtcataaattcctcaccgggaacgatctttacggctgcctgggatgtcgcgaacaggaacttgttccctgcaaggccggaagccggaagcataaagagaagtgtctccgtcttgccgtcaaatttgctgacattctcgatcgggattcccttatccttcattttgagtgcagggaactcggcgactttcacctgatacatggttccggtatcagagaacatgcagagtttatcatctgtcatcaccgggaggacgcggacattctcgctgtccaccgtttcctgatttctctcatagatggagcggtccatcgtcttgcagtagccgaagcggtccataacgaagatcacttccctcgctgcttccttcgcctccacatagaccatctcctcgccgtcctcgatgagtgttcttctcggctctgcgaactctgccttgatcgcatcgagatcttccttgatgacaacgtccatgtttttctggttggagaggatatgctgatattcccggatcttccgcagggtctctttatacgctttctggagtgcaaggatctcgaggccgatcagcttatagaggcgcatctcgaggatcgctgtcgcctggcgctcggtaaagtgaagattctttgcatcctcctcaaagcccggcacacggaatctgatcttttcggtatttcccgtcatcaggcattccttcgcgtccttcatgttctttgagccgcggagtacggcgatgatcaggtcgatcacgtcgcaggcctcgatgagaccttcctgaacctctttcttctccagttccttttcgaggagcacattgtacttcttcgtcatattccggtactggaattccaggaacgtatttaagatctgtttgaggttcattgtctccgggcgtccctcatcgatcgccagcatattgacgccgtaagtgtcctccagcttcgtcttcttgtagaggatcgccttgatcttattgacatcggcgtccttcttgagctccaggacgattcggatgccttctttgtttgactggttcgagatgtccaccacatcggtgagttttctcgtctccacgagatcggcgatatcgacgagcagtttgttgatcccggcgccgatcatcgtgtacgggatctctgtgatcacgagcttgtcgcggtccgcttttcttcttccgagctccacctcgatctttccgcggagcttgatctttccggtcccggtttcatagatctgtaaaagatcgctcttgttcgcgataataccgccggtcgggaaatccggtcccggcatatattccatcagttcttccacggtgagaaggcggttgtcgatatacgccttcaccgcatcgatcacttcgcccagattgtgggtcgggatgctggtgctcattccgactgcgattccctccgcgccgtttacgagaaggttcggcacgcggactggaaggacttccggctctttttccgtctcatcgtagttcgagacgaaatccacggtcttatcaagatcttttaaataaacttcttccgcgaacttctttaagcgcgcctcagtgtatcgcatggctgcagcgccgtcaccctcgatcgagccgaagtttccgtgaccatccaccagagccattccttttttgaaatcctgggataatacgactaacgtctcatagatcgagctgtcaccgtgcggatgatatttacccatcgtatcgccgacgatacgggccgatttccggtgcggcttgtcgtggtccagatggagctcgctcatatcatagagaactcggcgctgtaccggctttaaaccgtccctggcatccgggatcgctcgtgaggtgatgacgctcatggagtagtccagatagctcttctgcatctcctccgaatattcggttcgcaatattttttcagacatggtaacttctccttttatgcgtcgatctccgcctcatcggcatgatcatagataaatttctttctcggcgggacatcgcttcccatcagaagctccgtcacctcactcgccatacgggcatcttcgatctccacccgctttaagacacggttttccgggtttaaagtcgtctcccagagctggtccgcgtccatctcaccgagacctttgtagcgctgaagcgtaaagtccccggaatggctccttctgtactcttctaacgccttgtcatcgtacagatagcgctcttccccgcgcttcggaacgaccttgtagagcggcggcatcgcgatataaacgtgaccgtcgtagatcagctccggcataaagcggtagaggaacgtcaggagcagggtgtcgatatggcttccgtccacatcggcatcggtcatcaggacgatcttatcatatttcagttttgtgatatcaaagtcatttccataaccttcagaaaatccgcagccgaacgcgttgatcatcgtcttgatctcggcgtttgccagaaccttgtccatcgatgccttttccacgtttaagatctttccgcggatcggcaggattgcctgaaactgacggtttcttcccatctttgcagaaccgccggcggaatctccctcgacgatgaagatctcacatttcgacggatcacggctctcacagtttgcaagttttccgttgctgtcgaaggagaactttgacttggagagcatgtttgtctttgctttctcctccgctttccggatcttcgcggatttttctgcacaggcgatgatcgcttttaaggtgtcaaggttacggtcaaagaagcgctccagctcctcccctgtcatcgtgaacacagcctttgtcgcatcggcactggcaagttttgtctttgtctgtccctcaaagatcggatccgggtgttttacggcgacaacggccgtcatgccgtttctcgtgtcagcaccggtaaagttgctgtctttctcctttaagatgccgagctccctcgcgtaggagttgatcagctgggtaaatttcgtcttaaagcccaccaggtgggatcctccctcctgggtaaagatgttgttgcagaatccgaggatattctcctcaaaggcgtccacaaactggaatgcgacttccacttcgatctggtctacactgcccttaaaatataccggctcatggatcggttcttttccgtcgttcagttcacggacataagcgacgatcccgtcaggctcatggtaagttacgctttcctcttcgcccgcacgtttatttacatagtgaaggatcagcttcgggtttaagtatgcagattcatgaaggcggctcttcagccactccgccttgaattttgtcttctcaaagatcgttggatccggcaggaagttgatctccgttcccgtctccttcgattttccgatcaccggaagaagaccgtccttcagctcaacgaccggatgccctttctcatattcatcataatatacttttccatctctggaaattttgaccttcatccgttccgacagagcgtttacaacagaagaaccgacgccgtgaagtccgccgctggtcttataggaattgttgtcgaattttccgcccgcgtgaagagttgagaggaccacgcgctctgcggagacgccttttttgtgcatctccaccggaatcccgcggccgttgtcttttacggtacaggatccgtccgcctccagcgttaccgtgatctctgtacagaatccggccaggtgctcgtccaccgcattgtcgacgatttcgtatatcaaatggtttaagcccttagttccaacgcctccgatgtacattccgggacgtttgcggactgcctccagtccttccagtacggtgatactgtcagcattatactgtgctttcgccatgtaaagacctccaattataagtcataaactgcggcagagagcatttccccgccgcagtttcatttttattttcgtggccgctgcataactgctccggccatgtttcgtagtcagcttttcctattatacacttaaaacttccagaattgcaagtgttttctatcgaacatatattcgggaaacgggtaaaaacacgtttcgcgggttttcccttgttatcgcgacagtcgccaaggtctcgcgcaagcgcggactttggctcgctgttcgcgtaaataaaaagcctgcggaagatcccccacaggctgatgtactgaaatttatactccaccgaaccggagtacgatcccgatcacagcggaagccgcgatgaacgctaccgggtgaagtccttttgtttttttacagatcgcggtgaaataatagagcaccacgagaaggacgatgctgcggatactgatcaggtctgtgatctttccgctcgccgcgaaggcgtccttgtgaagaaggaccagggaaaggacggaaaatcctgccgccgcgatcaggcctgtggaggccgggcggagaccgtaaaaggcgttctggacatatttgtttgtcttaaatgcctttaagaagccggcaatgatcaggatcacgatgatcgacggtgtgatcagaccgagtgtggcaatgactgcgccgaccggtccggccgttgtaaagccgacataggttgccatgttgacgcccatcggtcctggtgtggactcggagatcgccaccatatcggcaagctgtccgtaagtgaaccatccggtcttgtcggagatattatagaggaacggcagtgtcgccattccgccgccgatcgcgaagagtccggctttgaaaaattcgaagaataatcggatcaggatcatcatttggaagccacctccttattcttcaggataattccaacaaccgccgcaaaaattacaaatacgatcggggaaagatctgtcagcgcggagccgaggatcacgagcacgcagatcacaagtgtcggcttatcgacaaccgcttttttccagagctttacgaccgcattgaagatcaggacgcagacacagacacggatccccgcgaaagcgttctggacgatcgcaaggtgtgcgaagttctggataaacgctgcgatgaccgtgatgatgatcagggacgggaatacaactcccagggttgcaacaataccgccgatcggacctgcgagtccctgaccgacgaaagtcgctgtatttaccgcgataacgcccggagtacactgtccgatcgcgtaatagtccataagttcttcttccgttgtccatttttttttctcaacgacttctctctggaggatcgggagcatcgcatatccgccgccaaaggtaagaccgccgattctggcaaacgtaaggaagagatcgagtaatcgattcatgtttttctctcctttattttcaaagttatgtattataatagctcaaacaagaaaaaaaggcaaggaaaaggtagcttctctctccttttccttgccttctgacctgaaaaattttcagaaattttgcaaaacaagtctcttccgcattactgaagatctttttccgggatcattccgtttaaaagattcaaaacgacattattgtcgaccaccatgatcatgttggaaccgtcaagctggatataacggtatgtctgatccggatttgcataggttccgacatagactgtgagagatttcttctctccgtttaccgtaagctctgcctggaaggtgttgcgcgtatccgtcgtcaggtctgcatttgtaagttcctgactcaggatatgatagctcgcataatcaaatgccttgaggttgttgatcccgtctgcgatcttcgtcatcgcttccgtatcggagctgctgatggtcattgtctttccatccattgtgatggagacactctgaatatccgatggggagatctgaagatcaagaccgtcacggacaacgagtgtagagtaatcaaataccagggaatccacggtggcagcctttatcgtgtagatcttcttttcatcggaaaggtaataattgccatcggcgtcctgatttccgatatccatggtgatcgctcctttttctccatctgtgatcgtaaccgtatatgccggttcgctcagcccgtaagaagaaagatcactgccgtctgcatccgcgatctcggaaactgcgtggagatttaagaagttccgggccatcgcatcaaatttatcctgattgatcgggatcgcggaatccatggcatccagccatactccgtccttctttttaaagatcatgtcggtgtccgcactggaataatcgaagtcgatcggtgcatttaaggaatatacctcgatatcagcgccggaaaagtcaggttccacggtctcatcacggatctcagcgatttccacctttggagaaccggattcttttgtgccggaagaagaacagccggtaatgcttgcagaaagtgctgcagtcaggagcagtgctcctaataatacatgttttttcatattttgtaatcctctcatcgttaattgttggcaaaactttatttgtgccaactatagcacaccactgtgtactttttgtgaatttgccataccttttctttccaaagcggcaatatccctgatcacgcggtcccatgcggatcatttctgctctatctgtgatcagatttcctccgccgccggaacctcccgcaaaaagtggatccggtccgagaccttttccccgaacgcagtcgtgtagatatcccgatactcctcataggagcacggcattccgttcgacagcatctccatctcggttccccagagatcgatatcgtagggcagcatcgtgaacccgttccggagatagaacttcttccggcgtgtacgaaggaaaagttcctcctcatccacacattttgtactctcgatctcgatgatgagccgcatgccctgatatttctcgcgaagcgccctaagcgctgcggatcccacgccatgtccgcgcgcctgatcagcgatcgcaaaataatcgagcaggacgcggtctcctgctttcgccatgatggcgagaccgagaaatccgttattctcctcgatcgccaagatctcgacaagtcctgtctcctgaccggcggtgatcatggaaaacggctttttctcacatgccgggaaggcggtctcatagagtgcatggacctcctccaggcgctttcctgaaaacacctgtttcagttcgatcatcatagattctttcctcttactttcaatcatcgttgctgcccggcaccattgggtccaggcggtttatttttcgttttctccgctctcgaacatcaggcggaacaggcgttttccgccctccgtccggaaattccggataaatacgtttttctgcatatccggcgtggagccgtcctcaaagaggttgacaaggaaatccgcctccacgaggatctggtaatccattccgtcgatgttgtcgtaggtatggtggtgccccacgagatagcagacgcggtcaatgacctcctgcggccaggaaagcgccgtgagcatcgtccgtgcctctcccggaccttccatctcctgatattttccggtattccgtccatatttctcttctgccttgtgaattccgatatcatgaacgatcgctgcggcctccaggacctcctgggtgtatggatcaaggttctccgcgagaccgatcagtctcgcaaactcatgcacctttaaaaagtgctggatccgtcgtacatccttatcgtcatagcgtgtcatttcatataagagttcatcaagtctcgtcatgtgtgtcattctcctctttttctataaattcagcttctcgtacttctcttccataaaacggtcaagccgctttttcagttcccggttttcttcctcttccaggttctcatccctcgccagaagccggttcacatcctcggacacctttttcagtgtcacggcatccgtatagatatccgccagctggaattcgagatcgccgctctggcggatcccaaagagatcccccgggcccctgagtttgagatcctcggaagcgatgtaaaagccgtcgttggatttatttaggacctccagacgccggttcttctccttgtttccggacgcgttgaccatgatgcagtaggactgcttgtctccgcgcccgacgcgccccctaagctggtggagctgtgcaaggccgaaccgctctgcgttctcgatcatcatcaccgttgcgttcggcacattgacgccgacctcgataacagtggtggagaccaggacctggatattccccgcggcaaattcttccatgatcttattcttctcttttcccttcatctttccgtggaggtattcgacccggatccccggcagattttcccttaaagccttcgtgtagtccaggacattctccgcctcgatcatttcgctctcctccaccatcgggcagatcacatacgcctggcggccgttctttacctcgttttcgataaaacggtaggcacgcgggcggtagctcttgtcgaccacgcagtttttgatcgggaggcggtttgccggaagttcatcaattacagagatgtcgagatccccgtacaggatgatcgccagggtcctcgggatcggcgtcgcgctcataacgagcacatgcggcatctgtcccttatttccaaacatttcacgctgggcaacaccgaaacggtgctgttcatccgtgatgacgagcgccagattgtcatagacgaccttctcctggatcagggcatgtgtgccgatgatgatatccgcctcatgggacgcgactttttcataggcaagccgtttttcctttgccgtcatggatccggtgatgagaatcactttcttttcgactccatgtgcggcaaacaattccgccacagactcatagtgctgtctcgcgaggacttccgtcgggaccatcagcgcgccctgatacccattttcacagaccgccaggagtgccaggaccgcgatgatcgtcttgccggaaccaacgtctccctggatcaggcggttcatgacggagccgctctttaagtctcccagcacctcttccagggtcctcagctgggcattcgtgagcctgtacggcagatctttcaggagccttcggcattcttcctgcttttccacatgaaac

SEQ ID NO: 2035 - DNA, 7818 bp, Unknown
  gut microbiota DNA sequence
cattacaatatgtaatgtcatagtgttccacctatgttgggctgctctaggatgaacgcacagaaaattctgttttgcgttccgctgtagattagtaacaggaggtaaaaacaatgaagaaagcgattttagctacaaaagtcggaatgactcagatcttcaacgatgaaggcgttcttgttccggtaactgttcttcaggctggtccgtgtgtagtgacacaggttaagacagaggagaacgatggatacaaagctgtacaggttggctttgtagataagagagagaaacttgtaaacaagccggtaaagggtcacttcgacaaggctggcgtatcttacaagagattcgttagagagttccgttttgagaattctgaagagtataacgtaaaagacgaaatcaaagctgatatcttcgctactggcgataaggttgatgcaactgctatctccaaaggtaaaggtttccagggcgctattaagagacttggacagagcagaggaccgatggctcatggttctaaattccatcgtcatcagggttccaatggttccgcaacaactccgggccgcgtattcaagggcaaaggcatgccgggtcagatgggtaacaagaagattaccactcagaacctcgagattgtcaaggttgacgttgagaacaacctgatccttgttaaaggcgctgtaccgggaccgaagaagtccttagtaacattaaaggaaacagtaaaggctaacaaataagcttttacaggaaaggaggaaacagaaatggcaaacgtatccgtatacaatatggaaggtaaagaagttggcacaatcgagctgaacgacgctgtatttggcgttgaagtgaacgagcatctcgtacacatggctgttgttgcacagcttgcaaataaacgtcagggaacacagaaagcaaaaacacgttctgaggtttccggtggcggcagaaagccgtggagacagaaaggaacaggtcacgctagacagggttccacaagatctccgcagtggacaggcggcggaatggtattcgctccgactccgagagattacacaatcactcttaacaagaaagagaagagagctgctcttaagtccgctcttacaagcagagtaaacgagaacaagttcgtagttgttgacgagttaaagttcgacgagatcaagacaaagaacttcaaggctgttatgaacaacctcaaagtttccaaggctcttgttgttcttgctgacaacgatcagaacacagttctttccgcaagaaatatcccggaagttaagacttcccttgttaatacaatcaatgtattcgacattctgaaatacaacactgtagtagctactaaggctgctgtagcatctatcgaggaggtatacgcataatggcaaacgtacagtactacgacgtaatcctcaaaccggttgtaactgagaagagcatgaacgctatgagcgagaagaaatacacattcctcgtacatccggaagcaaacaagaccatgatcaaagaagctgttgagaaaatgttcccaggaacaaaggttgacagcgtaaacacaatgaacgctgacggtaagaaccgcagacgtggcatggtagtaggcaagactgctaagactaagaaagcaatcgttaagcttacagcagacagcaaagatatcgaaatcttccagggtctgtaatttttgaaactatgcggcaaccaaagccgcgatacgaaaaatagaaacgccagaaggcgttgaaaggagtcagaaatgggaatcaaaacctataacccatatacaccttccagaagaaatatgacaggttctgatttctccgagatcacaaagacaactccggagaagtccttagtagtttctttaaagaagaacgctggtcgtaacaaccagggtaagatcaccgttagacatcagggcggtggaaacagacagaaatatagaatggttgacttcaagagaaattccaaagacggaattcaggcaactgtaatcggtatcgagtacgatccgaacagaagcgctaacatcgctttaatctgctacgcagatggtgagaagtcctacatccttgcaccgcagggccttacaaacggcatgaaggttatgagcggcgagcacgcagaggctaaggtcggcaactgcttaccgttatccttaattccggttggtgcacaggttcacaatatcgagcttttcccgggcaagggcggccagatggttcgttctgcaggaaacgctgcacagttaatggctaaagaaggaaaatacgctacacttcgtttaccgtccggcgagatgagaatggttccgatcgagtgccgcgcaacaatcggtgttgtaggcaacggcgaccataaccttgttaagattggtaaagcaggtagaaaacgtcacatgggtatccgcccgacagtccgtggttccgttatgaacccgaatgaccatccgcatggtggtggtgaaggtaagactggtatcggccgtccgggtccgtgcacaccgtggggcaagcctgctcttggtcttaagactagaaagaaaaacaaacagtctaacaagttaatcgtaagaagaagaaatggtaaggcgatttcataatcgataggaggtaaaacgatggctcgttcacttaaaaaaggaccatttgcagacgctagcttactgaagaaggtagacgctatgaacgaggcaggacagaaacaggttatcaagacctggtcccgccgttctacaatcttcccgcagatggttggtcatacaatcgctgtacatgacggcagaaagcatgtaccggtatacgtaacagaagatatggttggtcacaaacttggtgagttcgttgctacaagaacttacagaggccacggcaaagacgagaaaaagtccggacgtaaataatagatacgctttgaaaggaggttccagtaatggctaagggacatagaagtcagattaagagagagagaaatgcccagaaggatacaagaccgtctgcaaagctgtcttacgcaagagtatccgttcagaaggcttgtttcgtattagatgccatcagaggcaaagatgttcagacagcacttggtattgtaacttacaatcctagatatgcttccagcttaatcgagaaattattaaaatctgcaatcgcaaacgctgagaacaacaacggaatgaacgcagagaacctgtatgtggaggagtgctacgcatctcagggaccgattatgaagagagtaaaaccgagagcacagggtagagcttacagaatcgaaaagagaatgagccacatcactatcgtgctgaacgagaaataataggaggcagttatgggacagaaagttaatccacacggcatgagagtcggcgttatcaaagactgggattccagatggtacgctgaagctgatttcgctgacaacctcatcgaggatcacaaaatcagaacttacctgaagaagagattatacagcgccggcgtttccaagatcgaaatcgagcgcgcatctgatagagtaaaaattatcgttttcacagcaaaaccgggcgtagttatcggtaagggcggatctgagatcgagaaggtcaaagctgaagttcagaagatgactgctaagaaggtatttgtagacatcaaggaagttaagagaccggaccgtgaagctcagctcgttgcagagtctatcgctcagcagcttgagaaccgtgtttccttccgtcgtgctatgaagtccacaatgtccagagccatgaaggctggcgttcttggtatcaagactgcagttggcggacgtcttggcggcgctgatatcgcacgtacagagttctacagcgagggaacaatcccgcttcagacattaagagcagatattgactatggtttcgcagaggcagatacaacttacggcaaacttggcgttaaagtttggatctacaaaggcgaggttcttccgactaagggaaataaggaagggagcgataaataatgttaatgccgaaaagagtaaagcgccgcaaacagttccgtggaactatggccggtaaagctttaagaggaaatacaatctccaacggtgagtatggccttgttgcccttgagccgtgctggatcaaatctaatcagatcgaggcagcccgtgttgccatgactcgttatatcaaacgtggtggtaaagtttggatcaagatcttcccggacaaaccggtaacagctaaaccggctgagactcgtatgggttccggtaagggcgctcttgagtactgggtagcagtagttaaaccgggccgtgttatgttcgaaatcgctggcgttccggaagaaacagcaaaggaagctcttcgtcttgctatgcacaaactcccgtgtaagtgtaaaattgcttccaaggcagatttagaaggcggtgataacagtgaaaactaataagtatgtagaagaattaaaagcgaaaaccgctgcagagttaaatgaagaattagttgcagcaaagaaggagctcttcaacctgagattccagaacgcaaccaaccagttagataacacaagcagaatcaaagaggttcgcaagaacatcgcaagaattcagactgttatcacagagaaggcaagagttgctaactaatcccgtatcggtgaagaacccccaaggcatacttgcgggttgaacagctgtcgttatgacacacgccgatgcgtgtaacaaatcgattttgaaaggagattatccgtcgtggaaagaaatcttagaaaaacacgtactggtaaggtagttagcaacaagatggacaagacaatcgtcgttgctatcgagaaccacgtaaaacatccgttaatcggaaagatcgttaaaaagacatataaattaaaagctcatgatgagaaaaatgagtgcaatatcggcgacacagttaaagtgatggagacaagaccgttatccaaggataagagatggagacttgttgaaatcgtcgagaaagcaagataattgattcgaggaaggagtaacaggcatgattcagcaggaatccagattaaaggttgccgataatacaggtgcaagagaactgctttgtatccgcgttatgggcggttctacaagaagatatgctaacatcggtgatgtaatcgtagcctccgttaaagaagcaacaccaggcggcgttgtaaagaagggcgatgtagtcaaagccgttgtagttcgttctgtaaaaggcgcacgtcgtaaagacggttcttatattaaatttgatgagaacgcagcagttatcatcaaagatgacaagactccaagaggaacccgtatttttgggccggttgcaagagagcttcgtgagaaacagttcatgaagatcgtatctctggctccggaagtattataaggaggtgccaggtaatgcataaaatcaaaaaagatgatatggtaaagatcatcgcaggtaaagataaagataaaactggtaaagttctgagcgtagataccaagaagaacgaagttgtcgttgaaggctgcaacatggtgacaaagcacaccaaaccgagccagacaaaccagaacggcggaattgttcatcaggaagctccgatcgatatctccaacgtaatgctgttcgttgacgggaaagctacaagagttggcttcgaagttaaagacggtaaaaaagtccgcgttgctaaggcaaccggtaaagtaattgactaatagcagagaggaggaaacacaagttggctagattaaaagaaatgtaccagaacgagatcgttgatgcaatgatcaagaaatttggttataagaatatcatggaagtgccgaagctcgacaagatcgttatcaacatgggcgtaggcgaagcaaaagacaacgcgaaagtccttgactctgcagttcgtgaccttgagatcatctccggtcagaaggcagttcttacaaaggctaagaagtctgtcgcaaacttcaaactcagagagggcatggctattggatgcaaagttactcttcgcggcgagaagatgtacgagttcgctgatcgtctgatcaacctcgctcttccgcgtgtacgtgacttccgcggtgtaaacgctaacgcgttcgacggcagaggtaactacgcactcggcatcaaggaacagttaattttcccggaaattgaatatgataaagttgacaaggttagaggtatggacatcatcttcgttactaccgctaagactgacgaggaagctcgtgaacttttaacattattcaacatgccgtttgcaaagtaattaggaggagtaaccatggcaaagacttcaatgaagattaaacagcagcgtccggcaaagttctccacaagagaatacaaccgctgcagaatctgtggtcgtccacatgcatatctgagaaaatatggcatttgccgtatctgcttccgtgagctcgcttacaagggcgagatcccgggcgtaaagaaggcaagctggtaggatttagctgcttaaaaggcgtcagaagtcaggtgggaaacggcgagttcccccgcctgaccgtgcagtgaagcgcctgacaagctgactggtcccgttcttcgaccacagggaaaagaacttccctatacatcgtaacaacgcctatacggaaaacttgttttccccaggccgaacaacattcctgtgcagcgcgaataattcgcgaaccacagtgacaaaccaacaacccattaggaggaaatataatcatgactatgagcgatccgattgcagatatgcttacaagaattcgtaacgcaaacactgctaaacacgatacagtagatgttccggcttccaagatgaaattagctatcgctgatatccttgtaagagaaggttacatcaagaaatatgacatcgttgaggatggtgcattccagacaatccgcatcaccttaaagtatggcgcagacaagaacgagaagatcatctccggtatcaagaagatctccaagccgggcttacgtgtatacgctggcaaggaagatatgccgaaggtacttggcggacttggtatcgctatcgtatccacaaaccagggaatcatcactgacaagcaggctagacagcttggtgtcggcggagaagttcttgcgttcgtttggtaattattgatgttatcgcaccccgcctgcaaagccggatttaagatctggaagggcggagtttgcgtgcgtctggagacaacttcagactatatataacatagaaactgaaaacagagagtgtaaaagcactttccgagaatctaagtaggaggtaaaaggcatgtcacgtattggtagaatgccggtagcgattccagcaggcgtaactgtaacaatcgcagagaacaacaatgtgaccgttaaaggtccgaagggaacactggtaagagatttaccggtagagatggaaatcaaagaagaagatggacacatcgtcgtaacaagaccgaacgatttaaagaagatgaaatctttacacggtcttacaagaacgctaatccataacatgatccagggtgttactgaaggctacgagaagaagcttgaggtaaacggtgttggttacagagctcagaagcagggcaagaagctcacactttcccttggttactcccatccggtagagatggaagatccggaaggtatcgagactgttcttgatggacagaacatcatcatcgttaagggcatcagcaaagagaaagtcggccagtatgcagctgaaatcagagagaagagaagaccggagccgtataagggcaaaggtatcaagtacgctgatgaggttatcagacgcaaagttggta

SEQ ID NO: 2036 - DNA, 7779 bp, Unknown
  gut microbiota DNA sequence
gtgtaaaaatggttagcaagcagtcaagaagcgaaatccgcagaaaaaaacactatagattacgcaatcgctttgctggtacagcagagagaccgcgtttagcagtgttcagaagcaataatcatatgtatgctcagatcatcgacgattccgttggacatactttagtatctgcttctactcttgagaaagagatcaaagcagagttagagaacacagataccgttgatgcagctgcatatatcggaaccgtagtagctaagagagcaatcgagaaaggcatcaaagaggtcgttttcgatagaggcggtttcatttatcagggtaagattcaggcattagcagatgcagcccgcgaggctggtctcgtattctaatagagaggagaaaacagcatgaagcgtacaatcattgacgcaagtcagttagagttaaatgacaaagttgttgccattaagcgcgtatccaagactgttaaaggtggacgtaccatgagattttccgctctggtagtagtaggagacggcaatggtcacgtaggcgcaggccttggtaaagcaggtgaggttccggaagctatccgtaagggtaaagaggctgctatgaagaaccttgtagagatcccgatggatgagaacaatagtatcccgcatgacttccttggagagttcggaagcgcttccgtacttcttaagagagctccggaaggtactggtatcatcgctggtggtccggttcgttccgtagtagagcttgcaggcatcaagaacatccgtacaaagtctttaggttccaacaacaagacaaacgtagttctcgcaacaatcgagggtcttacaaaattaaagactccggaagaggttgctaagaaccgcggcaaatctgttgaagacgttatttgctaataggaggataataaaatggcagagaagttaaaaatcacattagtaaaatcccctatcggcgctgttccgaagcagagagcaacaatcgaggcacttggtttaaagaagatgcacaagactgttgagatgccggataatggtgcagttagaggcatgatccagaatgtcagacatctggtaaaagttgaagagatctaatagatataagtaaggaggtgcagtgatgaacttatctaatttacatcctgctgaaggatctaaacacagtgatagtttcagaagaggtcgtggacacgcttctggaaatggtaagacagctggtaagggacataagggccagaaggcacgttccggcgcaccgagacctggtttcgagggcggccagatgccgttatacagacgtcttccgaagagaggatttacaaacatcaactccaaggagatcgttggaattaatgtaagcgcattagagagatttgagaatgactccgtagtatccgttgagacattactggagacaggtgtgatcaaaaacccgcaggacggcgttaagattcttggtaacggagagttaacaaagaaacttgtcgttaaagccaatgctttcagtgaaggcgcaaaagctaaaattgaggcagtaggtggaacctgcgaggtgatctaatatgctaaaatccttacagaaggcatttaaggtgaaagaagtccgcgacagacttctttacaccttcatgatgcttgtagtcatccgaatcggctgttgtcttccgattccgggcgttgatcccagctatctgcatgatttcttttccaatctccagtcatctggaatgggatttttcaatgcgatcacaggaggatctttctcctccatgtcgatctttgcgctgagcatcaccccgtatatcacatcgtccatcatcatgcagttgcttaccattgcaattccgaaacttgaggaattgcagaaggatggtgaggacggaagaaagaagatcgcagagtacaccagatatcttaccgttggcctggctcttttcgagtcctgcgcaatggcagtcggccttggcggtaaaggacttcttctcgaagatcaccgcaatgtctggggatacctcacggttgtagcagctatgaccgcaggttccgctcttctgatgtggattggcgagaggattacagacaatggagtcggaaacggtatttccatcgtacttctgatcaatatcgtatctggtactccgcaggatatgataacattatatgagcgctttatggcaggcaaatcagttgcagttgcaacagtagcatgcattattgtactggcgatcatcattgcgatcgttgtcttcgttctcgtcttaaatgatgcggagcgcagaattccggtacagtacagcaagaagatgcagggccgcagaatgatcggcggacagtctacctacattccgttgaaggtaaacaccgcaaacgttattccggtcatctttgcttcttccatcatgtccatgccggtcatgatcgctcagttcttccacgtagattattcaacaatcggtggaaagatcctgttagcactgagctcatccaactggtttaaaccggaagctccggcttactccattggtttgctcgtatatatcgtattagtcgtactgttcgcgtatttctatacgtccattacgtttaacccgctggaagttgctaataatatgaagaaatccggcggctttatcccgggcatccgcccaggtaagccaacttcggactaccttaacaatatcttaaactatattgtatttattggagcctgcggtctggtgatcgtgtgcattatcccgatcatcgcatccggtctcttctccgttggtaatctttccttcggcggcacatccctgatcattattgcaggtgttatcctcgagacgatcaaggctgtggagtctttaatgcttgtaagaaattacaagggattcttaaatgactgatttgacagagaaatagcagcagctgcgtgctgaaaatcggagcgggcggaaagatgcttttcgcccgctttttcggttttttaggacgagtggaggaaataacaattatgaagatcattatgttgggcgcgccgggtgccggaaaaggaacccaggcacagagaatcgcggaaaagtacggaatcccgcacatttctaccggagatatcttccgggctaatatcaagaacggaacagaacttggaaagaaagcgaaagcattcatggaccagggacttcttgttccggatgaactgactgttgaccttgttatggacaggatcagccagccggactgcaaagagggatacatcctcgatggattcccgcgtacgatcccgcaggcagaggctctcacagaggctcttgcgaaaaagggagaggcgatcgatttcgcgatcgatgtcgacgtaccggatgagaagatcgttacccgtatggcaggccgccgtgcatgcataaagtgcggaatgacctatcacatcgtatatgctgctccgaagaaggaaggcatctgcgacaagtgcggcgctgaactcgtcttaagagatgatgataagccggagactgttacaaaacgtctggctgtttaccatgagcagacacgtccgctcatcagcttctatgcggataagcacgttctctacactgtagacggaacacagaatatggaacaggtatttgaggctatcacaaagattttaggagcttaaaagaatggcagtaacaattaaatcgccgagagagatcgaactgatgcgaaaagccggagaaattctggcgcaggtacacgaggagctgcatgcagccgttcacccgggaatgtccacgatggacatcgacaagctgggagagcgcctgatccgcagccatggatgcattccgtcctttaagaattataatggatatccggcatccatctgcgtgtccgtaaacgatgagatcgtacatggtatcccgaataagcaccgcattttaaaggaaggcgatatcgtcagccttgacgcgggaacgatctataaaggataccattccgacgcagcccgcacctgggcagtaggaaacgtctccccggaagcacagaaactgatggatgtgacaaaacagagcttttacgaaggtattaaatttgcaaaagcaggcaatcatctgaatgacatctccacggcaatccaggcatatgccgagaaattcggctatggcgttgtccgcgatctggtaggacatggaattggtacccaccttcatgaagatccggaggtcccgaacttcgcaacgaagaaaaaggggatccttctgcagccgggcatgacactggcgatcgagccgatgatcaatgcaggtacaccggatgtaatctggatggacgatgactggaccgttgttacagcagatcatgccctgtccgctcactatgagaatacgatcctcatcaccgagggcgagccggagatcctctccctgcgtccgggccttgaataggaggccccgcatggagatgaccccgggattcctggcgagatcacttgccggaaatgacaaggataaaatctatgtcataacggaggaccttggaacatacgtttctctgcttgcagaaaacggccgggtcctccggaaaaataagaagcatgtccagatcattaagaaagcaaacaggaggtaaattttatgtctaaggctgacgtaatcgagatcgaaggcgttgttgtagagaaactgccgaatgccatgttccaggttgaacttgaaaatggccacaaggttttagcaaccatcagcggaaaactgcgtatgaactacatccgtattcttccgggagacaaggtaacattagagatgtccccatacgatttatccaagggacgtatcatttggagagataaatagtatctttgaggacgggcagaaaaaagttgaagaaaaccagcaaaaatgcttgattttcctgtaaggaagtgttataatgctcaagcgaactttgttggaacgcttgtattatgcccattttcaggtgctttttatacaggtatagcaacccgtaatgccgtttccaaatggcacggaatcggtgtgtttccggcagtaagggaagcggactacgaaggaaaggagaattactgtgaaagtaagatcatcagtaaaaccgatttgcgagaagtgcaaggttattaagagaaaaggcagtatcagaattatctgtgaaaatcctaagcacaaacagagacagggctgatgccgcatatttgcctgtattttttcgcgcggctttgacatgaaacgcgagagtgcgttgtcgtgtcggcaataactatttctacaatatttaaatggaggtaccactcatggctcgtatttcaggtgttgatttaccaagggaaaaacgtgtcgaaatcggcttaacttatatctacggtatcggtagagcaagtgcagaccgtattcttgctgcggctggtgtaaatcctgacactcgtgtaaaggatttaaccgatgacgaagtaaagaacattgcagcagtaatcgctgagactcagactgttgaaggtgacttacgtcgtgagatcgctttaaacatcaagagacttcaggagatcggatgctacagaggtattcgtcacagaaagagtcttccttgccgtggtcagaagaccaagacaaacgcaagaacatgcaagggtccgagaaagactgttgcaaacaagaagaaataataatcagtaacaaatgttatgaatcacgttgcatgttttaaaaacaggaaacagggttcagtaaatgagaaagtaggttagtttaaaatggctaaaaaagtgtccactgctaaaaaagtgacaaaaaagcgtgtaaagaaaaacgttgaacgcggacaggcgcatatccagtcatcttttaacaacacaatcgtgacattaacagatgcacagggtaatgccttatcttgggcaagtgcaggcggtctgggatttagaggttcaaggaaatctactccatatgcagcacagatggctgcagaaactgcaactaaggcagctcttgtacatggtttaaaatccgtagacgttatggttaaaggaccgggatcaggccgtgaggctgctatccgtgcccttcaggcatgtggtcttgaagtaacaagcattaaggacgtaacaccggttccgcacaacggatgccgtccgccaaagcgtagaagagtctaattaggaggaaataaaatggcagttgatagagttcctgttcttaaaagatgcagatcccttgaccttgatcccatttatttaggaatagataaaaaatccaacagagaatctaagagagcaaacaagaagatcagtgagtatggtcttcagttaagagaaaaacagaaagctaagttcatctatggcgttctggagaagccgttccgtaactactacgataaggctgagcgtttaaacggacagacaggtgaaaaccttatgatccttcttgagcgcagacttgacaacgttatcttccgtcttggtttcgcaagaacaagaaaggaagccagacagatcgttgaccacaagcacgttcttgtaaacggcaagtgcgtaaacatcccgtcctaccttgtaaaggctggcgatgttgttgagatcagagaaaagaacaaaggcgacaaccactacaagctggttctcgagaccacagctggccgtcttgttccggcatggttagagtctgaccatgagaacttaaagggcgagatcaaaactcttccgacaagagaagaaatcgacgttcctgtaaacgagatgctcatcgtcgagttatactccaaataattcaccggagcggtttttacaaagtatctggccatttttcggccggatgctttgtgttctaaaatgctccgtggcatttgtcaaagcatacccaaaaggaggggctttttgtgttcgattttgagaaaccaaacattgagattgctgagatttccgaagataaaagatacggaaagtttgtcgtagaaccgcttgagaggggttacggcacaactctgggaaattccctgagaagaatcatgctttcttctttaccgggttctgctgtcagccaggtgaaaattgatggtgtacttcatgagttcagctccatctccggcgttaaggaagatgtaactgagatcatcatgaacatcaagagcttagcaattaagaacaacagcgatacaaacgagccgaagactgcgtacatcgagttcgagggcgagggcgtgatccacgcatctgacattcagacagatgctgatatcgagatcctcaacccggatcaggtgatcgcaacattaagcggcggtgcagacagcaagttctacatggaacttacgatcaccaacggccgtggctacgtgagcgctgataagaacaagagcgacgatcttccgatcggagttctcgctgtagattccatttacacaccggttgagcgtgtcaacatgtccgttgagaacacccgtgttggtcagcagacagactacgataagctcacacttgagatctacacaaacggaacacttgatccggacgaggcagtcagccttgctgctaaagttttaagcgagcatctgaatctcttcatcgacctctctgagaatgcaaagactgcagaggttatggttgaaaaggagaacaacgagaaagagaaagttcttgagatgaacattgacgagctggagttatccgttcgttcctacaactgtctcaagagagccggtatcaataccgttgaagagctttgcagccgtacatctgaggatatgatgaaggttagaaaccttggtcgtaagtccctcgaggaagtacttgcaaagttaaaag

SEQ ID NO: 2037 - DNA, 2075 bp, Unknown
  gut microbiota DNA sequence
atccacaattagagtagtggataattccggctatttcattttttgtgggggtatgttatgatatttcaaggtgaaaagagagaatgagtgtgccggaaaatgcggtgctgcccggaagaactgaaaatatgagacgtaagtgaccgatggggagaacaaccgacagggcagcaggtggatatatcaggcagatttgaaatggaacgtgaacataaagggtgaagtaagaatgggtttaggctataaaaataacatcaatacggcggtaaccgccgtatccaacacatttatcgacgaatatatggggacagccagcggagaatatgtaaaagtgtacttatatcttctgcgccacgccggggaaaatgtggagatcccggatattgcagaggcattgaatcatacggaggcggatgtccgccgtgctctggcttactgggaacgcgccggtgtgcttgcatcggagaaagaagaaccggcggcgggcgaagctgcggttacgagagaggatctgacagacgccggctacataaccccagaatcccggagaagttacggggattctgatatggaaggaagaatgccggaagagagtgcagctgacagcgggaaacaactgcagggcagcgaacgcggtatggcaaagcagcccggaacgatggatatcccggatgccggaaacagctacgaccgtatgaaacgcttatccgcggatgaggaattttcggctcttctctacgcggtccagcagtacctcggaaagaccttcagcgccatcgagtgtgagaaatttgcttatttctatgatgttctccatatgtcctgtgaacttttggagtatctggcggaatactgtgccgagggcggacacaccagtatccgatacatcgaaaaagtggcattgaactggtatcaggccgggatccatacccgtgatgaggcgcgggaacactctgtgaggtactcgaaagatacctccgcagttatgaaggcgttcgggatcatgggccggaatgcgggaacagcagaacaggaatttatacgccgctggtttaaggaattcggtttcgattccatgctcgtcacggaggcatgcaacaggactctcacagccacgggatcggcaagttttccatacgcggacaagatcctcgccggctggaaggaaaacggtgtgcggaccttacaggacgttgagaccttagataaacgccgtcaggagaaacaggcaaagaaatccggcccggcatcgagacagacccggaacacatcgacgaaccggttcaacaactttgaacaacggtcctacaattacgatgattatgtctgggatgatataaagaacagaaaataaggaggcagtgcggatggcactcagtaattcccagtacgatgcgatcatgcgtgtctacaatcagagacagtttcaggacaagcgtgagcaggataagcggatcgcggaagtgtacgagaaagttccacaggtagaggcactgtccgacgagatcgcggcgactatggctcaggcggcgagaaagattctcgccggtgaccgcgcggcggcggatcagttgaaaaaagacgcggaatttctaaaagagcagaaagcaatctatttaaaacagaacggatatccggcaaactatctggagctccagtatgtctgcccggactgtaaggatacgggatacgcggacggaaaaaaatgccactgcttcaagcatatggagatcgagatcctgtacgaccagtcgaatatccgcgaagttctggaacgggagaattttgacacactttccatggcatactatgacagaaatcatgtggacgaaaagacaggaatgaccgtctacgactatatgtccagagtgatcagggaatgtaaggaatatgtggaaaactttaaaaatgagaaaggaagtatcctgttcaccggaaatacgggctgtggaaagacatttctgagcaactgtatcgcgcgggagctgatccgaagatatttttctgtggtctatctcacggcaacggatatgttcgacattctggcaggaagccgcttcagtggaggcgatgac

SEQ ID NO: 2038 - DNA, 3966 bp, Unknown
  gut microbiota DNA sequence
cctgaggttttatgaaggtcctatgccgctgctgccgttgccttctttgcagctgctttctgaaatacaaatacaactgcgcagatcacgatacctgcgatatctgtcacaagaccgctgtcgatcaggagataagcgccaatgaggctggcaattctcaatacgatgttgacctttgtgaacaggaagccttcgactgctgtactgattaagaatacaccaactgcagcagttactgcaacctgaatcgcttttgcaagcggagtatcaagcagcagaaggtctgtattgtatacaaacatgtacggaagaatgaatcctgcaagcgcaagctttacggatgcccatcctgtcttcatcggacttccgcctgcgatacctgctgccgcaaaagctgcaagggcaaccggcggtgtcaggtttgcgaacattgcgaagtagaaacagaacatgtgggcaaccagggccgggataccaagctgtaccagagccggagctgcgatcgtggatgtaatgatataggacgggatactcggaagacccatacctaagatcatgcaggtgatcattgtgaataccaatgtgaacatcaggctctttcctccgatgctgatgatggtatttgccatattcagggcgaaacctgtgatagagcaggaaccaacgataataccaacgcaggcgcaggcgatcgctacggatacggtagacttcgcgctcgctaccatcgcatcaagaatatcctggaaggtcattctcgtattctttctgcactgtgccacaatgatcgtgaatacgatcgtatagaacgcagccatgataaccgtctttccggagaagaacagcatgtaaacgaggaagatgatcggaagtgccagatgaccatactccttcatgacctgggacatcttcggaagctgatccttcggggttccctgcattcccatcttctcagccctcatctggatctggaacaggatgcccatgtagtagataactgccgggatgatcgcggataaaagaagttcgttgtacttcatgccaagagtatctgccatgataaatgcggcagcacccataaccggcggcatcagctgtccgccgacagaaccggtcgcaacaacggcacctgcgaactcgtcgtcatagccggattttttcataagcgggatcgtgaaggaaccggtcgtaacaacgacggctacggctgcaccgttgatcattccgagaagaccggaagcaacgactgctacctttgccgggccgccctttgtgccgcccgcgatggcgtttgcgaagtcgttgaagaactgacccatgccacacttgttcatgacttcaccgaaggcaatgaagaggaagatgtaggtggacgcgacgttgaccgacgatccgtaaataccttccgtgttcgagaagaagtggctcattaacttctgccatgtatatcctctgtggaggaagatgcccgggacatcgatcgggatgagtccctgcttcgtgcccattaagctgtagatcataaagataatggagatgatcgggagtgccatgccgcagacacgtctcgttgcctccagaacgaccagggttaagagggtaccgatcacgacatccatcatgtccggctttccggcacagttgatgatgtttacataatctacgcacatatagatcggaactgcggctgacaatgcgataaatacataatcataccacgcgatcactttgcggctcgcttttttcgtagccggataaagcatgaaggcaagaatcaggatcatgccgacatggatggaacgatgctttaatgtttccggcatgtaaagaccggatgcgaaaaccagatgatataaggtaacgatgatcgcgaatacccggtaagctttctttaataccggggacccgaactttctcgtcttgctctctttatcaaactgctcgaggagtttctgtttttcttcctcgctcatctctgcttccgctgtactggggacgatgtttttttctttttcgctcatacagatttcccttcccttcgttgtcagagttgttgtcgatgtttcttcagcagtttccttttcttatttttcaaaaccattccggatcctcagcaccatttttacgtgatgcggcatgtcagagccctgaatcaggagctcgccattcaccttgatgttcttcagggctgtctgggaattgatccagttgaactgcggaaagacgctttcgatctcatccatgtagacgagtccgtcttcgtagcggtatttgcagtccatctctgccggaattccggcaccgaagcccgcgaccgcgatggtgtggagaaggaagcttccgtctttctgtatctcgtaatactcgtaccacggaatatgctcaaaggaatgttcccactggaaggaaagctcatcaccggtctttaccggaatctcccggtaaacatttccggtctcaagctcttcgatcaccagaatttttttctgctgccgtataaatacggcagcagagattgctgtgattaccagaagaaccggaatcaggatttttaatttagttctcaggagtttcataaccgtgatcctgccaccacttcgcagcaccgtcatgaagcgggatctttacatcgtcaacaccgaaggaaacatcgatgttcttatctgctgtgttgtgggatgccttgatggtagcgattccatcgtcggagaagatgcagtcaagcatatcgtagaccatgtcatcggatacgtccttatttacaagcatgatattgtaaacgaatacgctctccacgtcctctttgttgttgtatgtattggccgggatcgtgcttgcggagaagaacggatacttctcgatcaggttatctctgccttcgccgtcgatcggaacgatcaccatatcgtagctgaatgccagctcgctgacggttgcgttcggaagaccggaggtaacgaatgccgcgtcgcactggccgttcttcatctggtcgattgcttcgccgtaggataagtagtcaacatcactgtcctcatatgtcatgccgtatgcttcatagatcattctcgcatttaactcaacaccggagttcggagcaccgataccgactctcttgccctttaagtcctcaacgctcttgatgcctgtgcttgccacggttacaagctgtacgtagttcggccagagtctcatcatggctctcagatccggctctgccttctcaaacgcaccaaagccctcatacgcctgtacgacggagtcctgcattgcgattgcaagctctgcctcaccgtttaagatcaggttgatgttctcaacggaagcgccggttgcctgtgcggatgtcttatatcctgcatttcctaatgcggttgcaaatgcgccgccgatcgggtagtagataccactcgtaggaccggttgcgactgtgacaaactctttcgccctgtcaatgctcacggatgtgctgcccgcctctgcgctggaaccatccgccgctttctcagttacggctgccgctgttgtgtcagctgctgctgttgtagatgtactgccggaactgctgccgcatcctgcaagagctgctgtcattgtgagtgccatagctgctgctgtgattcttttcactaatctcatactgtttacctctccttctttttgtttacccgtaattgtccggtcccacccggatcattacatacccacttttcaaatgcttcatattctttataaatatttcacatttcatgtctaaattttaacgtaaacgtagctctgatacaatggggttcgtgcaaactgcacaaaatcgtgtatgaatggtaaaaattgatgtgtgaaatgcaggaataagacagttttcctgtgaatctatatgatattattttaacaattctttgcacacctttgcgatcgatcgatgagttcgcttgataagtaggaattgatcgttcccgttaatat

SEQ ID NO: 2039 - DNA, 351 bp, Unknown
  gut microbiota DNA sequence
aagttcttcgcattaagaaaagtccctttgtgaaaccaatcggaggatcttctggccttcacttcttttgaaatcgtagtagggtccttacagagaaagcgggcaatatctttaaaggatgtacccttatccagttcattctggatatagatacgatcctctatggtgagatgcttctggttgcctgggatatatttactcatagtcaaactccttctactgctgtcagaaggacgattaaagtatcatatcagtatgcatgagtaaatatcaactgtgcaagagtaaactccaccgccctttggagaagtggaatttaaattttcattttaggactggctttagacggtg

SEQ ID NO: 2040 - DNA, 5834 bp, Unknown
  gut microbiota DNA sequence
gaattgcaagaaaaagacttactggtctgtgatcatttttttcagattctcaaaaagctccagatcggattttgtcacacggatgttggaggcgagttctttgccgtccggttcgataaccttaaattcgatgatcatgttttcctgaatgccatgtttgtagaccgcgcgccagaaagccgggaatttcggatggtttctggtaaaggtctgccaggagtttttgaactgcagaaacatcattgggtttatactcaaaatattttcctctttcttaaaattgtgtttcggatagtcacgcagcggggcggctggacgccgagtaacatgctgctggattccagtataaaatatttgagcaggaattgcaagatgtgggaatagtatgctacaattagcacagcggtggattttgccgatttggaatgcgaagcatcggcaaaaagatggtcaggcagttgtaaaggagggatacgatgttggaggacgcaaaaaaacggatggccgaaaatgtcatttgtaatttggaaaaaagaaatatggagggaatctattgccgggataagaaagaggcagtggaaacgatcctctcgctgatcgaacccggtgcttccatcggctggggcggctcggcatcgatccgggagctgggaattctggctgaattggaaaaatccgggcatgagatgcgggattacccgatgaaagataaagagacgatgggaaatccgtcatatctcggctcctgcagtgcggactgtttccttatgggaacaaatgcgatcaccgtaaaaggcgaactggtcaatattgatggtgcgggaaaccgtgtggcctgtctgattcatggaccaaagcaggtgatcattgttgtcggaatgaataagatagtgcggagcattgaggatgggatcgaccggatccagacgcaggcctgtccgatcattgcagatgctaccggccggaaaacgccatgtggtgtaaagggagtctgcatggactgccagtcccccgactgcatgtgctgttcgatcgttgttacacggagatcccgatatgacggacggatcaaggttgtgatcgttggggaaaatttaggctattaaaataagattactggaggaacccaatgttttttattggaggaattactcaggggacaaaagagcttgtttataacgcggcggcgatgatctgtggccgctgcgggagatatggacggtatcaggtgtttatgacctatatgtgcctgtcctttttctttatcccgatcttgaaatggaaccggaaatattatgtgaagacgagctgctgcgggaccgtttaccagctggacgaggaagtcggaaagcggatcgccgcaggagaggatgtgccgatccgggaggaagaccttacccttgtttcagaggggcatgatgccccggcctgggatgtgccggtgaaacggtgttcgaactgcggctatgagacgaaggaaaattttgagtactgcccgaagtgcggaaagaggttttaaggcatgaagatcacatacattcatcacagctcatttctcgtggagacggaggcggcatatctgctgtttgactattttcagggaaagcttccggaaatttcacaggaaaagccgctctatgtgttcgcgagccacagacacccggaccatttttcaaaagtgatctttgaactggaggaacagcatccggatattcattatattctggcgtttgacatctggagcaagcgggtcccggatccgtgcaaagataagacggaatttttaaagcccggtcaggtcctggatgacggacgtttgaaggtcgagggatttaagtcaacggatgaaggcgttgcattctggtgcaccgtcgatgggcttgagatctaccatgcaggcgacctgaatcactggtactgggatggggaagatccgcagtggaacaaaaacatgacgaaggcgtaccgggatgagatcgcgaagatgcatggacggacggcagacgctgcgttcctgccgctggatcccagactcggagagtatttttacctggggatcgatgattttatgaaagaggtcgacgcaaagcatattttcccgatgcatttctggggtgagtatgatgtggcggaacggctgaaacagctcccgtgttcggcaggataccgtgacagggtcgtggagatccatgaagagggagaaagctgggagatatagaaacagcagagtcgtggactcagcttcggaatttaacgacaacggcgtcggagaaagacaccgggaaatattgaatactgaaacagaaaagtaaaatgagaggagaacaccatgaaatttacattcgcacacaacaattttaacgtgatggatctcgaaaaatccctgaaattctacgaggaagctcttggattaaaagaagtaaagagaaaagaggcagcagacggaagctttatcctggtctatctgggagacggcgtgacacctcaccagctggagctcacatggctcagagactgggagaaagatcattacgatctcggtgacaatgaattccatctggcattccatgtggacgatttcgaggcggctcatgcgaaacacaaggagatgggatgcatctgttttgagaatgagaagatggggatctactttatcacggatccggataattactggctggagatcgtgccgacaagaaagtagggagcagcagacgaaaacacaggaatacagaatatacaggaggaacagacgatgattctgatcaaaaacggacgtgtggtagatgcgaaaagtaagactgatgaggttctggatgttgtcattgacggcggaaagatcaaaacgatcgggaaagtggaagatgacggaaactatgagcaggtgatcgatgcatccggatgcgtggtagcacctggactgatcgatgtccatgtccatttccgcgatccgggacttacgtataaagaagatatccagacgggttccgcagcggcgaaaaagggcggctacacgaccgttgtcaccatggcgaacacgaaaccgccggtggacaacgtggagactttaaaatacatcatcgaagagggaaagaagacaggcatcaacgttcttccggcagcctgcgtttccgttggaatgaagggccaggaactgaccgatatggacgccttaaaggcagcaggagccgttggatttacggacgatggaatcccgctgatgaacgagaaactcgtctacgaggccatgaagaaggcgaaagagctaaatgtaccgctgagcttccatgaggaagactcggcattcatctccgagaacggaatcaacgcaggtgcagtcgcaaaagagcttggaatcacaggttccccggcacttgccgaagattctctcgtggctcgtgactgcatgatcgccctgcacacaggcgcgtcagtcaatatccagcatatcagctccgccacatctgtaaaggttgtgaagcttgcgaaagagcttggcgcaaacgtgacagcggaggtcacacctcaccatttcacattagatgagacggctgttttagaacatggcgcaatggcgaagatgaacccgccgttaagaaccgcgaaggaccgcgagggcattatcgaaggaatcaaggacggctccatcgatatgatcgccaccgaccacgctccgcacagcgcggaggaaaaggcagtgctcccggtatggaaagcaccgagtggaatcattggtcttgagactgctctcggccttgcggtgacagagcttgtgaagaaaggccacctgactaccatgcagcttgtggagaagatgtgcgtgaatccggcgaagctgtatcactttgataagggatatctaacagagggcggggatgccgatatcgtgatcttcaatgagaacgaggaatggaccgttacagatgatgagatcgcgtccaagtcccacaacacgccgtttatcggaacaaaactttttggacgtgtgaagtatacgatctgcggtggaaatattgtatacaaagattgataagagaacaggagaaaacaagtcatgaaaaaataccaggtgcttctttttgatgtggatggaacacttctggatttcgacaaggcagagatgatcggcatcgagcgggtacttacccatttcggcgtgccggccactgaggagaacatgcagaagtatcatcatttaaataaaagctactggcagaagttggagcgcggggaacttacgagggagcaggtgctgagcctgagatttgaggactattttaaggatttcgggatcaccgtaaatggcgcggaagtcgacggcctgtaccgccggacattaaacgagagcgcattcctcttaaatggggccatggagcttcttgacagcttaaaggatcgctatgagcttcatatcgttacaaacggtgtcgctgagacccagtataaacgtctcgcggcagcaggcctggacaagctgtttaagggaatctacgtttccgaggaatccggataccagaaaccgcagcaggagtatttcgattactgctttgaaaagatgggcagaaacgacgtggagaacatgctgatcatcggtgactccctgacttctgacatccgtggaggaaacaatgccggaatcgatactctgtggtacaatccgcaccatcaggagaatacagccggtgtgcatgtggattacgagacggatacgctggaaaagataggtgagatgctgagttaatttcggaaagacagcagcaggtaatttttctgaaaagttatgtaaactaaaagcacctggaacgagataaaatccatttgaaggctggctttaatgccggtatctttcaaaattgcaaaaagtcatagcaatactgagaaatattgtcagacatcttgacaaatacgaggatttttcttataattaagctttcccggagagcattgtccgccgcatacggatccggtgaagggacagaaagagcggcggcgaatatatagaaatgaggggtgtatttcatgaacaagaacacgacagatatcacattatcggcttattttaatgacattgtaatcggatattacgaggacgaggacctggtgaaacagtttggaagacagcttggattcgacgtggatatggacacctttatggcggtatcattccagtacccgtctgatatgaacgtaaaaccggaagaccgtgagaaacttacaaatgcggcaaatgcgatcatcgctctctccgacatcaacaaaaagattggcggcaaacagatcattacctgcgacagcggtgactgtgtgatcctgatcatgaaagataagtccggaatgcgcgatctgatcccgcagatcaaagagactgctcttcaggaagttgaaaagatcgagtccgacagaaagatccgtgtcggcatcggtacgatcgagagcggcatcaaaggcatcaagcatacatacagcaatgcccaggatgcggtaaaggccggcgagatcttcaagaaagaccgtgtgatccttgaatacatgggaatggagatctacagcagtatcaaccagatggttgtaaacttcggcgaccgcctgaccagaaccgtattaaaacagctcggtgagacagagaaacgcgttctcgcgaaatactataaatgcaaggaagatattgctgagacagcaagacagctcggaatgtccgaggatgatgtaaagacaagtttaaatatggtgcgcatcaataccggtcttgatgtaaacgatacggaggataacttcaagcttcatttcattatgatcgcgaagaaggttcttgagaacgacgagaagatcaagag

SEQ ID NO: 2041 - DNA, 13055 bp, Unknown
  gut microbiota DNA sequence
ttctgttctgtggcaatcgctgcgcttatttattcaggagcttttccgcataatacattgccgccacatgcaccgcctgcacgagtccgccctccgccattagctttttcgtttcctcagcggacatgacaacgatctcgagatcctcggtggcgtccagatgctggctgctgacttttttgcagtccgtgatcagatagcagtgggcgaaattgctgatgcatgccgcatttggtgcgaccttgcatagaaataccggtttgctcccggcgtagcctgtctcctcgaagagttctctcgcggctccggcgcccggatcggcgtccgtcggctccatacaacctgccggaagttccagaaggatctgtcttgttccatggcggtactgacgcacgaaaacgaaatccccgtccccagtgacagcgaccacaacgacaaaatccggcacagtatttacataaaacggagagatctttgtaccgtccggcagtgcacagtcatcggcatgaagatcgatccagcggtcttttacgatcgtccgtgatccgttgcagatccatggtttgatagacatagctttttcctccattataatgcgatcaggctctcatcatccgggacatagatatttccgctgtaatagcgttttccctcactcttataaagacgttctcttccggcaacattgctgtcctccgtgtgccagagaacgaggttcgggattccgagagactccgcaagttcacaggcgtccttcacggtgctgtgatgcttttcatacggcttccagatatcgcgctccgcatagaggcagaacgcctcgtggagcagccagtcactgccgcgcacatactgttcacagtccggattgtacggttcatctccgacacaggtgagttttcttccattatttaatgtcagcgtaaagccgaactgctttaatttcgtggagtggatatcaaagaatgtcacatcatagcttaaaatatggcgcgtctccctatccttcacttcctccagatggatccggtcgccgatcatgttgtaaaacttatcctggatcgtcaggcggcagagtgttttgatcgtctcgatcagctctgcgtggcagtaaatgtgggcgtccccgatatactggtcctttttcatctttgttgcgatcatgcggatcatccagacgatgccgagtacatggtctgtgtgggcgtgggtcacgaaaatgtggtggatccgctctaagggaacctgcatgttgtccaggatctttaagatcccgtttccgccgccggcatccaccataaaatattcgtccccgtcgcggagcgcaaagcatgtattataaaggttggtaaccgtggcatttccggtaccaaaaacgtagagaagctcgctgtccatgaaaatctccttttcttcctgctcataagtgccgtgccgtccagatcggcgatcatcactgtctgcatcggccggacaccagattctttggttgagttttgaatatgaatatgttactataaaataaatggaaaagcaattcccggacggttaaatttttaacctgtaaggtggaagaagagcatgaaaagctccgcaaaaaccagaaaaaagctgttgtttttcatggccgaaagtttctaaaatgaaaattctctaccatacagtaattagtgcagagttggccgatttggaatgcgaatcatcggcaaaattccgctgcggagcacagacggaggtgctgtgtactgtaacaggatttaaatatccgggaaatcgcagggaggaaaacagagacaatgagagatttggactatctgaagctgcttgcaaaagagtatccgaccgtgaaagcggcctccagtgagatcatcaacctgatggcgatccgcggacttccgaaaggaaccgagtatttcttcagcgacctacacggggaattcgaagcgtttattcacctgctccgcagtgcgtccggtattatccgcgagaagatctcggagaccttcgggtatgtgatctcggacgaagaggagatcgctcttgcaaacttgatctactatccggagcggaatatccggaagatccagaaagcgggaaaatttacagaagactggcagagaattacgatctaccgtctggtgcgcatctgtaaagaggtttcctcgaaatttacgagatcgaaagttcgtaaaaaaatgccgccggcattcgcttatatcatcgatgagctccttcatgtggactacaatgatgataataagaaagtttactatgacgagatcatccactccatcatcgacatcgagatgggtgaccagttcatcatggcactctgcaacctgatccagaacctgacagtggacagccttcacattatcggtgatatctttgaccgtggaccgcgcgcggacattatcatgaatgagctcatgcacttccacgacgtggatatccagtggggcaaccatgatatctcctggatgggcgcggcgaccggcaacctggcgtgcatctgcaacgtgctccggattgcgatccgttacaatggattcgatgttctggaggatggatatgggatcaaccttcgccccttatccatgtttgcggcgagagtttataaggatgatccgtgtgagcggttcatgccgaagatcctggatgaaaatatctacgacgcagtagatccgggtcttgctgcgaagatgcacaaagcgatcacagtgatccagttcaaggtggaaggtcagatcacgaaacgccatccggactatcagatcaatgaccggattcatctggaacatatcaactttgaaaaaggaacagtaaatatccacggaaaagattacaagatgctggatatgaacttcccgacgatcgatccgaaggacccgttaaaactcacaaaggaagagcaggagctgatccacaatctggcgctctcgttccaccacagtgagacacttcaccgtcatatccgtttcgtatattcccacggcgcaatgtacaagaggtgcaacggaaacctgctgtaccatggctgcatcccgatgaaagaggacggtaccttcgaggagctgaagctgaaagggatcatctattccggaaaacgtctgctcgactatatcgaggacgcggtgaagatggcatatttcctgccggaggatgacccgacgaaagactggtaccgtgactttatgtggtatttatggtgcggtccgaagtccccggtatacggaaaggacaatatggcaacctttgagaactactttgtcgttgacaaggcagctgcgaaggaaaatatgaacccgtattataaactgagtgaaaaagaggaattctgtaataagatcctcaaggagttcggacttccggtggaaggttcccacattatcaatggacatgtaccggtaaaattaaaggatggtgagagcccgatcaagggaaacggaaaactcttcgtcattgacggcggactttccaagtcctaccagccaaagacggggatcgcaggttataccctgatcttcaattcccatcatctggcgcttgcggagcacaaaccgtttgacagggatcatgaaaatacaccgaaggtcacgatcgtagagaaaatgaaaaaacgtgtgatggtcgcggataccgataccggaaaagaacttgcggcaaagatcgcggacctgaaggaacttgtggcagcatacagaggcggcatcattaaagaaaaactggagtagaattgcatgaacaaggacgaatttttaagacgcttagaggacgcgctttcgggtgaagtcccggcgtccgtgatccgcgagaacctaaattattacgcggattatctttcccaggaactcgggaaaggacgtaccatggacgagatcatagaggagatcggcgagccgaatatcgtggcgcgcacgatcatcaattccgcggaggccgcgggagagaccggagatggtcatggaagctttgaggatgcgtccccgcgggacgatgacagaagaagcacgtacagacaggaaagcagtcagaacggatccggaccgaatatccactattatgatctgaataaatggtactggaaattggcccttgttgtgatcctgttcctcgtaatctccgtgatcttcagcattatgggcggcgtgttctatctgctgatccggttttccggaccgatcttaatgtgccttctgatctactggctcatcaaggggttccggggaaggtaaaaagacaacaaattacggaatgttaaattcgaaataaattatgtaaacatgggcggcgttctcttcggggagcgccgcatttttgacacaaatttggcgatttttgcctaaattattaagagtttatgaatttcttcgtttttattgacaaaaggatcctcaggaaatataatttgtttgtaacaaaacgtaacatatttgtaacaaagattgcaaaacattaagttttaagataagaggacatcaatgacaaaaaaacttttcagaactttaaagatcacttgcttatgcatggctttaactgcagcccttccgatcgtttccttcgcggatgagcagaccgcagctgtaaaagaggataagatggtagtaaagatcatccacctcgatgaaaacggaaatccgctggaagcggacaagcagacagaaacagagacagcaaaagaggagacagagagttctgaaaagacaacagatacagaggaagctgatgctgatacagaggaggcagaagctgatcctgacgaggatgaagcggaagaggaagaagctgttgaggagatcgaggcagcgatcgaagttgagaatgatctccgttccgaaatcgttacatatgcgctccagttcgttggaaaccgttataaatatggcggaacaaacccgaataccggtgttgattgttccggatttacttcctatgtaatgcgccatgcagcaagcgtggaacttccgcactcttcaagcggacagtcccgcgtgggtcgtgtggtaagcagctctgagatgcgcccgggcgatattatctgctatggttccggaaagaagatcaaccacgttgccctctatatcggaaacggacagatcgtacatgcttccacagagagaaccgggatcaaggtttccagatggaactaccgtacaccggtgaggatcgtgaatgtacttggtgactaacctgaaaattggatagaggataaaaggataaaaaaacctccctgacgaatagaaaacgtcagggaggtttttgcatctatggcggtaaaacggtgcaagaaagctatttttttcggtaccccgcgtgcaggatcagacgaaatactccggcctgttccagcgttttcgccacaaggaagaagatcagggaatccaccggccattggatcagatttttgatcgcgcgggcaggcagaagtgcgagaaaaccttttccatttagaagcgtcagccagtaggtcgcgaggatgatgttgcagatgatgatcacaacgagtttggctgtgaggatcctcggaagcgagagcttctttttatagaagaacaatccgtagaggaatgcggccagcatggcatcaaaggtaaaaccgggcatgaagccgccgtccggtttcagcatgaatttgatcacgtccatcgcgcctccgaagagacagccgacgaccgggccgaagaggtagtccacgagcatgttcgggatcgcactgaacccgatctttaagttcggggtgatcttaaaggagtagtagccaagaacgatggccagagcgccgaacatggcgcaggtagtgatggtagtgaccttcttgaattcgcgggatgattcaaaaatcctggaaaagaggtcgttagagctgttttgcataaaaaaatacctcctttgcagattctcggaccacaacaggagataatcggacgatcacagatacggagtatctgtaaattatcttctgatgcagcgggatgcgatatgtgcaccgcgggatcttcccttcgtcctgccagcaactccctgtctggcgggcacttgacgcgcacacgtctactctgcatgtttgtttgatgagattacgataccatgaatggtggggaatgtaaagaggagaatgaggaagaagcgcttttgacgaaaggggatgggaaaaaaattttattttcggtgtattgccgtatatactttttttgagcactgatttataatacttcgaagttcattgtaatatacagggagttaagaatatgcaaaagagtgaagtaaaggatctgacgaccggatccccgatgaagctgatcctgagttttgcgatcccgatgcttttgggattcctttttcagcagttttataatatggtggatacgatcattgtcggaaagtgtctgggagtttcttccctggcggcggttggatcgacgggatccatcaattttatgatcattggattctgtacgggagcatgcagtggatttgcgatcccggtcgcgcagaagttcggcgcgggagattatacggggatgcggaagttcgtggcgaatgcgggctggctctcagcggtgtttgcggcggtcatgacgacgatcgtgggactgctctgcatgaatatcctgcagtggatgaacacgccggaggacattatccagggagcgtatgattatatttttgtgatctttctcggaatcccggttacctacctctataatatgctggcgggcatcatccgaagtcttggggacagcaagacgcctgtctacttcctgcttttatcgtccctcatgaatatcggtcttgatttctttacgattcttggactcggcatgggagtcggcggaccggcactcgcgacggtgatctcccagggaatctcggcggtgttatgtctgatctacatgatcaagcattatccgatccttcatatgaaaaacggggagtggaagccggacggaagaatgctcggcgtcctctgcggcatggggattccgatgggacttcagtattcgatcacggcgatcggaagcgtggtccttcagacagcggtgaattcgctggggtccatggcggttgcggctgtctccacgggaagcaaggtcagcatgtttttctgctgtccgtttgatgcgctcggcggcacgatggcgacgtatgccggacagaatgtgggtgcgaaaaagctggaccgtgtcacacagggattaaaggcggcgagtctgatcgggatcatttattcgctgatcgcatttgtgatcctgtttttcggcggaaagtacattgcgctcctctttatggatgcggatcagacggagatcatcgatcgtgtggcgatgttcctgatcggaaacagcatgttctacattccgctgacgtttgtgaatgtggtccgctttacaatccagggaatgggattttcgacgtttgcgatcctggccggtgtctgcgagatggctgcacggtctctcgttggcttctgccttgttccggtgttcggattccttccggcatgttttgcgagtccgctcgcatggatctttgcggatgcgttcctgatcccggcgttctttcattgtatgaaaaaattgaaagtgctttttggggaagctgcataaaagtttcggttcggaccatactagagaatgcaggtgcggcagaaatgctgcggcaaaaaatatccggtctgtatgccttgcgggaagcagcggaaaaccaaactccaggaggtacgaaaaaatggcaagaaacagctatgatatggacgacaacatgaaaaacagtggatctgagacttacgacaagacaaagaaccagagcagaaacagccagaaccgttcggagaataacagtcagaaccgttcgaagaacagttctaaggactccacggacaatgggagaaactgcaaaagataaaaaagatgcggtggtctgactgtgcaggaatctgtgtggaaagattgcgtggtcgaacagtcagatctgataagaatggcggtggggtgatcctgccgccgttttttctttccgagcaaaaaggaaccatgtccgggccgcccggcatattttaaattaaggatatgtttcaggagaaggaatatgtttcggacgatctcgatgcagcagctggaacaatttctggacggggagcggacattcacgctgctggatgtgcgggaacagaaggaatatgaggcagggcatctcctgggggctgtgaacctgccttatgaacagctggatgaagtggaggcagagatcacaaaagaccgtcctgtggtcatctactgcgcctacggaggtcaaagcctgctcgcggcgagagaacttgcgggacgcgggtatgatgcggtgaatgcactgggaggactgcattattacaggggaaaatattatgtgggatgccgggagtaaaagttccggaagaaaagaaagagatgatttggcagggtaggactgtcgattatcgaaaaaattccggatggaatgcttggcatgatatggtcacggtcacgggtgctttgcacggtcagaaaactcctgtaccgtggacaggaagcctgaattggagttttacagggattgacagggtgactacgaacccttaaaattaaatggaatacagccatccggcgaacgatacggatggaatgaaactatgaaaataaagtggctgcgaatttaaaatggatttttactcgtaagttgccatgcatccgaagggaagctccgggggaggttgatcctgtaggtgtgagggtactgaacagttacgtgagcagctgcgcgatacatcagaacggagaaaatcagattgaatacatttgaattgatcgtcccatgccatttcggcctggaggcagtgatgaaaaaagaaatcctggaccttggatatgaggtcagccaggtggaagacgggcgtgtgacatttatcggcgacgcggaggcgatctgccgtgccaatattttcctcagaacaacggagcgcgtacttttaaaggtcggcagtttccatgcagagactttcgaggaactgttccaggggacccgcgcgatcccgtgggaggaatatctcccgaaggatgcgaaattctgggtcgcgaaagcttcctccattaagagcaagctcttcagcccgtcggatatccagtccatcatgaaaaaagccatggtcgagaggatgaaaaaggcatatgggatcgaatggttcccggagagcggtgcaagcttcccgctgcgcgtattccttcacaaggacacggtgacggtagcacttgacacgaccggagaatccctgcataagcgcggttacaggaccctgacaagtaaggcgccgatcacggagacgctggcggcggcactcatcatgctgactccgtggaagagcgaccggatcctcgtggacccgttctgcggaagcggaaccttcccgatcgaggcggcgatgatcgcagcgaatatggcgccgggcatgaaccgggaattcctctccgaggactggaaacatctgatcccgagaaaatgctggtatgatgcgatggacgaggcgaacgatcttgtggatctttctgtccagacggatatccagggctacgacattgacggggacatcatccgtgcagcgagagcgaacgcgaaggcagcaggcgtggacgaactgatccatttccagcagcgtccggtgagtgggctcagccatccgaaaaaatacggattcctgatcacaaacccgccgtatggggagcgaatcgaggagaagaagaacctgccggagttatataagacgatcggagagcgtttcgcggcgcttgattcctggtcagcttatatcatcacggcgtatgaagataccgagcgctatttcggacgcaaggcggataagaaccggaagatctataatggtatgatgaagacgtatttctaccagttcctgggaccgaagccaccggcaaggaaacgtgaggagagaaaagaagagcagtgataactgctcagcaggtctgcgcacttgttgcgctgaccgtaataaagcacaggcttgaaggtgaaaatcccatcggcgcagccgaccaggaatggatttttgatcgtaacctgccatgcaggacagggaaaatgccgattgcaggcggaatgtgggtaagacggagaagatgagaagccgaagaaggaaaagacgtgggagcggtctgtggcccggagcggtcgcagtgctggcagcaggcatggtttttgctgcgaggacagagatcctggatctggcaaagacaggggtcgacctcgtagtggacgatgaccatcaggaaaacagcgcagagaagcctgatctgagcgtcacggagaattctgacgctgcagctgatggggaagaaacactgacggatgccggagcgaacagtacagatgaaacgggagctgaccggaaatacatggatgcggacagtgaaattttcacagatggatccggggagcaggagtttatagaactcccgtcatcctacgatctgagggaacgccgggcgatccgtgtttccgaccagggcgatctcggtacgtgctgggcattcgcggcattaaaggcggtggagacgtccatgccggagtccatggcagtgccgctctcggcggaccatatgtcgatccacaacagcttcggaatcagtcagaattccggcggggattacagtatggcgatggcctaccttctcgcctggcagggacctgtctcggaggcggacgatccatatggggacagcacctcaccggacggtcttgcaccggtctgtcatgtccaggagatcaggatcctgcaagcgaaggattatgacgcggtaaaacgggcggtatttttatacggaggcgtccagacatcgctctatcttccggcggaaaaccgtgggggcgacggaaatgtctgttataaaggcagcgaggagccgaaccatgacaccgtgatcatcggctgggatgacgattatccgaaggaaaagttcgcatcagctccggagtcggacggggcgtttctctgcatcaacagctggggagaaacctttggggatggtggattttttcatgtctcctacgaggacagccggatcgcggagagcagtatctcctatcgcgggatcgagccgtcggataattatgacaggaattaccagagtgatctctgcggatggaccggtcagatgggctatggagagccggacacatggatggcgaacgtgtatacagcagagtcagaagagacgctggaggcagtgggattttatgccacggcgccggacacggaatatgaagtgtatgtgtttgacggggacagtttccgtgaacatgtggaaaacggtgtgaaatttcaggtggacagtggaaaagtcctgacatccggcatggtcacggatgcaggattttatacggtccgcctggcaaaaccgcagacggtgaatgcaggagagccgttcgctgtggcagttaagatccacacgccggggacaacgcagccggtggcggtggagtatgcaggcagcgggcggacaggaaatgttgacataagtgacggtgaggggtatattagtttcgatggcggcacatgggagcggaccgaagagtcaaagggatgcaacgtgtgcctgaaagcctacagcaggatcattggaaagtgagaagaacatggaacataagattgtttttgcaacatcaaatgccggaaagatgcgggagatccgtgagatcttaaaggacctcggagcggagatcctgtcgatgaaggaggcaggcgtggatgttgatattgtggaagatggagatacattcgcggcaaatgcgttaattaaggcaaaagctgtttgggagaagaccggtgggatcgttctcgcggatgattccgggcttgtgatcgatgccttaaacggggagccgggcgtctactccgcacggtatatgggggagaagacttcctatgagatcaagaactggaatctgatccatcgtctggacggtgtcccggaggagaagcgcacggcgcgcttcgtctgtgtgatcgcagcggtccttccggatggaagaaccttgacagcggagggaacgatggaaggcatgattgcgcatgaaccggccggtgctggcggattcggctatgatccgatcctgatgcttccggaatacgggaagacatcggcggagatcactatggatgagaagaatgccatcagccaccgcggtaaagcgcttcgggcgatgaaaaaatgtcttgcagaagaaatcggagagtaaggtatgaaaattctgatcgtgagcgatacccacagaagagatggaaatctcagggcaattattgaaaaacagtccccgttcgatatgctgatccatctgggggataccgagggcagcgagatctattttaaggaatgggtgaataatgataactgcgtgatccatgttgtgcgcggaaataatgatttcttttcccagacagacaaggagaaggagatctccatcgggaaataccgggcatttctgactcacggtcacatgtacggcgtatcgtttgagctggagacgatcaaggaagaggcgagagccagaaaggtggatatcgtcatgtttggccatacccacaagccgcatctggagtattgtgaggatgggcttgtggtgctgaatccgggaagtctttcttatccgagacaggacgggagaaaaccatcgtatatgctgatggagattgaccggaatggggaggcgcattatacggtctgttatgtggatcaggatcgggatattccgtcggggttgtattaagtagattcatattggcgagggggacgcggtgagcttccgcccaggagtgccttgatccggggatctggttcctcttagctcgcgggtgactgcgttgggacgcagataccgcactgtctgagcgaagcgagtttgcggtatctgtgtcccgcccttagcagtctcccgggagcttagcggaaccatccccgcatccctgagcgctcctgggcggaagctcaccgctggtagtgtcgagaatacagtcaccctttgctgaaacagtt

SEQ ID NO: 2042 - DNA, 4071 bp, Unknown
  gut microbiota DNA sequence
agagggctatgagatcgttccggagatcatgattccgctcgttggcgagaagaaagagctcaagttcgtgaaagacatcgttgttgaagttgctgagcaggttaagaaagagaaaggctccgatatgaagtaccacattggtacaatgatcgagatcccgcgtgcagcccttactgcaggccagatcgctgaggaagctgagttcttctccttcggtacaaacgacctgacacagatgacattcggcttctcccgtgacgatgccggtaagttccttgattcctactacaaggcaaagatctacgagtctgatccgttcgcaagacttgaccagactggtgttggccgtctcgtagagctcgcagttaaggaaggacgcgcaacacgtccggagttaaagtgcggtatctgcggcgagcacggcggagatccgtcttccgtagagttctgccacaaagttggcttaaactacgtaagctgctcaccgttccgtgtaccgatcgcaagacttgctgctgcgcaggctgctcttcatgagaaaggttacaaataggatctgactgacgcagaacgaaaatctgtatcattataaatgaaaagataaaatcccccggaagcgattctgggggatttttgacaaaagagttttcgggagatcccggggagaatgttatgaaaattatcaatatcggttctttgaacatcgaccggatctatggtgtggaacattttgtccagccgggggagacgatcaaagtgcgtacatattctgaggcctgcggaggcaagggattgaatcagtcgatcgccgctgcgcgttccggagcggaggtacaccatgcaggtgctgtgggatctgacggaggaatgcttctggaaattcttagaatttccggagttcatacagaaaaaacgaagattctttcgggagcaagcggtcatgccgtgatccaggtggacaaaaacgggcagaacaatatcatgatctgcgggggagcaaatgatgctgtctcaatgggcatgatcgacgatgctctaagggaaatcagtgagggagatatcgtccttcttcagaatgagatctccaatgtgggatatgccgtggaacaggcgaagaaagccggggcaaagatcgccctgaatccatcaccggtcaatgagaatctgaagacgatcccgatggatcttatcgattattttattctcaacgagatcgaggggaaagaaatttccggtgcagagagtgaagagccggaaatgatcatggaaaaattaaaggaaaaatatccgaaagcagcctttgtcctgaccttgggagaaaaaggttcctggtattttgatgaaacccggtgctttaaacaggaaatctataaggtaaaagcagtggatacgaccgcggcaggggatacgttctgtggatatttcctttcgggactcacaaaaggaaaagagatcccggaaatcctaaaaacggcgagtgcggcaagcgcgatcgcggtcagcaggagtggggcggcgccgagcatccctacatatgaagaagtggagaaatttatggcagagcgcagctaaaagggacttacggatctgtcattgacagctgcattcggatgttggcatcgaaaatatccggtatcgtcagaaagttataaatagcggtatcactgtttgcagcaatcagctgaagagctataaaaaatgtcatgaaagaaagcattgagtaaaaagcttccgttcatgacattttttgatttacgcgaacaacgagccaaaatccgcgcttgcgcgaaagcttagcgcctgtcgcgataatgggaaattcagtcttttgacatacagatcgttcctgtcctctggagttccaggatcccgaagcttctcacaagctcgataaagtccgtgatcacatccggtgcagcatggaactcgatgaccatgctcttcggggagacgtggacgatcttggcgcccatgacactgcaaagctcgatcagggagctgcggtttgtcgcggagtaggagaccttgatgagcatcatctccaagagtacgctgcgggtctcctcgaggcggcgcaccttgatcacgtccagtttcttgtttaagtgtttctcgatctgatcgacagtgcgctggtcgccggtggagacgatggtcatgctggaaatatcgtggcgctccgtctcgcctacggccagactgtcgatgttgaagcctcttctcgcgaaaagaccggatatctgggagagaacaccgtctttattttctacaagtacagaaaaaatacctttcatcttgcgttctccttattttgtattgttgtggctgtcgacttcgcagaccatgatgcaggcattgtcgcaggcgaggaatcggttgagctctgcgtcgagagtctcgttgctgtcgcagtggaagtagtccatatcgtaggcagcggcgatttcagcatatttcggataatcgtagagctgaacaccgaaataatgttcctcgtaagtcttttcctgatgctcacggacaagaccgagatagtggtttctcatgacaaggatctttatcgggatcttgtttaccgcgatggttccaagctcgtacatggacatctggaaggaaccgtcaccgcagacaacaacgacctgcttgtccggagtacacatcttcgctccgattccggccgggatggagtagcccatagttcccataccgccgcttgtgaggaaacggccgtttttcatcacatagttgtcggcagaccagagctggttctgtccgacatctgcaacatagatcgcgtcatcatccatcttctcggagagatgctggactaagagcatcggatttacgagcttgtcactgaaaacacggtggtcaacggtactcttcttgatatcgtggagtgtctcgatccactgtgtcgtgtcgatggagatattctcctgcagcaggcggtcgaaaatattcttgatatcgccgaccagcgggatcgtcggtccaaggtttttaccgatctcggcggtatcgatatcgatgtggatgatattgacctgctgttccaggttttccggcttcggaacggcgcggtctgcgatccttgcacccgcgatgatcagaaggtcactgtttgcgaccgcgcggtttgcgtaaggttttccattgtttccgagcataccgaagtagagcgggtggttcttcggcatgacgccgattcccatcatcgttgtgacaagtgggatattgtttttctcgcagaactggcggacacactcctcaccgtttccgaggatcacgccgccgccggcacagatcaacggctttttcgccttgttgatcgctgcgactactttatgcatctgcgggttgttaccttttgtgctcggcttgtatccgcggatattgacctcggatgtatagtcgaaggatttctttaagaggtccatctggacatcacacgggatgtcgatgaggaccggaccttttcttcctgtggaagcgatatagaaagcctccttaaagatacgcggaatatcatcggcgctctttacaaggtagctgtattttacgaaggattcggtggaaccacgcatatctgcttcctgaaatacgtcgcgtcctaagagattggagttgacctgcccggtgatcgcgatcaacggaatactgtcggcgtaagccgttgccagtgctgtgatcaggttcgtcgcgccaggaccggaagatgtgacgcagactgcggcctttctggagatgcgggcatagccgcttgcggcgtgcccggcagcctgctcctgacggacaaggacatgctcgatggttccggcattatataaggcctcataaaacggggagatcgcaacgcccggatatccgaagatcctggttacgccctcttcctcgaggcatttgaccatagcttctgcaccattcataataacttaaaataccccctcaagtaagcgtttaaaagatgtctgggggcaaaaaaatgatgattttgccctttaaaatctttgaagatagttaataagaattatatcgcatactgagaggggatgtcaatgtggaaaggac

SEQ ID NO: 2043 - DNA, 12935 bp, Unknown
  gut microbiota DNA sequence
atcaattataaaatcatatatgaaaggaaagaaactatgagactcgaaaatttgacttggccgaaagctcaggaatattttgaaaaaaatgatatggtacttgtttctatcggcagtattgagtgtcacggccgtcacatgccgcttggaaccgatacactgattccggagcacttgttggagaaaatcgagaagaagagtgatgttttgattgctcccaccattccatatggttcctgccccaattttgctccgtatcctggtacaattgatattgacgacgaggtgctctatcagttttgccgtcaggttttcctgagtctgtatcgtcacggcgcaagaaaattcgttttcctgaacggacatggcggaaatatcaagatgattcagcgccttggcatggaattcgaggataagggctgtctggttgctatgcttaactggtggctgatggcatgggatatgaacccggcgtggaaaggcggccacggcggtggtgaggaaacagctgcgattcttggaattgacccgtctttagttgataagagtgagataggtggtgaactccagtttaagcacctgtctgagaatctgaagacaaccggtttccgttctgttgagtataagggagttaccgttgagatcctccgcaaaactccacatgttaccgacagcggctggatcggaccggatcatccgagtaccgctacagaagagtggggaaaggaaatgctcgagaccacagcaaactatattgttgatttcatggaagagttcaagaaagttaagctttcataaagaagtgtcagaacggataagaaagtgacgctggaaatgattgcagcaattttaaatgcaaatgtcacatggtaaaatatgatacgaaaagaccgccggcccagatttctctggtaaccggcggtcttccctatgagcaaaacaattaaatgtagaagagcaatgcatcgtatgtcggatacgggagataatcctccgggatcaggacttccgcatcgttgacaaccagacggatcttttccatttcggtaagaatcgtatcgtggtagtaggtaccggcctttaagtagtcatccataccttcggcggtaccgatcatatcctttaaggtatcgagctcatcagagatcacatctgcgagcccggagagctttgtgatcagcttttcttcggcctttgttgtaatgccgggaacgagctcttttttagagcttcctgtgcatgcaaggtcattcacataggagaacagggacggaaggaagtctttctgaaccatctcctccatagtctttgcctcgatgtggagagtcttcacataatcctcaagaagaatctcgtaacgggagaagagctcctcttttgtgaagacttcatgttttgtgaaaagctcaatgttcttctcgtcgatgaaatgcggaagagcttccggtgtggacttaaagttcggaagtccacgtttctcagcctcagccagccactcatcagtgtagccgtttccattgaagatgatccgctcatgatctgtgaaagtatcctttaaaagtttgtggatcgccaaatcaagctctgagccggtaagcccatctaagaccttgcagaagcctgcgagggactcggcaactgctgtgtttaagattacgttcggaccagacagagagagggaagagcccggcatacggaactcaaacttatttcctgtgaaggcgaacggtgatgtacggttacggtccgtgttgtcttttgtgaagtgcgggagcaccttcggtccgatggacatctgaacagcgccctttccttcaaaatatgtatcagatttaatggaatcgacaacagcctcaagttcttctcctaagaacatggatacaacagctggcggcgcctcgtttgctccgagacgatggtcgtttccggctgtggcaacggagatccttaacagatcggcgtaatcatcaacagcctcaacaacagcagctaagaacagtaagaactgtgtgttctcagccggtgtctttcccggatttaacaggttttcgccggaatctgtggagagtgcccagttgttgtgcttaccgcttccgttgatgccttcgaacggcttttcatggagcaggcacgcgagaccatggtggtcagctaccttcttcatcatctccatgacgagctggttgtggtcaacggcaacattgacggtctcaaataccggagcaagttcatgctgagcaggtgcaacctcgttgtgttctgtctttgccgggatgccgagtttccagagctcttcgttcaggtcctccataaaagcttcgactctcggtttgatggaaccgaagtagtggtcatccatttcctgtcccttcggagccggagcaccaaataaggtacgtctgcagaagatcagatcttttctcagacggtagcagtctttatcgaccaggaaatattcctgctctgcaccgacggtggtgttgacgcgtctgacgtctgtttttcctaaaatgtgaagtaagtgggtagcttctttgctgacggcttccatggaacggagcagcggagtctttttatcgagtgcctcgccgctgtaagaacaaaaggcagttgggatacagagtgtatgtcccttgatgaatgcgaaagaggtaggatcccatgcggtatatccgcgggcttcgaaggtggcgcgtaagccacctgacgggaagctggaggcgtccggctcaccttttacaagttcttttccggaaaattccatgatcgcttcgccgacaccggtcggggagaggaaactgtcatgcttttcagctgtgatgcctgtcatcggctggaaccagtgagtgaagtgggtcgcaccgtgttcgagagcccattctttcattgcaactgcaacagagttcgcgatatccagctccagatgggaaccgctgttgatcgtttttgtaagggctttgtagacatcctttgggagacgtgctttcatttcggagtcgttgaatacaagactgccatacagttcaggaatacttttgctcatagatatttctcctttcaactccgctggggaacctccttgctccctgtctgcgggaaattatacaaagtttgctgtctgctccggggtatggaacagacagtcatcatttcgcggatcccaaatgggggtttgtggggaagatccgtgaaatgcaagaagggcgccggggtgtatgtatcatgcacccaagcgcccttgctcttatggtggtataatatactcattttccgggatttgtcaacacattttttgaaaatttttctgatcacagacagcgttcctattattaagtttttctgcttcaccattctggcgggataccggatgacgccgcaagacccggggaaagaagaaagtggtcctgtgattccggataaaaaacttttgaaaactgtaaaaaaactactttacaaattcgaaaaaatggaatatagtagttccatatttttttaacgcagcaacaaaacctatgagcaattatccctgcgtaaaaatgagtttcatatgatgtgattgattagacaaaggtgtcagagtcttagtacttctgtcaccttttttcatgcaatgttgcatgagcatgaagcagacagttttcgcacatcataggaaaagttcccgtaactgtgaaaaatactgaacagttacaagttccccacattcacaatatacatttggaggtaaggtatggcagttaaatacgtattcgtcacgggaggcgttgtctccggactcggcaaaggtattacagccgcatcccttggacgtctcttgaaggcaagagggtaccaggtcacgatgcagaagttcgatccttatatcaatattgatccgggtaccatgaatccgatccagcatggagaggtgttcgtcaccgacgatggaacagagacagacctggaccttgggcactatgagcgcttcattgatgagaaccttgataagaattccaacgtaaccactggtaagatttactggactgttcttcagaaagaacgtcacggagactttggcggaggtaccgtacaggtgatcccccacatcacaaatgagatcaaggcgagattttaccgcgcgaaatccccggacgaagaccgcatcgcgatcatcgaggtcggcggcaccgtcggcgatatcgagagccagcctttcctggaggcgattcgtcagttccgccacgagatcggatatcagaattccgttctgatccatgtgacactcgttccgtatttaaaggcgtcaggagaattaaagacgaaaccgacccagcagagcgtcaaggcacttcagggaatgggaatttccccggatgtgatcgtatgccgtacagaggttccgctcgaggacggtatcgagagcaagatcgctttattctgcaacgttccggaagaccatgttctccagaacctggatgtagagtatttatatgaagcgccgcttgccatggaaaaagagcgcctggctcatgtggtctgcgaatgcctccatcttccgtgtccggaaccgcagcttggtgactggaaacagatggtcgatgcattaaagaatccgacaagcgaggtcaagatcgcactggtaggaaaatacatccagctgcatgacgcgtacttgagtgtcatggaggcgttaaagcacggcgggatcgcaaaccgcacaaaagtgacgatcaaatgggtcgattccgagttcttaaagccggaagctctcggcgatacattcgccggtgttgacggcatcatcatcccgggcggctttggctccagaggaaccgaaggcatgatcctggctgcaaactatgcgagagagaacaagatcccgttcctcgggatctgcctcggcatgcagatggccatggtggcatttgcgagaaatgttctcggctatgcggatgcaaacagttccgagctggatccggagacaacccatccggttgtcgatctgatgccggatcagaacggcgtggagaaccttggaggaacgcttcgtctcggctcctatccgtgtgtccttgataaaaagtcgaaagcatattccctctacggaacagatatgatcaacgagcgccacagacatcgttttgagatcaacaatgactaccgtgatgactttacatctcacggcatgatgatctccggacagtccccggacggacatatcgttgagatgatcgagctcccggatcacccgttctatgtggggatccaggcacatccggaattcaagtcaagaccgaaccatgcacacccgctctttgcaggttttgttgagagtgctgaggagcagggcgttttaagacgtgcgaaaaagcttctcatgaagcggaaccatctttctgagccggaggcacaccggtatcttcagaagaccagcatggatacaggacggaccatggcggagagcgcccatatggtcacaatgctgatccaggaagattaatagtttgactttaactgtttatcattaaaaaaagttaatgcgttagccaaattattatcgcagttcctgcatttgtgtggtatatttattcatgaaaaatatcctaaatgcatttacagacagaaagagaggattgagaccatgtttaaagtcaatgaaaattttgccaaactgccgggcagctatctgttcgcaaatatcgcgaagagagtatccacattccaggcagatcatccggaaaaggagatcatccgccttggtatcggtgatgtgactcagccgatcgctccggcgatcatcgaggcaatgcacaaagctgtcgatgagatgggtcatgcggagaccttccgcggctatgctccggagcagggctatgactttttaagaaatatcattgcaaaagaggatttccaggagagaggctgcgacatctccgcagatgagatctttgtatccgacggtgcaaagtgtgactgcggaaatatccaggaattattctccttagacagcgtagtcgcagtatgcgacccggtatacccggtatacgtggattccaacgttatggcaggtcgcagcggtctctacaacagcgagaccggacgttttgacaagatcgtttacatgccgtgtactgcagacaacggtttccttccggaattcccgaaggagcacgtagacctgatctatctctgcttcccgaacaacccgaccggtgaggcgatcaagaaggcagatctccaggcatgggtagactttgcaaacaagaacggcgctgtgatcatctatgacgctgcttacgaggcatatatcactgaggctggcattccgcactccatctatgagtgtgagggtgcaaagacatgtgccatcgagctccgcagcttctccaagaaagccggatttaccggtatgcgtcttggttttgccgtgatcccgaaggacttaaagtgcggcgatgtgagcttaaatgcgatgtggatgcgccgtcagggttccaagtacaacggaactccgtatatcatccagcgtgccggtgaggcagtgtactctccggagggaaaagtacaggttactgagcagatcgcacgctacatgaagaacgcaaagacgatctatgacggcttaaaggatgccggatataccgtatacggcggcgtaaactccccatatatctggttaaagaccccgaataacatgaagtcctgggatttctttgatttcctgttaaacaatgcgggaatcgtgggtactcctggtgcaggtttcggtccgtccggtgaaggatatttccggattactgcattcggaacttatgaaaattctttaaaagcacttgacagaatcaaaaatctctgataaaacaagagacatcaaaaaaatatcaaacaaaagcgttgaaggaaactccctttcgaagaactttacagagaaccgcgtgacagctgagagcgcggaagagatgagaaaggcgggaacgctccggagccggctgctcgatatcggaaccgatggtaggacagcacgcaagccgcacgttacgcggccgagtcgttaggatgatggtccgacagcgaaagcggcgactcatgagtggcatgaaaatgcaatgcgggtggtaccgcgggaaataaaaagatcccgtcccggagaatgataaaagcaaaattctccggggcgggatttttgcttactctgaaagcctcaattaccccacaaaacgaggaggaaccgattatggagtttgtaacaggattaaaagacagcacagtaaaaactcttgaagaactggaaagagaagagtccgttggtaccgaagttaccgcagaaggaatggtacacagcatccgcgatatgggagagatctccttcgtgatcttaagaagccgggaaggtcttttacagaccgtagtccaggacgggatcggaagtgagacgctcaaagagatccgtgaaggacaggcggttcgcgtgacaggaaccgtattcagggaagagcgtgcaccgcacgggatcgagatccaccttgcggacgcagagatcctctcaaaaccggaagagccgatgccgatcgcgatcgacaaatggaaacttccgacatcgctggaagcgaacttaaaccgccgtgccattgccctcagaaatgttcgtgagcgtgcaaaattcagaatccaggaaggcatctgccgcggcttccgtgaatttatgacaagccagggattcaccgagatccataccccgaagatcggtgcaaaatccgcagagggcggcgcaaacctctttaagctccagtatttccacagaccggcagttctggcacagagcccgcagttctacaaacagatgatggtcggcgttttcgacagagtctttgaaactggtccggtgttccgtgcggagaagcacaacacaaagagacatttaaacgagtacacgagtcttgactttgagatgggattcatcgacagcttcatggacatctgcagaatggagacagcgatgctccagtatgtggtagaacttctgaagaaagattacgcgaaagagattgcacttttaaagatcgaacttccgaacgtggaaaagatcccgtatgtccgctttgatgaggcgaagcgcctgatcgctgagaagtatgacagacagatcagaagcccgcacgatctggagccggaggaagaggcactgatcggtgagtacttcaaagaagagtacggtgcagatttcgtgttcgttacccattatccgtcaaagaaacgtccgttctacgcgatggatgatccggaaaacaaagaatttaccctgagctttgacctcttattccgcggccttgaaatcacgacgggcggccagaggatccacgattatgagacacttttaaagaagatcgaggagaaaagcattgatacggagggaatggaagattacctcgactgcttcaaatacggaatgccgccgcacggcggtctcgggatcggacttgagcgtctgaccatgaagatgatcggcgaggacaatgtccgtgaggcgtgcctgttcccgagagacatgacaagattaaaaccgtgatggaaaaaacgcagaccattcaggaaggacggataattatggcagagatgatcaacgataagaccatggatgagatcgagatcctggcaaaacttcatctgacggatgaagaaaaagagaaatcaagaaacgatcttcagcagatgctggactatgtggatatgttaaataagctggatacctccgatgtggagccgctgacccatatcttcccgatcaaaaatgtgttccgtgaggacgttgtcctggagagcaccccgagggaagagctgatgaaaaatgcaccgaaggaaaaggacggacagttccttgttccgaagacgatcggttaggaggagacggatatgaagatactggaactttccgccacagagctggcaaagaagataaaagcaggcgagatcacttccgaggaagccgcgaaagcgtccctggaacagatcgcgaaggaagatcagaagatccgcgcatacctcaccgtggatgaggagaaagtccttgcaagggcaagagaagtggatgcggggatccgcgcaggaaagtatacagggccgcttgcaggtgtcccgatcgcagtgaaagacaatatctgtacaaagggaatgaagacgacatgtgcatcaaagatcctggaaaacttcgtcccgttctatgacgcgacggcagtcacccggatcacggatgccggaatggtgatcctcggaaagacaaacatggacgagttcgcgatgggtagcacgacagagacgtctgcattccaggttacgagaaacccgtgggatccagaacatgttccgggcggttcgtccggcggctcctgtgcggcggtcgctgcgggtgagtgctttgcggctctcggctccgataccggcggttcgatccgtcagccaagttcctactgcggcgttacagggatcaagccgacatacggaacggtctcccgtttcggtctcgttgcttatgcgtcttctctcgaccagatcggaccggttggaaagaatgcggccgattgtgcagcgcttcttgagacgatcacaagccacgatgagaaggacagcacttccatggaacgggaggatacggatttcacttcggcgatcggaaaagatgtccgcggcatgaagatcgggatcccgaaagagtacctgtccgacggtcttgacgcagatgtgcgggaagcggtggaacagtgtgcggcttacctgaaagaatgtggggcggaggtcgaatattttgatctcggtctcatggaatatacgatcccggcctactatgtcattgcggccgcggaggcaagctccaacttagagcgctttgacggcgtcaagtacggctaccgggcaaaggactacgagggacttcatgacatgtacaagaagtcaagatccgagggcttcggaccggaggtcaagagaaggatcatgctcggttccttcgtcttaagctccggatattatgacgcatattatctgaaagctctgaaggtgcgtggactgatcaaaaaagcctttgatgaggcatttgcgaagtatgacatcattttaggaccggcagctccgacagcggctccgaagatcggaacctccctgagcgatccgatgaagatgtacctgagcgatatctatacggttgctgtcaaccttgcgggtcttccgggactcaccgttccatgcagtgtaaacgaaaaaggactcccgatcggcgtccagcttctcagcgactgcttcagggaaaagacattatttgcagcggcatccgccatcgaacatgtccgcggtgaatggacacttccgtttgccagaaaggagaccttatcatgaaacagtatgaaacagtcatcggtcttgaggtccatgtagaacttgccacaaagacaaaaatcttctgcggatgcaaaacagatttcggcgctgcgccgaacacacatgtgtgcccgatctgtacaggtatgccgggatctcttcctatattaaataagcaggttgtggagttcgcactccgcgccggacttgcgttaaactgtgagatcaaccagttctgtaaatttgaccggaaaaactatttttacccggataacccgcaaaactatcagatttctcagctgtatctgccgatctgccatgacggttacgtggagcttgagacggcggcaggaacaaagcggatcgggatccatgagatccacatggaggaggatgccggaaaactggtccatgacgagtggaccgacagttccttagtcgattacaaccgaagcggcgtgccgttaattgagatcgtgtcggagccggatatgagaagtgccgacgaggtcatccagtacctggaacatcttcagtccacgatgcagtatctcggtgtttccgactgccgtctccaggaaggttccatgcgtgccgacgtaaacctttctgtccgcgaggtgggaagtccggtgttcggaacgagaaccgagatgaagaacttaaactccttcaaggcgatcgcccatgccatcgagggagagcgggaacgccagatcgagcttctcgaggacggccgtgccgtcattcaggagacgagacgctgggatgacaacaaggaatcttcccacgcgatgcgttccaaggaagatgcaaaggattaccgttacttcccggacccggatcttccgccgatcgatatctctgatgcctggatcgcctcgatccgcaaggcacagccggagttaaagaaggcgaaatcgaagagatatcagtcggagtacggcctgagtgcctatgacgccgatatcctgactgccgataaggcgcttgcagagctctttgagaacacgatcaaagccggagcagctccgaaaaaagcggcaaactggctgaccggggagacactccgtctcttaaaggagaaggagatggaggcatcaaagatcgtcttttccgcagagcatctggcagcactgattgaactccttgaaaagagtgtgatcaataaccagactgcgaaagaggtgttcgctgcgatgtttgagtccgacgtggatccgtctgtctatgtggaggaacacgggctgaagatggagagcgactccggtcttctcgaggagactgtgaaaaagatcctggacgcaaacccgaaagcggttggagagctgaaggaaggaaaagataaagtcatcggattcctcatgggacaggtcatgaaggagatgaaaggaaaagcgaacccggcgcaggtgagcgagatgatccgcaaacttgtgcaggaataataaaagaagccatgacagctggccggagctccggtgcagctgccatggccctttttgttcattccggagcagtgcagccgcagcaatcctgtttcttctatatataatgtacttgttgccggaatgtatgagttttccggtgctttgcattctgaatcgtcaaaatttgcagccgcagcggtattgcaggggacttcccgttcggaaaaacctgactgcgaaaaatgttaaaaaaggaacatattctgttcacgaaaaaagtattgattttatgaatggtatttagtatattagttactataaaagtccctgagagcagccgtatcattttgcagcgttcgatgggatgatccgcgtatggggaatatttagaaaaatttcccgccgcgggcaggaattggagagaaaatacatgataaaaattgcagtagacgccatgggcggagacaacgcccctggagagatcgtaaagggtgccgttgacgcggtcacagagcggaacgacattacagtctgtctgacaggacagaaagatgtcatcgaaaaagagctctcgaaatatacctataaaaaagagcagatcgagatcgttgacgccccggaagtgatcgagacgggagaaccgccggtcaatgcgatccgtaagaaaaagaattcttcccttgtagtcggtctgaacctcgtgaaaaacggcgaggctgacggctttgtatctgcgggaagctcaggagccgtcctcgtaggcggccaggtcatcgtcggccgcgtcaaaggcgtagagcgcccgccgctcgcaccgctgattccgacggaaaagggagtttcccttctgatcgactgcggggcaaacgttgacgcgagaccgtcccacctggtacagttcgcccagatgggttccctctatatgaaatatgtgatgggaatcgaaaatcctagagtggcgatcgtcaatatcggtctggaggaggagaagggaaatgctctcgtgaaagagacctttccgctcttaaaagaatgtaaaaatatcaacttcatcggaagtatcgaagcccgtgagatcccgcacggcggcgcggatgtgatcgtctgcgaggcctttgtcggaaatgtgatcttaaagctctatgagggcgtcggcgc

SEQ ID NO: 2044 - DNA, 3866 bp, Unknown
  gut microbiota DNA sequence
cacttaatatctcaatccatccgcgcctttttgcccttccagggcaaaacagcccacccatgccaatacacagcggcggggagactccgggcacggaccgcctgattccgggagctggcttcctcttggctcgcaggagaatgcgttggatagctacggacacttgtctgagcgcagcgagttgtgtccgcagctatccgcctttagcattcttctgcaagcctagaggaaccctcccggaatccaccaagcgtccgcgcccggagtctccccgccgcgtaccccctattccttcatccccggccgaaacacgatcgcccccagatacccaaacaccagcgccccgctgatcccgaccgcactcgccgtaaatcctcccttaaaaattcccagcacaccatcctcgctcatcgccttcacaacgcctttccacagcgtattcccaaaccctaaaagcggaaccgtcgctccggcccccgcccactctgcaaacggctcataaacgccaaggaatcccagaacactcccgctgaccaccagcaacaccatgatccgccccggcatcatcttcgtcttttccatcaggatctgcaccagcatgcagatcaatccaccaaccacaaacgcttttatatattccatagtgacaccttctcccattgtgattctctaatactgaattctcttgcagcttatccggtcatcctgtctccagcaccaccgcatgtgcgatccccggcacactttttccttcattgaagctcaccgttgaaagcagtgctccggtcggtagaaacagcacccgtttccactctccactctgcagttttggcaagatatatccgcacaataccgcagccgaacacccgcagccgcttcctccggcgtgggtatcctgctcctccggtgaaaacatctcgatcccgcagtccatataccgactctcgatccggtatcccgcctgcatgagataatcgagaagaagtctccttccgacagtcccgagatcaccggtaatgatctgatcgtaatgcgtctcatccaccccgagatcccggaaattcctgacgatcgtatcgagcgccgccatcgccatcgccgcgcccatgttcatggaatcatgaaaatccatgtccacgatctttccggtcgtcaccgccgtgatcttcgcaagcggcggctcctctccccggtaactcccggaagataggatcaccgcaccgcatcccgtcaccgtccatgtcgccgaatacggccgctgattcccatactccaacggaaaccggaactgcttttccgccgaggcaaaatggctggacgcgctcacgagcacatggtctgcgaatccgccctccacgcacatggcacccagccccagtccttctcccatcgtggaacatgccccgtaaagtccgaacatcgggatctccagattcacattcccgaacgatgtcgcaatgagctgagccagaagatcgcccgcaaacgagtaccggatctcctccctggaaagcccgctcttttcgatcacaagccccgcagtcctgctctgaagctcgctctccgcctcctcccacgttttcttccccagcatgggatccagctccacccggtcaaaacatgtccctaacggcccgtccccctccttctttcccacggttgaagctgcggcggtaatcaccggcggatcttcaaatacaatgctcgcccgcccccgctgtttttttccttctcctgtttttcccttcatttcattcctgctcctgtcttttatttctcagcagatatttgcaatccgctttcgctgcctgctcatagccaaacaaccgttccgcaacttctcccatatgatctgctgctccggttttcccgttgccattcatggtcaagaagtttccatacactgtgacagcatgcaaatgtttgataccgatatcttccccaaaatgcaaaaaaagatgcggaaatccagcactctctgaatttcagcatctttttcatttccatattttaaaagtttgcggctgttctttcacacagccgcataagttcatcttctgatatgattataaaacttaaacttaggtttaagtcaaggactttttagctgaaatatcgtaaaatacaaaagcatacgaagagaccgttcgactgtataagatccgaattttcctagaatctccagaaaaatttcaccattccgagtacccagctcgcaaagatcccatagaggatcaccggtccggcgatcgtaaagatcttgcagccgatcccgaagacatggccctccgccttatattcgattgccggcgaaaccaccgaatttgcaaaaccggtgatcggaacgagcgctccggcaccgccgaattttacgattttctggtatatatgggttcccgtgaggatcacgctgagtccgatgagacttaaggttgtccatgacgcagcgctctctttttcgatgccgaaggacatgtagacagaagtcagaatctgccccagcatgcagatcagtccgccgaccaggaatgcgcgccagagatttttccaagtgttgtggaccggcgtcacctgctttacatagtttccgtattcttttttgtcgatctccataagtttcacctcataattttcaactcagacacacatacactccggcgcagaatttcaaccggcacagactgacaggcactttgcaggatttctctgcagccatgggctttttgctgcccgaaagcagcttttcgttatccgaaatctcttataaaatacactgctgccccaaacactttccccgctgccacagccaggatcacatactgaagtcccaccgcaagccggatccgtctgtttaaaacaggaagcgcctttaacgtctccgcaagtgacatcacgagacaaccgacaaagatccccacagacatgccgcatattacaagcacgattctcccaggaaacggaaacggtacacggtagagatccgccagatttccccatactcccccgaggatcagcagtgtctcatagagcagcacatgttctgccgtgtgcgtcacaccgatgagccgcggaaaaacaccgatgatcgcaagaaaggcaaagattccggccgcgatgacagcacccgctccgagacccgcaaacgccaggagtccaagtctaagatacatcgatccccgactcctttctcccgccgtttttgatcagcgtcttattcaggttttcctcgtacaggcgcatctccacctcgatcggagtcggatccaccgtgatcttccaggatgcaaaatgattgaaaaacagcaggatccccactgcaagtcctacggagtaagatgcctcgaggatcgtcggcccgtccgcccgtgtcccaatgaccatctcgtagagcttcgcgaatacatccgtcacattggcgtcattgttgaaggtcatgattgcaaatgctgccccgaaaaaagccactgtcgagacaagtcccgtcttcatccactcccagaggcggcttttcctccttttcgcccggtatgtgacaacaaaatctgtttctccgagattgtccacctggatattctgccctgtcttctcgatcttttccacaagatccatgacgtttccgacataggccgcctcctttccctttccggaaaatgaggtgaccttcacggctttcgccttcgcctccgcagccctgtcgctgctgtggacatctgcgatcatccccagatacacttccgtctcataaacctctttcacctgagggatctttaagtagacagtcgtactgctcatgccttccacggctttctttccacgtcctcaagtgtctttaagatccctgtgacactccctttccggattggatc

SEQ ID NO: 2045 - DNA, 21162 bp, Unknown
  gut microbiota DNA sequence
cgggcttttcgaagctcggcgttttgtgttgggaatatgaaatgagctgccgcacgttagtgcgacagccccattagcatacatcgtcgtatactgcttgtgggataaaaaaatttatgatatgatagtctcatcttacgaaaagtctggcggatcgtgcattttctgcaatatagtctgaacatatctgaaagaagcagacagggaaaatgcggtatccggcggctggaatggaggtctggatgagaagaaaagacagagaattgaaggacatggctgatatcgtgtcgatcgcaaagcgggaaactgtgtgtaccgttgcgttccacgatgagccatgtccttatttgattccgctgaattacggagcggaagtggaagatggaaagctgatactgtacttccatggagcgaaagagggaacaaaactcgacaggatcagagaaaatcccaatgtctcatattgcatttacggggcgaatgtcttgacgatcaattatgatacagcctgcaagtctacgacgagttttgagagtatctgtggaaacggaactgcttgtctggtggaagataccgcggaaaagaaaaaagcgctggcagttctcatgaaccaggtaagtccgaagaaggtctttgatgagagttcgttcgcggagccgatggtaaatgcagttaccgtctggaaaatcataaccgaaaccgtaacaggaaagagacacgaatgacacgagcgaaagtgagccagaagcgtgcttgcacggttatggcgaacggcgagtgcgcgcatgaacgataagttcatgcgaaccaagaaagcgaaagtgagccagaaacgtgctcgcacggttatggcgaacggcgagtgcgcgcatgaataaggcagacaatagaaaggagtacatacatatgggaacagatttcagaaaggagatcggagcgacgatcgatcagaggagcggcgaatacacaaagatcagcgacgcgatctggggctttgcggagccgagatttcaggaatatgagtcctcaaaacttcagcaggagtttttgaaatccagaggattttccatcaagtcggatcttgcgggggaagagaccgcatttatcgctgaatggggaagcggaaagccgatcctcgcattcctgggtgagtttgatgcactttccagtcttcagcaggaagcagacaacctggaacgctgcccgatcccgggaaagacgaacggacatggctgcggtcatcatctgctcggaacagcttccgtggctgcggtggattccttaaaaacgtatatggaagagaaccatatgagcggaacgatccgttactatggctgcccggcagaggagaatgcaggcggaaaagcatacctggtccgcgacggctactttgatgactgtgatatcgcgatcacatggcatccgtataccatgaataaagcaatgaagggcggttatcatctggcaaacttccgtgcattctttactttccatggaatttcctcccatgcggcaggtgctccggagcttgggcgttctgcgctggacgcagttgagatcatggatatcggtgtcaactatatgagagagcacatgatcgatgcggcgagagttcacggcgcgatcacaaactctggcggaatcgctccgaacgtgatcccggcggaagcccagatcctctatgcgatccgcgcaccgaaggtaacccaggtgaagaagctctatgagcggatgtgcgacattgcgaagggcgctgcgctgatcaccggaacaacggtggatatcaaacaggttgcggcctattccaacctgatcaataatgacactcttgcggatcttgtccaggagaacctggaacatgttatcccggtcggctacacagaggaagagcttgcctatgcgaagaagttccagggcgtcatcacggaacttgataaagaaggattaaaagatcaggcatccgcgatcggaggaaaagagcaccgtcaggagcttttagagagcccgatgtgggatttcattgttgataagaatacttcttacggcggaggcggatccacggacgtcggagatgtcagctgggtcgttccgacaggacaggtctacacgagctgtttcccggcaggtactgcgctccactcctgggtagcggttgcccagggtaaatcaccgattgcccataagggaatgctggcggcagcgaaagtcatggcttatgtcggcgctgagcttctcctgaatccggaactgatcgaaaaagcaaaggcagactggagggaagagctggacggagagacatatccgaatccgcttccggcagatctgaaaccgtcgatctggtaaggagatcgtgctgttggtgatcctgcataggaattggattgtttgaactgcgattgcggtgcgcggctgagctgtttttgcgcaccgcgatcggtaaaacaaaaaattgaataaaaatttcaaaaagtgttgacagaaacgaaaatatgtagtagaatactttttgttgagtgagttgcggttcaccaagacttctcaagtgtgcgtcagtagctcagctggatagagcatacggctacggaccgtagtgtcgggagttcgaatcttctctggcgcgctgattaaggcatctgcattagcaggtgccttttttcgtatcataggagacagcatatgaagagaaagacagaacattttacatatgaactgatccgggcgaagcgcaggtccatgtccttaaaagtggatctcgacgggacgatcacggtccgggcgccttaccggacgccggtgcagacagcggactggtttgtcgagggacaccgggactggatcgaggtgcgcctgaaagccggagagcggatcatggcggagcgtccgtcctacacggatcaagaacgggcggaaggcagaaaacgggcagcagaggcgatcagagcccgatgcagccattatgctccgctcatgggcgtctcttacgggacgatcacgatcagggagcagaagacccgctggggaagctgcagtgcgaagggaaacttgaattttaactggaagctggtgctgatgcctccggagatcctggactatgtggtggtgcacgagctcgcccacagactccagatgaaccacagcgcggcattctgggcggaagtcgggaaaatcctgccggattacagggaacggcggcagtggctgaaagtaaatggacagaaatactgatggaaaacttttatctggcagaaaaacggtaaaaaataacgggagaaaaacatggaggaaaagaaagaactctggatggtgcagacgaagcgggcggatttttccggtctcgccatgcggctgggagtcagcccggtcgcggtgcgggtcatgagaaaccgcggactgacggaagaagcggagatgagaaaatatctttatgggacgctggacgatctctatgatccgcgtctgatgaaggggatggagcaggcggcggagctgatcgtaagaaagctgaaagagggaaagcatgtccggatcatcggggattacgatatcgacggcgtgtgctcgacatatattttgttaaagggatttcagcgggcggcaaaagaactatcgcagcggtgctcattggaggcaggccgatacagcgtcgagaaagaaaatgatgctcagatcgattacgagatcccggaccgcatcaaggacggatatgggatcaacgagtcgattatccgccaggcgtccgcagacggagtggatacgctcgtgacctgcgacaacgggattgcggcgctccgtgagatcagcatcgcgaaacagctgggaatgacggtcgtggtgacggaccaccacgaagttccggtcgatgagtatggtcagatcctgcctccggcggacgctgtggtcgacccgaagcaggacggggagacttacccgttccacgagatctgcggcgctgcggtcgcctggaagctcatccgggtgctgtatgagaagcttgggatcccggagagtgagtggatggacctgttggaattcgccgccatcgccacggtgggggatgtcatgaagctccaggacgagaaccggctgattgtaaaatatggtctcaaaaagatcggatcgacgaagaataccggactccggaaactcatagaaaaaaataacctggatattgaaaatttaagcgcgtatcatatcggctttgtgatcggtccctgcttaaacgccgggggccggttaaagagcgcgaaggtcgcactgaggatgcttttggcggaagatccggaatgggccggcgagatggcggatgagcttaaagaactcaacgatatgcggaaggacatgaccgcgaaaggggaggcggaagcgatcgagcaggtggaaaaacagtacatggacgataaggtcctcgttgtatttcttccggagtgccatgaatcgttagccgggatcatcgccggaagactccgggaacatttccataagccgtcctttgtgctgacccgcggagagaccacggcgaaaggttccggccgctccatcgagcagtatcacatgtaccagggactctgcaaagtctcggatctcctcgtgaagttcggcggacatccgatggcagcaggactttccctggaagaaaaggatatcgatgtgttccggaggcggttaaacgctgacgcagagctcacggaggaagattttgtgccaaagatctggatcgacgtcccgatgccgttcgagtatgtgaacgagaagatcgtccaggagttaaaggacctggagccgttcggacagggaaatgaaaaaccgctgttcgcgcagaaaagtctggtgatccggaatgtgagagttctcggaaagaaccggaatgtcgtaaagatgaatctcgtgacggagacggggcagccggtggacggacttttgtttgccgacggggaccggttccttgaggagcaggcgggaagaaatatgatcgatatgatctactacccggatgtaaatgaatataatggaacaaggacattgcaggccgtgatcagaaattataaatttcattgagagacgcggccgggtatgtttttccctccatcctcataaacttgctaaaagcaggagaggatggggggattttttgtttgaagaaaaaacagtctttgacgtaaaacgggagttggatgccggggatccgggcggtctgtccgacagggaggcaaaacggcggctgtccatatatggaaaaaatgaactgcaggagaagaagcctccatctgttttgaaacggctgatcggtcagttcatggatccgctgatctatgtactgctagctgccggtgtgatctcagtccttttaggggaacagggcgacgcggcgatcatcgcggcagtcgtgctcttaaatgcggcggtgggagtggcacaggaaggaaaggcgcagaaagcgctggattccttaaagaagatgacgaggctcacggccgtggtgcggcgggacgggagaatccttgaggtggattccaccgtgctggtccccggggatctcgtgctgctcagtgccgggcagcaggttccggcagacctccggctgatcactgcggagaacttaaaaacgcaggaatcggcactcacgggggagtcggttcccgtggagaaagacgcaggatttctggcaggggcgcataccccgctgggggaccggaaaaatatggcgtacatgtccacatttgtgacagccgggagcggcgagggaatcgtcacagcgacgggaatggagacggagatcggcgggatcgcaaagctgatccacgagacgccggaggagatcaccccgctgcagaagcggttaggagacctcggaacgatgctgagtatcctggcggtgggactctgcgctgttttatttttgatggcgatcttccagaagcgggatgcgggggagatgttcctgacggcgatctccctggcggtggcggcggtcccggaaggacttccggcggtcgtcacgatcgttctcgcactctcagtttccaggatggcaaaagtaaacacgatcgtgcggcggctgccgtcggtggagacgcttggagctgtcaatgtggtctgctcggataagacgggtacgctgacaaaaaacgagatgacggtgcaggcgctggacggggatcaggaactccttctgacggcatttcttctctgcaatgatgcaaaatgggggaagcgggaggtgatcggggaccccacggaggcggcatttttactctatgcggacagagaaagcgaagatcagaaaaagacggacgtcagagacagaaagaagagaggccgggaaaacgaaagatggtcagagaggctgaggagggagtgggtcaggagcgcagcgcagccgtttgactcggagagaaagcggatgacgacggtatgccggagacaggacaggatcgtctcattcacgaaaggggcgccggatgtgatcctgaagaggtgtgaccactataaggacgagacggggatccatcccatgacggagcagcggagacaaaaatatgaaagacaggtttccgcttattccacgtcaggcggacgcgtcctgggggcagccatgaagaacgggaatgacatgtccgagagcgggatgacattcctggggctggcggtcctggaagacccggtgcgtccggaggccgcggaggcggtaagggaatttcgccgcgccggggtcacaacggtgatgattacgggagaccataaaaatacggccctggcagtggcaaaaaagcttgggatcgcggattcaccggcccagtgcgtgaccggggaggaattagacaggatgggcgacgacgggcttgagaaacggatcggatcgatccgggtgttcgcgcgggtctcctcggaccacaaagtcaggatcgttcaggcatttaagaaggcggacgggatcgtcgccatgaccggggacggggtgaacgacgctccgtctttaaaggcggctgatgtggggatcgccatgggaaagaacgggactgatgtggcaaaacaggcggcggacatcgttctgacggatgacaatttcgccacgatccggaatgccattgaggaaggaagagaaatctatgaaaacatcaaaaagacggtgatatttctactttcttcgaaccttggggagatcatgaccatgtttttcgcgatcctgttttcgctgccagccccgctcaaggcaagccacatcctttggattaacctgatcacggattctctgccggcgctggcactggggacggatgtgtgcgacggaatggagctgatggaaaaggagccgcgaagaccgggagagagcctgtttgcccacggaggcgggatctgcacggtgttttacggatttcttatcgcactgatcagcctgaccgcttttctggtcgttccgacagctcttcttgtcgggagcggaagaccggctgcacttgccgggatcagaaaagtgctggaagatcccatgatcctggcgcactgccagacatatgcctttaccgtcctgggactgtcccagcttttccacgcgatcgggatgcgggatgtggaaaagtctgttttccggatggatcctgtgaataaccggctgatgattctggcgctggcggtcggattctccctgcagtttgtggtgacggaacagacgtcgctcgttgcggcgttccagaccgtgcggctcacgaagacagaatgggcaagacttctcatcctctccgccatgccgctgtttgcgcatgagcttttactcctgctgtcgcattttgggagaggaacggggcaggacagagatccatcggggaaagtccggtgatggaaacgagcactgcagagggacagaagcaggataaaatggggaaaatttgaggaaaagataaaaaaacaggaactgggtattcccaacaaagagaaaaattggtagaatagtggtgaaaattggtcctgttcatctggcaaagaaaatgttcgagaaaccggcagcgccggctcctgctacggagaaggaatgcccgtactgcaaaacaaaaatcaatatccatgcgacacgctgtccgcattgtacgtccgtactggaagacaaatagtcttttccgggcggtaacaggcagatgagccagaaattcccggcggatcaaggaagaaaattctgccgggaatttttgtttgccgggaaaagccggaacgtgtccgctttgagatcaggaaggaacaacaatgaagaataatattcgcattacgctggaatatgacggaagccggtatgacggctggcagaaacagggaaatacggagaatacgatccaggggaaactggaggcagtgcttttaaaaatggcgggagaggaagtggaagtccacgggtccggaagaacagacgcgggagtccatgcaaaaggccaggtggcaaatttccatgtggacgcgaagatctgcccggacggagagactgcgaaagaatacttaaacaggtatctgccggaggatatccgggtgcttgaggctgatctcgcaccggaacgcttccacagccgtttgtccgcctcctcaaaaatatacggatattatgtggagaccggggataagaagaatgtgtttgagcgaaaatatgtttacggatttggaaaaaaactggatctggaggccatgaggcgcgcggcaggcttcctcatcggggagcatgatttcaaaagtttctgtgcgaaccgcaggatgaaaaagagcacggtgcgccggatcgatgagataaagatcgtggaacacggaacgaagatcgaacttctgtatacaggaaacggctttctctacaacatggtgcggatcctgacgggaacgctcctggagatcggcagtggaatgcggaaaccggaggaaatgaaggtgatcctggaggcaaagaaccgggacatggcggggagaactgctccgccggaaggcttattccttcttcacgtggcttatgaaggcgagagggaaacggtatgatgaatcagaatgaagaacatgaggacatactctttgaggagaagaaaaagcagacggaccgaagggaagcgggaatgggagctgacggagaattctccgcggaatccctgaaaaagtggtttacgagggcaggaggagcgctggcggcctgcgcagctgccgtctgcctgatggcggtcctgatggctggaaagaatcagaaagagtccctgatcatggaagtgaattccgatatcctgatggaatttaccatgaaccggaggggcgcagtgctgtcggcatccggaaagatggcgaggacaaatgaaacagtctccatggatgcgtttgacggaaaaagtcttgggatcactgtggggaaaatctttgaccggctcgctgagaataacagtctgggcgaggacggaggaatcctgatctctgtccggagatccgatccggacagtaaggcgtcgccggagaagatcgtaaaagaagttcagaaggagacagagttcgagctccagaaaaaggagtccagggcgaaggtctacgtgtttgaggcggatgaggacgcagacacgaaaaaacttgtgacggaatatgggatcacggtgacgaaggcggagttcttaaagcgtctgtttgcggaaaatccggagatcacagtgccggaaaaggaagaactcgccgggtattcctcgaaacgtctggtccgtgagatcgaaggacatgaatatcagctgtcgctggagccggtgatcgtaaagacgacgtttgagaaggccagcgaggagagtacagaggaggagacaactgctcaggagagcacggaagatgtcttaaagcaggaaacagagactacggatgagtctgctgcgggcgaagagacagagactacggagaacgatggcctttcggagatgcagagacgccggaaagccctggaagccggagagagcgtggactgggtggaccaggatacaggaagctaccggaaagacggggatgacgaggacgatgagtctgaacgcgatgaatatggaagttctgaacggagacggaatcggaatacctgggggtatggaacttctcatgagacgaccggagttccggaaacttctccggcggagacggctccggctgtaactgcagcgccggaaactgtgccgccggagacagccgcgccgacagcctcggaaacaacggctgcggtcacggagaccaccgcggcgtccggaatgctgacaccggaaacaaagactccggcatacatgcagggccctggtttcgaagatccggacaatccgcggaatcattaagacaggtgagggaaaatgttcatccacaggcagtaattttccggactggaaagcctgcagcaggatccagtaaataaaaaataaaaaaattgaaaaaaatagttgacggatcagagtcgttgcgctataatatgtctcgttgatgcattgggctatcgccaaatggtaaggcaacggactctgactccgtcattttcaaggttcgaatccttgtagcccagtttataaactaaatattgtcaaagtgctttaagcacatattattgggctatcgccaaatggtaaggcaacggactctgactccgtcattttcaaggttcgaatccttgtagcccagctgataaaaggctgttaatctttgtgaatgcaaggcttaatggtcttttttgttactgtacacctttttcttgcgcttgacatccatttgtgttaatgtaaaggcgaagctaactgttcagtaggtctgcgcatttactgcgctgaccgtacgaaaacatgggctggcaggcaaaaatcccattgccgcaggcaatttttaatggatttttgctcgtgactgtgaaggtactgaacagttacaggcgaagtcggaaaaagagagcgtgtttcgcggaaatggatttttgagtcggaatacggatcttgccgatcggtgaggtagattatgtatgaattaaacagccgggtccggtacagcgagacggatattgacgcgaagctgtccctgaccgggatcatgaattatatgcaggactgttcgacaatgcagtcggaagacgcgggagtcgggatcggatatctggagcaggagaagaaagcatggctgttatcatcctggcagatcatgatcgaaagacgcccggcgctgggtgaaaagatccgcgtggtcacatggccgtatggggtaaaaggactttacgccttgagaaacttcgcgatcctagatgaaaagaacgaatatctcgtgaaggcaaattcctactggtttctcctaaatacggagacgggacgcccgatgcggatcatggagtcggacacagctccttacggggagtttagcccgaaactcgagatggaggatgcgggaagaaagatccaggtgccgaaggagatggaggagacgggacggatggtggtcatgaaacaccttctcgacacgaaccttcatgtaaacaatgcccagtatgtggacattgcgagagaacttcttccggccgggacggaaatttcggagatcagggctgaatacaggaaagcggctgtgctcggggatgagatcgtgatcaggagcgcgcgggaaggaaaatcctatctcgtatcgctctgcaatccggacggcgatgtgtttgcaaatatcgagttgaaagagatgtaaccggatcctgctgatggtttgcaggatcatgacagtgaaaataaaaagagaggacgcagcggaaagattctggttgctgtttgcatggaacatgaacaatgccggggatgcagctgcgggaggacgaaagacatgatggaaatcggaaaaattcagaaactgaaagtgatcaaagagaaggacttcggaatttatctctctgacggagataaggcggatgcccagggcgtccttctcccgaagaagcaggtaccggcgggaacgaagatcggggatgagctggaggtgttcctctacaaggattctgaggaccgcttgatcgcgacgacatcccgcccgaaggtcactctgggtgagacggcggtccttgaggtgaaagaagtctcaaagatcggcgcgtttctcgatatgggcctggagaaagatctcctgctcccgtttaaggagcagacccaccaggtccgcaaaggagagaaatgcctggttgccctctacgtggataagagcaaacgtctcgcggcgaccatgaaggcgtaccagtatctgagatgcgattccccgtaccacaccggagacgaggcggatggatttgtatttgagatcaatccggatatgggcgcattcgttgcggtggatgggatctaccagggaatgatcccgaaaaaggaactgtttaccggctacaaggtaggagatgagatccgtgtccgtgtgacgagagtccgtgcggacggaaagcttgacctcacaacgagagacaaggcgggaagccagatcttttctgacgccgatcttgtcatgaaggtcattgaagagtttgacggagtcctgccgtttaatgataaggcagctccggaagtcatcgcgcgcgagttcaaactcagcaagaacgcattcaagcgggcggtgggacatctgttaaaagaaggaaagatcgagatcacggagaaaagcatccggaaaatcgataaataaggaatcatggaggaaaatcacatgaagaaagttatcagcacaacaaacgcaccggcagcgatcggaccgtattcccaggcaatcgaggcaaatggttttgtatttgcgtccggacagatcccggtaaacccggagacaggtgagatcccggaggggatcgaggctcaggcagagcaggtcatgaaaaatgtgaagaatcttctcgaggcagcagggacatctgttgaccaggttgtaaaaacaagcgtattcatcaaaaacatggatgatttcgcaacgatcaacggcatctatgcaaaatatttcgcaaaagactgcccggcacgttcctgcgtggaggttgcaagacttccgaaggacgtccttcttgagatggaagcgatcgcagtaaaataagaatgatcgcgacagtcgccagggtctcgtacaagcgcggattttggctcgttgtttgcgtaaataaaaaaggcgaagactgtgagtgaaaacagtctccgcctttttggcaattttgataagaaattaactaaccgtctgtctgtttttatggaaaaagggcatattttcccaaaagtctgagtggtcctatggaatatgcatggaaaaaacgcatttttttgtggaataaccatatggaaaaacatgtaccgtttgtgtatgatggatacaatagatataacaataggttaagtctgcaatccggcagatgaatatatcatacagatcaggaggaaattgatgtccggtttagtgttaaaaaatatcaacaagacgtttccgggtgaccagcaggcaatccgggatttcaatctggaagtgaaggacagggaatttttgatcctggtgggaccgacggcgtgcggaaaatcgacgctgcttcggatgatcggcggacttgaggagatcacttcaggcagcctgctgatcgatgggatcgacatgacggacgcggatccgaaagagagaaacgtcgcgatgctttttaagaacagtgtactctatccgggaatgagcgtggaggaaaatctcatgttttcactccggatggcaaaaatgaacccagcggagatcgagagaagagtggaagagactgcaaagatcttaaatctttgggagactcttgacaagatgccggaagaactctcagccgctgatacatatcgtgtccttctcggacgtgccctgatgcgccgcccggggatcctgctcctggaccgcacgatcgcggaggcggatccggatgttcaggaagtgatgagaaaagaatttgcaaacatcaaccgtgagctcgggatcacagtgatctacgcgacagacagccagaaaacggcaatggcgctggggacaaggatgatcgtgatgaacgaaggcgtgatctgccaggaagactccgcacagaatatctataaccacccgggcagcctgtttgttgccggatttttcggaacaccgaggatgaacttatccatcgcgaaggtgacggaggagaacggcagtgttgtcctgaagttttcatcaggaacaatcccgctctcagagaaaaaaggaaaactcctcagagagctcggctatgtgggcaaggaggtctttacaggtgtccgcccggataaagtcgctccggcaaagaacggagagaacggagagatcacaggggaactcatcggaggcgcggagatcgatgatgcgccgtatatccgcttccgtgtcggtgagaatgaattcctggcaaaggcggaaggcggagaaaatctcaccggaaagaagatgtccttcaaaatttccggcgacaatgtgtacctcttcgacaaagaaacagaaaaaattattgcagaatagccaaaatatcaggcaggccggtccttttacggggatccggtctgtttttttagtgaaaaatacaaaaaaattctttccttttttgtgattttgcattagaataaatgtgaatatgtccatgcctgcaacgattgccattcatcccgaaaggaactgcaaaccgtggaacctgaggagaaaggtactggatcgtcgcgatactgtgaaaaggagaggacgctatgatttcaaatcagattttacagtcgaatatcgaaggactgaaagagattacaagaattgacctgtgcgtctgtgatgtggagggaaaggtcctggcttccacattcgagcatgcggaagagtatgaaagctccatacttgcgtttgtggattctccggcggacagccaggtgatttccggttatcagttctttaaagtatttgatgaacatcagcttgagtacatcctgcttgcaaaaggcggcagcgatgacgtgtatatggtaggcaaactggcagcattccagatccagaatcttctggtggcctacaaagaaagattcgataaagataatttcatcaagaacctgcttcttgataatcttctgctcgttgatatctacaaccgggcgaagaaacttcatatcgagacaaatgtaaaacgtgtcgtattcctgatcgagacaaagaatgagaaagatacgaatgccctggagaccatgcgcagcctgttctccacaaagacaaaagactttatcaccgcagtcgacgagaagaatatcattcttgtccgtgaggtgaaaccgggtgagacctatgaagatctcgagaagacagcaaatacgattttagatatgctgaacacagaggcgatgtccaaagtgcgcatcgcgttcggtaccatcgttggcgagatcaaggatgtttcccgttcctacaaggaagcaaagatggctctcgatgtcggaaagatcttctacagcagcaagaacgttgtagcgtactccaacctcggtattggccgtctgatctatcagcttccgcttccactctgccggatgtttatcaaagaaatttttgatggaaagaacccggatgagttcgacgaggaaacactcacaacgatcaacaaattctttgagaacagcctgaatgtctccgagacatcaagacagctctacatccatagaaatacgcttgtttatcgtctggataagctccagaagagcaccggactggatctgcgcgtatttgaggatgcgatcaccttcaaaattgccctgatggttgtaaagtacatgaagtacatggagaatctggactactaaattatgatagaaatttcaaaactgacaaagacctatgacaggggtacgaaagccctgaaggacgtgaacatcaccatcgatgacggggaatttgtcttcataaccggccggagcggttccggaaaatctacactgatcaagatcctcttgaaggaagtggagccgacctccggtcgtgttgtcgttaatgacatggacctcagaaagatgccgcgaagatatgttccgaagtaccgccggcgtctcggtgtcgtattccaggatttccgtcttttaaaggacaagacggtctatgagaatgtggcatttgcccagcgggtgatcggggagtccagccggacgatccgggaatcggttccgcagatgttaaagatggtaggcctttcttccaagtataagtttttcccgcatcagctctccggtggagaacagcagcgcgtggcgattgcccgggcactgatcaatcgcccggagatcctgcttgccgatgagcccacgggaaacctggatccccacaatgcgatggagatcatgggactcctggagaagatcaaccggcgtggaacaacggtgatcgttgtcacacacagccatgagatcgtggacctgatgaagaaacgcgtcatcacgatcgaccgcggaatggtggtctgtgatgaggaggaaagtgggtaccgttatgaggattagtacattctggttctgcatgaagcagggactggtgaatatatgcagaaatatctggttttcccttgcgtcgaccgcgatcatttctgcatgtatttttttattctgcgtatttttttctgtgatcaccaacatcgagtacatggtccgcacggcggagacaacgatggggatcacggtatttttcgatgagaacctgacggaggacgagatcaaagacatcggggcaaagatcgagtcggacaagtcgggaatcataaaagagattaaatttgtctccgctgaggaggcgtgggacagttttaagagcgagtatttcggggacgaggaggcacttgcggaaggatttgcggacgataatcctcttgcgggatcttcttcctatgagatccgcttaaacaacatcacggatcaggacgggatggtggcttacctggaaggactttccggagtccgcaaggtaaactattccaacagtgcggcaaccggactcgcgagctttaataagatcctgggactcctgttcggcgtcctgatcgccatgctgctcgccgttgcggtgttcctgatcagcaatacgatctctgtcgccgctgaattccgcaagaacgagaacaggatcatgcggctcatcggagcgacaaatttcatgatccgggcgccgtttgtggtggagggaacgatcctggggctgatcggagcggcgatcccgctgggagtcatgctgttcgtttaccgccagaccgtggaatatgtgatgaaccggtttgaacttctctcggggatcatccaattcctgccgatcggaaccttctatccgacgatggcggcgatcgccctcgcacttggcggtggacttggatttttcgtaagtttctttacgatccgcagagagctgcgcgtgtaggaggaagagacgtatgagaagatcaggaaaatttctggctgcggctttgtctgttgctctcgttctcgcgacaccgctttccgcccaggcgacgaagagcgggctgagtgatgcgaagagcaaaaagacggcgctggaagcggaaaaaaagaagacagaacaggaattaaagaacctggaaggtctgaaaagcgacacgactgcctatgtcaaaaagctggattccagtctggaatcgatcggaaatgagctttcaaagctgaatgatgacatagacgcgaaggaaaagcagatcgatacgacaaagcaggaactctccgaggcgaaggagacggagaaaagccagtatgaatccatgaagctccggataaaatatatgtacgagaagggcgacagcacctatgtggatcttctcatggaggcgggttccctctcggaacttttaagcaaggcggagtacattacgaagatctcttcctacgaccggcagaagcttgatgagtatgccgcaacgaaggagaagatcgcagagaaagagaaagctctggaaggagaacatgctgaactattaactcttcaggatgagacggaggcaaaacaggcgtccgtggagaagcttctcgccgcgaaacagacggagctccggaactacgagacgaagatcgcctccgcagaaggtcagatctccgaatatgcgaagtcgatcgaggcgcaggaaaaccagatcaagtccatcgaggcggaaatcaaacggaaggaagaggaagcgagaaagaaagccgaggaagagaagaagaaagctgctgcggcaaacaaggcggcacagacgtataaaaccgtgagccttggggacattagctttacatggccgtgtccggcgagcggacggatcacttcgggattcggcagccggaaatccccgaccaagggagcttcttcgaaccatcagggaatcgatatcagcgcgccgacaggaacttccatcgtcgcggctgcagcgggtgaggtcgtgatcgcgacttacagctcttccgctggaaattatgtgatgatcagccatggaggcggcgtctacaccgtgtatatgcacgcgtccagtcttctggtatcacagggacaaagtgtgaaaaagggacagacgatcgcgaaagtcggctcaacgggctattccaccggatcccatctccactttggagtccgggtgaacggttcctatgtgaatccgacgaagtatgtaagtccatagcggactttgacagagctgcgcagatcatgcggacaattcggatcgtgataggcttttctgtacataatggatttcagacagcaatggaagagaaaaatctccagacaaaaacagctgcagaaggatgaaggagagaagacattggaagagaaagagacgaaaaataaattctggaaaggcgtccttgtaggcgcgcttgtgacggcttttgcagggtttgcagtggttggatttgcaaccggaatatggatcatcgggcgtcgaacttcagagagtcagagcatacaggcgaccggaacggatgccaacaagctggatatgaaaaaaatcgagccgaagctccagtacatggagacgctgatcgacaagtactttctgttcgatgagaacatgacggaggaagaacagaagaagaacgggacagcggaagactggatctaccgagggtacatgtattctctgaacgatccgtattctgtgtattatgataaggacgaatataccagtctgaacgaggaaaattccggtacttactgcgggatcggtgttcaggtcagccagaatgtatataccggaattatcacggccgtgaaggtttttaaagattctccggcacaggaagccggaatgcttcccggagatatcctctacaaagtggaagatatcgaggcgaccggtgaggacctctctcttctcgtgagcgatcacatccgcggtgaggaaggaacgaaggtccatctgactgtttaccgtcagtccacggatgaatatgtggagatggatgtggagcgccgcatggtggagaatccgaccgtggagtatgagatgctggaaaacaaagccggatatatctcactttcttcctttgaggaggtaagctccgaacagtttaagaaagctgtggatgaccttacagcccagggaatggaaaagctgatcgtcgatcttcgaaacaacggcggcggtgttgtccaggcagcgaaggaaatcgcagattatcttcttccggatggaaagaccatcgtaagctttaagggaaaaggaatcgatgacagcacctactcttccgatgacggacatgaagtggatgtcccgatcgttcttcttgtaaacggcgagagcgccagcgcctccgaggtactgacgggtgccttaaaggataacaactgggcaacgatcgtcggagagaagaccttcggaaaaggaatcgcccagggagtgttcaatctcccggacggcagcggcctgaaactcacaacggcgtattattatactccgtccggtgagtgcatccacaaactcggcatcgagccggatgtgacagtcgcactcgctgaggatctgaagtcaaagatcgagatcccgaagagcgaggacaatcagctgcagacagcgcttgaagttttcgacgaaggcgtcgatgcggtaaaagcgaagatttccgaggagaccggagagacagaagctgcgaatgatgactttgaagcgaaggtaaaggagaatctggagatcgagaaagagacaggggtggagaagtaggacctgcgcattagatcctgagaaattgataacggggaaaattgaatatctactatattatatagaagaaacaggatgctccctgaagcgaaaagaggaaaaagtcacatgagaatggatctgatgcgaactttttcctctttgctgtttcaatctgtgcatggaaaacttcgatttgaacatgctcctgtcgattatccacaaattgaaaaaacccttaaaaaataagcaaaaaaggcttgatttttagattacgatgtgttattcttatctggctgtgacatgatagcgtagaagcgagaggttgctgcctgagaatggcaggtgttccgtggagcgaatgtcaagttaggaaactggcgacaagtcactgtaccaaattaacagctgctcagggtaaggggcagtaacaacgtgtgaatcggcatgatacacacgagaccgtgtacagtcaccgcttgtcgtacttcgattaaaagtgcgaaaaggaggcgactttttttatggcaagtcaggttatgagaatcacattaaaggcttacgaccatcagctgatcgaccagtccgctggaaagatcatcgagacagtaaagaaaacaggagcacaggtgagtggtccggttccgctgccgacaaagaaagaggttgtaacaatcttaagagctgttcataagtacaaagattccagagagcagttcgagcagagaactcataagagactcatcgatatcgcaagcccgagccagaagacagtagatgcactgtccagactggaaatgccggctggtgtttatatcgacatcaaaatgaaaaataaataattgaaaaatatttacttttcatgctactgaaatgtagccactaaaattagaaatcctgaatggttctgatataaaagcaacactactcatcctgaaagggaatcaacatcattacaatatgtaatgtcatagtgttccacctatgttgggctgctctaggat

SEQ ID NO: 2046 - DNA, 66955 bp, Unknown
  gut microbiota DNA sequence
gatttactattttactgatagacattgttggttctgtttctatcatgtaatgaatatgatctttatctgtctgcatatatctgataatgactttatgcttttgacatatttcataagaaaactgctttatatcatctgatatttattttgacatcagcaatttctttctatacttgcatacgaaaataatatgatactgtaacaaatatttgtgtctgttttttgatttccacgtttccataacgcaagtatagcacaaacctccgcttccggctaccttaacccaccgtctaaagccagtgggattgcggtagcccgatttcaagttaaatacatccatgatccatcatacggtcaatcggacatatgtgacttatgtaatttcttttcgtataagccgcacctcggttcctcttcacatggattccctgcagcgtctttgctcccgccgcggccggcttatcatttctcccggatcatcgtccgcacccggatcttctttccatccgtccggatcatgacggcgccggattttccggtctcgaggatctcagaaccggcttctttcagtcgttccttcacttccggtgccggatggccgtagcggttctttcttccataggagagcactgtgatcgacggggacagggtttctataaacctttcccctgaggatgtcgcagaaccatgatggccggcttttaagaccgtcacaggagtcaggatcccggaatccagaagtttttcctccccgctttcttccatatctcctgtgagaagcaacgaaaaccggtcaaacgtcaggcgaaataccagggattcctcattccggtctgcgaattccgtctccccgtccggggacaggcattccagcttcattccttttcccggaaaatctttccatatatcgccgcgttcggcataaaacacaggaatcccctgcttttttgccagctccgccatcgtcccgtagatctcacctgttcctgcttccggcatcataagaccgcccaccgtgatccccgattccgggtgttctaagagataccggatcccgttgatgtggtcctggtctccatgggtcatgacggcaagatccaggtgcgccacaccctgactcttgagatacgggaccagcgtcttctccccgaccgtcttctgctggctgctgccgcagtccacaaggactgctttgtcggatgaacgcagaacgatcccgtcgccctgcccgacgtcgaggaatgtgacggaaagacctgcggggcgggatgggagaaggaaacagaatgcggcaagccagcagacagtaagaccgaataggcgcttccttttatcgaactgcattctgcattttctctgatgttccaattgtctgactgatttacagactctctttctgatcatgtttttttctgaattttctgttttttgtccgtccgccatttctacatctttttttccagtctttcctctgtctttttctcctctttcccaaccgttttctgccatcattttcccaaatttttcccaggttttctctccccgctcatagataaccgctcccaggatcagacatccgtaataacaaccgatcttccacacctccggctgcccaaaaacgagctccgcccccggaagctttccggtgctgctgcagacgaattcataaaaacgcaaaatataatgtgcgcctccgagcatggcgctccccaccgatattgataaaaaggacagaccaagtccaagaaatcccgatatgaccacatacgtcatcagcgggatcacgataagatttaagaacaccccgtagagtgggattccaaaagaatgccagagaatgacgggtgccgtcaccatctggagtgaaagacttgtaaaaaaggcggacgccgccgcagaagaccgttcccccgcaaaaatcttttccccgcgagccgaaaacaatcgtcccgggtagactaacgatgtcacagcgagaaaagagagctgaaatgaggcctgcgtcaaaagaaaaggatgagcgagcaggaggcccacagccggaatgcacatcgccgtcggaagatcgtaggtcctcccaacagccgccgccagaaaggagagcagcgccatcgagaccgcccgtaccacagaggcaccggagcccaccatcgtcccgtagacacagagaaagccgcctgcacccactcccgcaaaccagaatcctgccccgcctttccggaatattttccagattccgagtccgacgatggagacatgaagtccgctgatcgccagaaggtgggaaatcccgtttttccggtaaagttcatagacggcactgtccagatcctctttctccccgaacaggaccgccgacaggatcccggcatcctccgggagtgcgatcgtctttaagcgttccgaaagagatcggcggatccggtacaggcggtcggcgatgatccgtgtttttcctccggtcaccgtatatccgtccgcgtagacgatcccggagatcccccgggacctgcagtacagacggtaatcgaacccgcccggatttctcgccggatccgcagtctttccctctccaaagacacggatcctttttcccgcagaaagtgactctgaattccatcccacactttcactttcatttgtttctgcttccacgatctcaaggtaacataaaactctccggaatctccccaccagtccgccgttttcctcttccgaggtacagtccccgagaacaacctccagcgtcccgtccttctccttcaccgaccggacggtcccgtttaaaaccactccatcctcctgttcctccagaaaaaatccctcttcccgcaaaaatgccgcctgttccgcctccatcctgagactccccacagccagtcccgtcataaaaagaaggactggcagcctgtatttgctcttccggcgcgcaaatgcgcacaccaaaaagagcagccagactgccagtccaaaaatgatctgctctgccgggatccacaagttcagtgcctctccaagtaccaatccccctgtcacacacagcaaaggtcttttaatcgttttttcctcctgcgatataatcgtagtttcgttcaaacaccgtgctcaacgggatctggtcccggaacacatcgtcttgggacccgttgatccggatctgcacacggctcaccgtggaaagttccgcgagggaatccacgatagaatagatcggaatgtatgccgccacatccagactgctgttcaggaatgccgcattaaagttgatcgagcagacggaatcgttgacggacacattcaaaagctttacatccgacgggatcgtcgcgtaatggccgagctcctgcggtccctcgatcagctgctccacgatcagacgttccagagaagtattgctgttttgcatgacttcccgtttttcttccaccagctgatcccctgtctcgttggcaaaatacagcgtcagctcggtccgctcgaaggaattgacatcccagatactgtccacgaaatctgacgccgacaacatcccgaccgggtttccggctgcatccgtgatcggctgctctgcacagtagatgctcagatactcgatccccgggatctgggtcagcgtctttgtgagagccgcccggcacaggatctcctgcacggaattcatcagcgcataattggcatccgcgtacaggtacagaacatttccttcgatccggtaggtgatcttttcgatccgctccggcagcactctctgacaatcgagatccgccggaacatttcccatcttatcgagcagctcccgcaccagcgcgtctgtatccgccgtttccgtccggtactcactcccgacaagctggatcccggatgcgtttaaatagtagatcgtataggcatttccgctctgctccacagctttttcccctgtacagccgctcaaagcaaacaaaagtgcgaagaggagaaaaaatgcccgaatcttcaacaatttcttcatttttccctcctacggaatatagatgagcgggatccgcaccatgaaggtgcttccctctccctcgacgctgtccacccggatcgcgccgtgatgcatcaggaccacgcttctcgtgatcgcgagtccgaggccggtacctccggtctcccgggaccgcgccttgtccacgcggtaaaaacgctcaaaaactctttccttaaattccgcagggatcccgatcccggaatctgccactttcagatagaagaacttatggtcagcatccagcgttacccggacccagccatcttctttgttatacttgaccgcattctccacaagattgtttatcgccagtgagaacttcacctcatcgatatcggccgtgacatcgcgcttactctcaaagatcagctcaatgttccgttttctggcgatcgggcgcaggcgctttaagaccatctcgatcagtccgttgatctggacctgcgtgcaggaaagctccgaggatgccttgtccatccgcacaagagtcagaagatcatcgatgatcttgctctcccggtcgatttcgtccgaaatatcatgcataaattcctggtaaagctccttcggcgcgtcctccattcccatcagggaatccgccaggacacggatcgacgtgatcggggtcttgagctcatgggagacattggaaacaaattcctgcctcgactgatccacagcctttagcttctccagcgtcttattgatcgtcccggagatctgcttcgtctcccggtatgcttcctcgttgacatcctcatccagatttccgtcacccgcgcgccggatcgacgcgatcagcgttccgaacggcttcatgatcaggtgaactgacaggattgtcacgatcagtacgataacgaagatcatcatctcgtacagggatgccttatctttcaggctctcctccaggctgtacatgctctccgtggacgcggtaacgatcatcactccggctgtctttcccgtcgtgatcgttcccgtctcctgctcaaattccgggatcgggatcgccaggacgaagtaatgtttcagactgtcgtaccggctcgtgttctctccctggaaacaccggatcacctcgtccgagatcagcgtctttccgtcagagatcgcgaacgtatcctcaacgatcttaaagccggaatttacgatcaggatccgcccgctgaagatatccgacaggagcgataattctgtgtcgatggccgcattatccagcgcggagtttgtgaggtatccgcttctcgacatcttattgctcaggatctgacactggttctggacatcgatgatcctgcgctccacctgctcctgccgcgaggagctggcgaggatccggctctccacgaggagcgggatcatacagaataaaacagtcaggatgatcagaggaagtttgacgctcggcgtatgtttccggtagatctcccggatccgttccctaatttttctcatgttcctcttccatctttcttgttgccgtcagcgcaaggctgcccggtccgatatggcaggcaatgctcagggaaagcggtgccagatagatatctgcgtccgggaatcgctcttccacttccttcttaaactccagagccgcctcctcgttgtccgaatgggcgatcgcaaggtggcagtctttgcactcactgtcatgaagtctctcatccagctctttctggatcgcattcatcatcagtgtcttcgcctgcttcatcgtgcgggcctttgcaaaggaatccagcttttctcccaggatgatcaggaccggcttgatccttaaaagtgtgccgagagccgcggccgccggtgtgatgcgtccgccttttttcaggtatttcagggtgtccaccgtgacaaagatcacggaatcagccgctgtctcctccaggagctttttgatctgtgcgccgtccattcccatatctgccagcatcatcgcgtccttcacggactgatactgggtcacggagatccggtgattatcaacgacaaatacctttccctcgtactcgtcctctcccgccagcatcattgcagtcgcgcaggatccggaaagtccggcggacatcgggatgtggacaatctgatcatactcttttaacagttcatcccacagtttcatgatggagtccggtgtcggctgtgaggttgagatatcggaattgtccttcagcctctgataaaactgctcctgggtcagtgtaatatcctcataatacgtttctccatctatcataaacggcatcggcaggaccgtgatccccatctcttttgcctgtgcctgggtgatcccgctgttgctgtctgtaacaactgcgatcttcatacaaaatttcccctttctgtttctcttcgtccgttactgtatcatacggatttttccattcagaaaattcctacctttgaaatgtaaccctgtcccgctgcgtttttcttttcttccgcgcggacagaccttcttcttattttaaccgatttcctatataaatggaagtccaaaactacccaaactgtggacgaatattcaaaaatatgatatgctgagcagtaagcgagtgaaaaacatgcttgcatgtttggcactttattttaaattctggagggaaaggttatgccttattgtccgaaatgtgatatggaatttgttgaggggatcaaggtctgcagcgactgcggcggtcctctcgtggaatcaaaagaagtcgctgacgcgatgaaacagaaagaaaaagaagaacagcttgccgtcatggcgcaggagatggatccgttctccggtgagatggccaaagcagaagacgcggatcccgacgaaatctcttccgccaaaaagaaaccggctgacgagatcgtccatgcctacgtcgataaagggcagcgctacgaggacatgagctcctccgcatccgcatttttcctggtcggcggggttctcgccgttggagccgcgctctgccttctcggcgtcttccatctcccgatggagggattccagaaatacatctttgagggggcacttgtcattctcgccgtcgccagccttgtcgtcgccgtctcctcaaggaaacgcgccgccgagttaaaagtggaagccgacgacgaaaaacgggagactcaggagatcatcgactggttcttaaggaactattccgcaaaagaactcgatgagcagctcttgatggaagatccggatctttccggtgaagagctgagtctcaagcgcttcgagctgatccaggatttcctgatcaccggccgcgatattccggaccaggcctacgcagattcgctgtgtgagatgctgtacgcgaagctgtatgatgagtaattttccattagacaaaagggactgtctggctgataatttttcagtcagacagtccttttatttgttacttttcatggtaggaattttctgaactgaaaattccgtatgatacagttctggtcgcggatttcctacctgtctttttcaccattttcggatatgactcgtcacacgctctgctctactcgaatttcacgatttccttctttaacctcatcatgatcttcttctcgagccgcgaaatataggactgcgagattcccatgagatccgccacctccttctgggtcatctccgccccgtcctggcgctttaggccgtagcgcagctccacgatcttccgctctctcggactcagccggctcaccgcatttttcaggagatccttttccacctcgtcctccatgtccttgtagatcacatcctcatcggtgccaaggatatccgataagagcagctcatttccatcccagtccacgtttaacggctcatcgatggagacctccagcttcatcttgctggttctcctgagatacatgaggatctcattctcgatgcatctggacgcgtaagtcgccagcttgatattcttcgtcggattgaacgtattgatcgccttgataagaccgatcgtcccgatagagatcaggtcttcgaccccgacgctcgtgttgtcaaatttctttgctatgtaaacgaccagacggagattatgttcgatcagctctgattttgcctctttttcctcctccgttccaaacttatttaacgcctccgtctcctccttcaaggacagcggtgccgggaggatatccgcgcctccgatgtaatggatctccccacgctccggccggatcattgtccggaatcccatcactttttttaaccgaaaccggtttggcatagaaattctcatgatcatactcattttctccctttcataacttatcagtgaaaagactttccggcaggatcatcgtaaaatcttttctgaaaaacagcggttccttcgagacagccacgaccggtctgtcaatccggacactcctgttctctccgtccatgatctccatccggtcaaacaggatccccggaagcattccgctttttgtccctaccgcccggtacgggatcatcaggacgcctgccggctcgctcccaaactctttcgcatctgccgctgcgataatgctgaccggctttcccgtcacaggttccacgagacggttcccggaatcctccatcgcggtaaactccttcgatcttccgttcaggaaaagccggacctgatacctcatttttccgatcaccggccgcttcacgagcgcctccgcaaagaagcggactcccgcacagaaaaatcccataaacagaagacttttccatccattgagaaagcagcgctctctcaagaccgcaagaccgctctgcaggatccccgctgacaagaccagcaccccaagctcctttcccctttgaaagaacgcttttttccatccggacactcttttttggggaagcgcagccgttataatcaaaaacccgtttatcagaacttttccgctttcccagaaaatccaggccgccaggcttcttcccgtaatccgtgctgcgattcctgacagctcaaggcaggaaactgcggtcccgcaaagtccgcctgcaattcccgccgccaaaagccggaaaacagacatcttctttctcccgagcaccgccgccagccacaggatcaagacatcccggtacgcctcttccagaaaaaagagatcggcgtaccattcatattccaccgggattccccctttccgcattccggaccgtcaaagaccgcccatactgcgtcagacaggattttcagttccgatcatccgtccccgaaatcctgatatcgttttccaacagtatacctgtcttcctctccggaatttgtcaaagcggggacgcgaaccctggaaactcatcgggttcttccaacaggttcttccctgttttttcgtaaaaattggaaattttcgctgatatttgcaggatctgtgaaaacagaagaaaaaaagaatgcggatccagacattttcctgtcgggatccgcgatgaatttttatagaagtgatgtataaaatctcaggcatgctgtaccttttagtttcacaggaagttccatcggaattttctatgaaaccaaaaagacccgggaagatttctctccctgggtcctcatatgttcatccttactgtttttaagcaacttgtccgttctcaggatcttatctgcggttctttaagaaatccgggatgttgatctgagtctcgccgcgctgtgccggacggtaaaccggtgcgtttccggtcggaatattgtacttcggagcaggctctgttgtagctgctgcctcagacggaacttttacggtcggagcagttctctggatcggagcctgctgagccggaacttttgtcttatagtttgtaaagtccttcattgcgcgctcaaccggtgtgtttgcgccgtgagcatcaagacctgtcgcgataacagtgatcgttacctcgtcctctgcgttctcatcgtacattgcaccgaagatgatgtttgcatcatcacctgcgagctcctgaacataaccggcagcctcgtttgcctcgatcaggctgatatcaccggaaatgttgatgatcacgtgggaagcgccctcgatcgttgtctcaagaagcgggctggatacagcctgttttacagcctcgagtgccttctcgtcgcccttcgccttgccgataccgatatgtgcgatgcccttgtctgtcattacagtctgaacatctgcgaagtcaagattgataagacccggaacgttgatcagatctgtgattccctgtacagcctgaagaaggacctcatcggctttctttaatgcatccggcatggttgtccgtctgtcaacgatctcaaggagacggtcgttcgggattacgatcagagtgtcaactgcgttctttaagttctcgattccctttaacgcgttgttcattctctgtcttgcttcaaaacggaacggctttgttacaacgccgactgtcagaattcccatatctttcgcgatctgagcgatcaccggagctgcaccggtaccggttccgccgcccataccacaggtaacgaataccatatcggctccctttaatgcctgggagatctcctcctggctctcctcggctgccttctcaccgatctccggttttgcaccggcgccaagtccttttgtgagcttctcaccgatctgcatagcagtcggagctttacagaactgaagcgcctgtttatctgtgttgataccgataaactcaacgcccataatattttcttctaccatgcggtttaccgcgttatttccggcgccgccgacaccgatcacaagaattcttgcggcattctctgcctcgtttatcttaatctctaacaagaatgtctcctcctttaatatctatcaatctattatatcttcattagcatggcataaaaatcccaagttaatctaacatatatcatatttgattttttgaaaaatatcaacctttaatttgtggttttttgatggtttttttagtttttcttcacgaaacggtatgtcgggctggaattcgtctcatcgtaagtatccagatacaaagtaccggagagaccggaaagttccggcatgatatcatgaagttccgcgacctttccgtcgaggctgtcagagttcccgagttccaccgtaatatctcccatcacaagctccgcctctttgtagctgctgtaattgatcctgtccacctggatgccgctgacgttcagtacctgcgtcagatttaagatctctccgaagatatcctgatctgccacaggaagcggctggtgcaggacgatatgtccgaactccagtccggtgatcaccggaactcccggaagctgttcagaagaactctcaacgatgatcccgtccttatcgaagtacatatagctgctcatataggaaacgcagcccacaacgctcttctcgaaaacaacgacctccaccttcgtgggactcttgaaattgatcttgtattcctcgatgaacggaatggacttatgttccttaaaccggttctgatagtagcagaacgcagaatttctcgaccatttcccgtcaaacaaaagcgactcgatctgttcctttgtatattgtttgttgccgctcacctccacatccttgatgcggaccgaaaagatgaggacgagaagaatgatgaggattcccagaatcaccccgagaatgatccccttctttcttccgtttctcctatgatacattccaaaaccgctgctgctccttctcccgaaatggatcccgaagctgcgccttccaaaaccaagtcctcttcttctaaataacattcctctcacccgttatctgcctgatcgcagcctgctgtaccgggaagtatttccggtacacagccgccgcatgatctctttttcttaaagaatattctcttcaatgtccgctcccagtattctgagatctcttccgatatcttcatatccgcgctttaagtgtccccggtccgagaccacgctgagtccgcctgccgacagagctgcgacgagaagcgctgctccgccgcgaagatccggtgtctcgacaactccgggaagaagcggatatcttccttttattatggctgtatctccgtgaaccgatacatcggctccaaaagacgcaaggcgcaccgccgcctcgaatctcgcctcgtatacggtctcccggatctggctctccccggttcccgacgcctccgccgcgagaaagaccgactgcagatccgtcggaaatcccggatacggtccggtatcgatcgtgatcccggccgggcgccgttccatcaccatgcggatcctcgccttcggaccggctgccccgaagatccggagtccggcccccattttccggagtgcctttaacggttccaccaggacgaccggctccactccggtgatctcgatctcgccgccggatgccgctgccgccgccaggtatgtcccggcgcagatcctgtctcccgctgtcacatggtttgtcggaaagagcttttccactccagtcaccgtgatggtcccggtccgctccccgctgatcttcgctcccatggaccgcaaaaatccgcagagttccgcgatctccggctcccgcgcacagttgaggagtttcgtcgtaccggacgccagcacagcagccatcaccgcattctccgtcgccccgacactcggatatggaaaacggaatgttgttccgcaaagcgtttccgcttttgcaatcagcattccgccatcatcaagtatctctgctcccattgcccggagcacatccagatgaaaatcgatcggacgttttccgatcacgcagccacccggataccaggtcgtcacctccccgcctctggaaagcagcggtcctaagagcagactggaagacctcatcttccccactgtctcctccgggatcactgtccccgaaagccctgaggcatcgatcataagaacatcatcctcaaagatcacccggcatcccaggtctctgatgatctccgccatgaggaacacgtccgagattctcggaacattccggatctcggtgcatccttccgtgaggagactcgccgccatcatcggcagtactgcattttttgaaccctggatctttatttttccacgcagaggcctgagcccctgaactttatatacctgcaaaccgattcccccgcatatgccgctataaaacagtatatgcggaaaaatactttttgttcctgttctgcgccttacattttcaggacgcttacgcctgttccagccggatccggttggacacgctcaggaccattcccatttccaccatcaaaaacaggaccgacgtacctccgtaactgataaacggaagtgtgatacctgtgttcgggatcacgttggtaacaacggcgatgtttaagacaacctggatcgcgatatgcgccaggacgcctgtcaccagcatcgcaccgaacagatccggcgcgtttcccgcaatgacaaggaaacggtacagcatgaagaggaacatgaagatcacggcgatcgcgccgaaaagtcccagctcctcacagatcaccgcaaagatcatatcattctgcggctccggaaggaaacttaatttctggatactctgtccgagcccctttccgagaagtccgccggaaccgatcgcataaagtccctgtaagacctgatatccgccggacttcgggtatgcctccggatttttccataccaggattctgctcagctggtaggagtgaaggattcccgctttctccatggcgatggccacagggggggcgaatacgatcacgacgatcagcgccgccacgaccaatataaacggccattttctcttgcatgcgacaaacatcatcacaaaagcgatcccgcagatgatgataccggaactcaggttgttcagcgtgacaaagagcgccagcggtccgagcagcaccacaagcattccccacacgcgccattcattgatccgttttccaagtctcgtgatgacgaccgcaagaaacaggatcatcacgatctttacgagctctgcaggctggaaacgcagggatcttgttcccagccatctttttttaccgtttactgcgattcccagcggagtaaaggttacgaggaattcgcagatgtaggatacgaccaccgccggaacggcaaacttcgcaaaaaagtggtagtcgatctttgagatgatgagcatcatgatgaatcccacaacggcgattcctccctgacgcatcatatagtaggtggacggctgcccgctcacctgcgcattgtacgcactggagctgtagatcatgatcagtccgaatgccgtcaggaagatgatgaccacaagaaggtcataatcatagaagcggcgggctttctttttccgtctttccccttcctgtttgggctctccccgcatctgcatctgctgtctgcggagcatctcctgcctctcctgcatttcctggcgctgctgcatcagaagctgttcccggcgctgtccttcctgctggcgtttcgcccgttctctttcgatctgctggcgctccacctgctttccggacatctgctggcgctgcatttgctgacgttttgcctgctggcgctgtaccgcctgtctctgtgcctgtgccctgccgccggcttttcgaaccttttttcgagccacgctaagcctccattacagggcgttgacgcattccttaaagatccgtccacgctcctcaaagttcttgaacattccccagcttgcgcatgccggggagagcagcacataatcgcctgcatttgcgtaggaagcacatacctgaacagcttcctgcatatcttccgcgtacatgatatcggtgataccatgtttcttcgcgcactcagcgatcttatctctcgtctgaccgatgagaacgagatagcggacttttccatcaaaactctcgatccactcgtcgtactcggaatgcttatcatatccgcccgcgatcagaagtgtcggtcccggcatcgccttgatagcctggatcgctgcatccgggtttgttcccttggagtcgttataataagtaacgccgaaacgttctctcacatactcgatcctgtgctcgactgccttgaattccttgcacgcctcgcggatcatatccatcgggacacctaaacggatcgcgatcgcaacagctgtcatcacattctcatggttatgtcttccgatgatatttaattcgttgacgtcaaggactttctcgctctttccgtcatgacggtagatgatgagatcgccgtccatgaagatgccctcgtcgagcttctccttgctgctgaagtagaggaccttgcactttaaggtctttccgaactctctgaggaccggatcctcgtagtttaatacgcaggtatcttcctctgtctgatttcttgtaattccttcctttacctgaatatagcattccatcgtcttatggcggtccaggtggtccggagtgatgtttgtgatcgcggacacgttcggatggaagtccatgatcgtctcgagctggaagctggaaacctcagcgactgtcacggactcatcagttgtctcgagtgcgtgggcagtatacggatctccgatatttcccactacgaatacgctcttataaaacttcttcatgatctctccggtgagcgctgtcgtcgttgtctttccgtttgtgccggtgatcgcggcaagttttccctttgagcaatggtaagcgagctcgatctcactccagatcgggatcttcgcctcatcgatcaccgcaacgaacggtgcctcgagcgggatgcccgggctgatcacgcataactctacccctgcaaggtctgtctttttcagttctccgagaacgatggtcactttcgcgccttcgtcaaattttgctttcagtttttcttcggaaagtttctcatttccatcataaaggatcacttcgccgccctgggcaagcagaagttttgctgcggaaataccgctgatccctgttcctgcgactaatactttctgtgacatggtttctcctcctatatgtttataatcccagataggcaaccaggcaaaggattgccgtaatgatcgagaatactgcgacaactctcgtctcggaccatccgcagagctcaaagtgatggtggatcggagccatcttgaagatcctctttccgccggtctttttaaagtatgtgacctggatgatcacggaaaggacctccaccaggtagatcagaccgacaagtgcgataaagatcggcatctgcatcatgaacgcgctggatgccacgaaaccgccgagagccagggaacctgtatctcccataaagaccttcgccggatatacgttgaacagtaaaaatcccaacagacttccgactaccgcaccggtgatcgggctgatcccgctgtcctcgccgatcgcgaccactgtaaagaaggtcgctacgaggatcgtcacgctcgtgcagagtccgtcgagtccatccgtaaagtttacgccgttgtctgtaccgagaacgataaagaataccgccgggacaaacagccagccgagattcagataatatccgttctcaaatccgccggtgaacgggatcagcattcctgttcccacatccccggaggtcatcagataataggtgaagatcccggtaatgataaactgaccgatgagtttctgaatcggattcagtccttccgaccgcttcatgacgattttgatgtagtcgtccaggaaaccgatgatcccgaatccgactgtcacgaacaggatcggaatgatcctcggatagctcttgatatagaataaggatgtgatcacggtcgccgtgagaataatgagtcctcccattgtcggagttccctgtttctttaaatggctctgcgggccgtcatcgcggacctgctgcccgaatttcaggcggtgaaggaaagggatcaccaccgggcagagcgccgcgctgatcgcaaaggcgataatgatcgccaggattgtctcatttaccatactgaacctcatatttccagttgcacctcatacttcctatgtaaatatcgcggggccggcctgtttttcatcacattttccggtctgccgcgtaaatagtatacgtccttttctcttaataatcaatcgaaatttgtatctgttccgtaccttcacgcccacgcgcaaaaattcattccggatcggcaggatccactctttccacatccagatacggcaggatatttgaaaagatatccgcgatcaccggagccgcgatcgtgccgccgtaatagatccccaccggctcatcgatcgtgatcagggcgatcacctgaggatcatccgccggcgcgaaacccaggaaagaagaaatatacttctttaagcttctcgggagcttttcggatgtcgccgtctttccgccgatccggtattccgggagctttgctcgttttccgctaccctccgctaccacctgctctaaaatatagcgcatggtctcactcgtggatcccgatacgacgccgctcctttccgggtaggaaaatttcctgtaaaacatcccgtccgtgctctccgcgctgaccgcgaagtgcggtgtgatccgccttcccccgtttatgatggaggaggccgtcgtgatgagctggatgggtgtgatctggaaagactgaccaaaggaaaccgtcgcaagttcgactaaccccatattttcctttttatgcatgatcgtcgccgcctcgcccggaagatcgatcccggtctttccgagaagtccgaactgttcaaaatagtggtagaacgaatccacgccgagtctctgtcccacgtcgatgaataccggattgcaggagttcatcgcgccctggaggaatgtctccgcaccatgtccgccgactttatggcagcggatcttccggtcctccacgatccggaatcccggacaggaaaatttatcgtccagatggaccactccggcctcaagtccggcagcggctgtgatgatcttaaatgtggatcccggctcatacgtatcgttgatacagcggttcctccacattttgttccgcgcatcctgaagctctgcccctgtgagtctgctgctttccccgctcaatgaaaacgggtcgttcaggtcaaattccggtgcattcaccatcgcgtagatctctccgttctgaggattcatgatgatgatggagaccgcctttgcaccttttttctccatgacctggtatgcagcctgctccgcgtacttctggatattcacatccagactcacggtcagggtatttccggggatcggttccacccgctcctccgcggcattttgaagttctgtccctttcgcgtctgagagtgtcaggatcagaccgtcctgtcccttcagatatttctcgtacatgacttccagaccaatgatcccctgattgtccgcccctgtaaatccaagaactttggatgcgagacttccgtaaggataatagcgcctgtagtcctcatcgacttttacgccggaaagtccgagattcatgatctcgtcccccaccgacttttccacattcgtccggatgatctccctggaagaccacttttccacttttttccggacttcctcctcggaaagatccaggatccgcgcaagctcccggatcactttctccggctccttcacctgattgtggatcacggacaccgtgcagaccgtccggttcgccgcgatcacggtcccggtccggtccacgatctcacccctggaggccttgatggtccgctcccgctcatggagcgcatccgccattttgctgtaatgatccgatcttgcgatcatcaggaaccccagctgtccgcataagcctgtcatcaggagcgccgagatcacaaaagcgaccaggatttttttcctgtgatatgtcagaaattccgccatctccaaaactttcaataaaaagtcttggtaactaatatacgggacttcccgttttatcatgcgcaaaaatccatgttctcagcttccggtctgcattttcctcttttccgttcgatccgctacatcgcaaggaatccggccagagcccgtttcgccccggtaagtctctcctcaaactgcggataaaaatcctcttcttttttataaggagacaggtaaaactgccggatcagatacaggctgatcgtcttcgcagcctgtccggacgtatctttcccgatcacgcgctccagatcctttaaaaaataatgccaggtacagacaaaatcgtcatagcgctttggctccggtatatcgatccatttcctgacttttactttggcgcgggtctccttcgcgcactcgtagacctgtaaaaaatagtggaatccgccgtcctcatagatccttccgagaggaaacagtcggcagatccccggacggtacgcatggatcgtgcatcgtccatttgcgtccagaaaagaacaggtctcttcctcaccgctcattttaaggttcgggagaatgatcccgtccaccacatttaactccagcggtcccgccaaaagcgcctcaaacgtttttccggtcccggctgtcatgcggtacgcgtcaaaaggatcgaggaccacggaggtccccatcccggtacagcaggcgtggcagccctcgcacccggcgcagtccgccttcaccatatcatccaggccatagagttttccgtcggaaacctctgccatatccatctctctgttcatcgtcttctccccacgtggcaaaacacgctccgcgcatttccccattattgtgacagcagccagagccctgcgcattgcgcggactccggcttatcgtttgcgtaatttcatgcagcaggcataagctgaccggtcttcaccggaattactgtgcagcctgcgtcgtctccatcgtctcttccgctccgtcctgcacagtctccgtctcctgaacggcttccatgctctgggcttccgctgtgcccgcatctgaaccatcggaagtgtccgccggcatatcatccggcagcccgagaccgtcatcaaacgggaccacttcatcctgcggtgttgtctcctgcgggatcacatttccgtcagcgtccgtcggcgcttctgtctccgcctcagactctcctgttccgggctccagtccgtcttcattgttgttcgtgatcccctcactctggtccgcgagacttgcgtcctccgccgcggtatccgtatccgggaacacattcaggtaaggaagagcctccgtcatgatcttctggaaaatctctgtagcgaatgtactgtgcgcctgctcttttcccggaaggttcggggtatcgatgaccacatatacaagaagctgcggatcatccgccggtgcaaagccgcagaaagatacgagatagttgtgtgcggaacgcggaagcttctccgctgttcctgtctttccgccgaccttatatccggcaacacgtcccgcttttccggttccttcctcgtcatcgacggtcatgaacagtgcatgacggataaattcgctggtggactcggatatcgtctcccgaaccaggttcggctcgatctttctgacgactgatccctgatcattcacgatctgttttaccacatgcggttcatagtaggaaccgccattgatgacagaggcgaatgccgctgccatctggatcatcgtgcagttataactctgtccaaaagagtttaccgcaaggtccgtcggtcccatattgtcggaattgtagatcagtccgtacgcctcacccggaagatcgatcccggtcttctggcccataccgaataatttctgatatttcgcaaagcgctggatcccgagttttgccgcgatctgcatcatgacatcgttgcaggatttcatcagggactgctctaccgtgaggatcccgtgtccatagatgctgacacatttgatcctgtatccgccgacatcctgtccgccgtcacagaggaatgtatcgttttgtccgatcacgccctcctccagaccggctgcaactgtcatcggcttcgccggggaacccggctcgtaggtatcgtttacacagtagtttctccacatctggttccaggcatccatcctgccttcatccgtcatggcagcgatctcctcctgggagtaggcgctgctcagatctctcggattattcaggtcgaatctcctgttggaggacatggcaaggatctcgccgtttctcgggtccatggcgatgacagccgctgtcttgcttccgatcccgctcatccactcatcgatatatttttccacgatgcgctggatgttcacgtcgatggtggaaacgatcgtgtttccgttctcggcggacttgatgaccttctccatgttggcctcatcatccagatagccgtactctcttccgtttgttcctgtcagctggtcgttgtaatactgctcgatcccgccgcttccctgttttccgttatcataggaaaagccgatcacattgcaggccagcgtgttgtacgggtaaaatctccggtactcatcctcaaaccagacacctttgaccttctttccgctgtcatccttcgactttgcgtaggcatcgttcagttccttcttctttgcctcgaattcttccttcttatccgcggagatctgcttctcatacggcacatagtaggaattctcgtttgcggagatcacagccatcaggtccgcccggtcgtacccgaacacctcgcagagggcggacaccgtcggctccaaatagttatccttatcctggttgatctgattcgggtcgaggatcaggttgtagaccttctcgctcgtcgccagatacgttccgtttctgtccacgatatcaccgcggcggtacgggatcgtccggctgtcgtaggaggaatgctggttcaatacgatctgggtgtagtctgcgtttttatccttgatcatccggtataaaacaacgacaagaccaaacaaagccagcgtcgttacgagaaccgtaaccgccagcttttctttcatactcatggtaaaaactcttttattattaccgttccgggatgtcttcatactgtcttacatactcgctttccgtcttattgtataagcgaacctggtccttattggcataaaccattcccagctcctctgttgctaccttatacacataatccaagtccaccgacgtgttgatccttgtaagaagggcgtcgttgtcccctttcagcttttcaatactctcctccaggctttcaatgtgattcagtctcgccgtcacggaagactggagctttaaatagctcacacagatatacagcgtgcagatcatagccgctgtcagcagtaatacggaaaaaagattcatctgaagtgctttttcctgatttctccgaactgtaacggtatgggatgaattccgtttcttctgctttcttctttcctgctcctcatactgcggagcacgctcgatcttgcggacagtatttccctctacatattcggttgcctgtggggctcttctccgtctccttgctgccataccatcacttcctttctaaaaatggctgtaactgctcagtatcttcacagttatataggattcttcttttgcgatgctctctagcttctctcaaacacacgaagcttcgagctctttgatcttctgttctcttccagttcctcttccgacgggacgatcggttttctcgtcacgacacggcctttgctctttcttccgcacacgcacaccgggaagtccggcgggcagatacatggattttcattggtgcggaatctcgtctttacgatcctgtcctccagagagtggaacgtaatgatcgagaggcgtccacccggatttaagagatcgatcatcgtgtcaatggaatcgttcaacacatccagctcatggttcagttcgatgcggatcgcctgaaatgtccgttttgccggatgtccgccctctgcgcggatctttgcagggatcgcaccgcggatgatctccgcgagctgcagtgtcgtctcgatcgggtgaatctcccgctctctcacgatatgcttcgcgatattcttcgcaaagcggtcctcaccgtaatcgcggatgatcttatacaactccatctcgctgtatccgtttacaatgtccgccgctgtcttatcgtttctctggtccattctcatgtccaacggggcatcctcccggtaggagaatccacggtccgccgtgtctaactggtaggaagacacgccaagatccaggtaaatgccgtccaccttttcgattccaaggttaaagagcacttcccggatatttttgtagttgcttctgacgatcgtcactttatctttaaatgggagaaggcgctctgtcgcagccgcgatcgcgtccgcgtcctgatcgatcccgatcaggcgtccgttttcgccaagtctcctcgatacttcgtatgcatgtccgccgccgcccagtgttccgtccacgtaaataccgtccggttttacgttcagactgtcgacggtctccatcagcaggactgatttgtgttcaaaaatcatatgccaagaccttccatattttctgcaatttcttccatgtcatcatagacattcttctcgttccagactgccttattccagatctcgatccggcttccgacgccaactaagacaacgtctttttccagatgtgcgaattctcttaaaacagaagggatcaggatccttccctgcctgtccacctcgcaggcgcaggctcctgccaggaaaaatcttgaaaactttctggcattggcattcgtaagaggaagtgcgtggagtttttcttcaaaggatttccattcggaattttcgtacacgaagagacacccgtccaatccctttgtcacaacgaactcatcgcccagctgctcacggaatttggaagggacgatcagacgaccttttgcatcgattgtgtgactgtactcccctatgaacatgactctccccgttggacggtgactgttttttatccaccgatccaccattttaaaccacttttatccactttccaccacttctaatgtaatcttagtacatttactttaaaatagcaaggaatttttcactttttcatgtataaaaggaggtgcgcttttttagttatccacatgccggggaaacggtgtaaaaccggatattttcagagttttccacagaaaagatcccatatgtgccggatataactgcgccggatccctctgcctgtgactgatttcacacctaggcaaaagaattttcctgatgaaatgaaaaaagctgcccatccggacagcttttttcatttcatcaggtgtatattcgatttttatgtactgcggactttaatatcccgcatccatatactcttcgatcagccggtcaagctccacactataccggtagatcagatcatattcctcttttccatcaatgcttccgttcaggcgttttctcgcctcttcgatccgatttaccagttcttccctgctctccatatcagtttgctccctttctctgggcgaacgcttttctcctgtggtagatcagtaccacaagagataccgtcgccagcacaacagataacgcctgggataccgcaatcccggtacccggtatcaggagagaatccgtccgcaggccttcgatccatgttcttccgatcccgtatccggcaagatagatacaaagcatttcccccgtgaacgttttccgtttgcggaaccagagcataaacatcagaagtccgaaattccacagtgattcatagaggaacgtcggatggacctgaatgtactcgatcccgttgtcaaggatcagatggtcgaggaggttctgtgagatcatgctttcattcacgatactacgtttgagccgcatggcaaacagacagtccgtataacggccaaaggcctcgcagttcacaaagtttccccatcgtccgatcatctgtccggttacaagtccgaggcaggcgctgtctgccatggacaaaaaggaaagatggcgttttttcgtaaatacgagcagcgtcaggatcccggcgatcactcccccgtagatcgcaagtccgcctttccttaaattcacgatctccagcaggtggtctttgtaatatccccactgaaagaaaacatagtagatccgcgctccgatgatggaaaagataatcccgtagagtgcgaaatcaacataaatatccgggtcctgtcccctgcgcttcgcgtcggactgggcgaccagaagtcccatgatcataccgatcccgatgatcagcccgtagtatgcgaaggagatccctccgatcgaaaagcttttcaccatatgcgggatcgtgatcccgaggtgaacgaagcttacatctgctcctgtcatatcgtattttttctcctttatttctttggtgagttttattttactccgaaaacatgcaaaaagcaaacagattcgccagacactcctcatgtttattcgacaaaagttgacgattcctgtggaactttccggttacttttcgcgggcaggaattttctgaactgaaaattccatatgataccgttgtggccgcggattttgccgattcggaatgcgaagcatcggcaaaatcctgttacggtatattttatactttccattgacatcaattttataagtttttatactgaaaccataagatgttggggtcaaaaggttttgaccccttgtgataccgtattgttccgcacttcgtgctcccacaatactcgaaaacattcatctgaatttatcccttacaaggaggaacagccatggacattcaatcctatctcgatacactgaaatcatatgaaccttccatgatccggacgcgccgcgatcttcacagacacgcggagaccggctggctcgaataccgcaccaccgcgcttcttattaagaagttaaaggaacacgggatcccggtgaaatacggaaaagagatcatcaacaaggattatctctgggcttacccgtctgaaagcgttcggaaaagcaccatcgaccgggcgcttgcagagggcgccgacccggaaatcatcgaaaaaatggacggtttcaccggtctctgcgccgtgatcgagaccggaacgccgggacctgtcctcgcactccgctttgatatcgactgcaacgatgtcaccgagagcaccgatgtggaccgccagcctgtgaaagacggattctgctcgatccatgacggctccatgcatgcgtgcggtcatgatggacacgcatccctgggactccacacctgtatcgcgttgaatgagatcaaaaatgatctttgcgggaccatcaaagtcatcttccagcccgccgaggaaggagtccgcggcgcacagtcgatcgcgaaaggcgggatcctcgatgatgtggactatcttctcaccggacacctcgggatgggatggaataccggttccctcgtcgccctctcaaaaggatttctctccacaacgaaggtcgatgccgaatttaagggagtctccgctcatgccggaatgtccccgcaggacggaaaaaatgcaatccttgcggcatgctcggcaactctcgccatgcacaccgcctgccaggactccagaggcgcatcccggatcaacgtcggaacgatccagggcggaagcggacggaatgtggtcccggcggacgccatgatccgctttgagacacgcggggagaccgccgatattcaggagcttgtcctgaaaaaggcgatgaacgcggtaaacggggctgctgaaatgttcgactgctccgtggatacaaagatcatgggcagcgcttcgagtgccgacagcagtgcagagctggaaccgttcatcagggccggagccgcgagaatcccggagatcaccaattatgtaaaggaagccgctttctccgggtctgaggatgccacctacctgatggcaaaagtccagtcccacggcggaaaggctgcttatatgtgcatcggctccaatattgctgctccgcaccacaatgatcattttaattttgatgagtcgtccctgctcacggggctgcggctttatgtctccaccgtgtgggagatcatgcaccgctagtaaaagactacgtgatctgcacttcatttcggtcagcgcagaatatctgatacctgcattgtgaaaattttctcttagttgaagtttttcctccgcatcactgaacctgttacctcgtcgtgttcaaaaggttgaacttctcagaacaggataaattttgatacaaaaaagccatggaacagtacataatactcattccatggcttttcctgtattttttataattcttctgtgatagtcatttaacagctcacatttcctgttattctgagattgtcacaacaaactcacagactttctgccgggatcgtatctattgtaaaaatttacgatccagttgaaaaattatacgttgaatctaaagagaacaacatctccatccttcatcacgtaatccttaccttccatgcggacaagacctttctccttcgcaccgttgtaggaaccgcagtctaaaagatccttgtagttgacaacctctgccttgatgaatccgcgctcgaagtcggagtggatctttcctgctgcctgcggagcttttgtgccaaccttgatggtccatgcacgtgtctccttctctcctgctgtcagatagctgatcaggccaaggagacggtagcttgcagcgatcagcttgtcaagaccggactcttttaatccgaggtcgtctaagaacatcttcttctcatcatcgtcgagttcagaaatctcttcctcgatctgggcacatacgacaaatacctcactgtcgttttctgccgcgaacttgcggacagcctgtacatgcgggttggaagctccgtcatctgtgagatcatcctcaccgacgttcgctgcgaagatcaccggtttccaggtgagaaggtcgagagatgcgacaaatgcctgctcctcctcgtcctcgcactcgaagctctttgcaaggttgccgttctcaagatgttcctttacggcctttaagatatttaattccttcgcgagtgccttgttggaagctgcgccttttcccatctttgcgatccggcggtcgatgagctcgatatctgagaagatcagctccaggttgatcgtctcgatgtcgcggagcgggtcaacacttccgtctacatggatgacgttcgggtcctcaaagcagcggacaacatgaacgatcgcgtcaacctcacggatatttgcaagaaactggtttccaagtccttcacctttggacgcgccctttacaaggccggcgatatcaacgaactcgattacagccggtgttgtcttctcagagtgatagaggtctgttaaaagttttaaacggaaatccggtaccggtacaacgcccacgttcgggtcgatagtacagaacggatagttcgcggattctgcacccgcctttgtcaatgagttaaataaggtactttttcctacgttcggcaggccgacgatcccaagcttcattttattttaatccctgttcgaagaacctttccatgcagggctcttcgcctttctttaattttcctgtacgcaatttttactttttcgatgcaactcccgctttccggcaaaaaagtccatcgcgactataaattatagcataagggctctgctttgtaaatcttaacaggaattttttgcatgacttgcatgactgccgcactgcctcacatgtctaccttgcaaaccaatccttcatgcactgaaggacctgtatcagttcctcttctttgatcacatacggaaccatcgcgtagaggtaatttaaaaatggacggctgaatactcctctcttgtaagcatactcctgatatcctttcagaacggccggatcgtagacctcaacgcagacacatccgcccatgatccggacttcccggatcctcgggtctgtgaaacctgccatctcgcggcgtgtgatctcctcgatctttctgatcttctccatgtaattctgcgtctcaaacagctcgatcgatgccagagccgcgctgcaggccagcgcatttcccatgaaggtcggcccatgcatcagggcatgttccggaacgtcatcgtaaaacccttcaaatactttccggttcgccacggtagcggcatggccgatatatccgcctgtcagagcctttccgagaaccagaatgtccggaaggacaagatccgccacgaagcggtttccggtccgcccgaatccggtcgccacctcatcaaagatcagtagcacaccgtaccggtcacagagctcccgcgccttttttaagaatgagacatcatacatccgcatgcctccggctccctggaggagcggctccaccaatacacagttcagccggtcatggtatgtctcaaacgcctgctccagcgccgtgatctccgtcgggatatggacgacatatgggcttgccccgtacgccttcagcacgaaatgataatcttcatcatcccctgcctccatcgtcttaaaagtgtctccatggtaggcatgttccagagccaggatcatcgttctcttttcatccccgcggttcatgtagtactgaagcgccattttcagtgcaacctcgactgccacactgccggaatcagagaagaaacagtagtccagatctcccggcagccaggatgccagcttttccgaaagttttctcgccggctcatgggtcagtccgccgagcatgacgtgggaaaacttttctacctgagagatgatcgcctggttgatgacgggattcttatatccatggatcacgctccaccaggaggaaacggaatcgatcattttctgatcctttgtatacaggtacaccccgtttgcgtccacgatctcgtacggtgccttcattgtctttaattgttcatatggataccagatcattttttctcttctccttatctcatctttgtttcctgctccgcctgtttcgcgctgcatgatttcccatcgtcatataaggacttcaattcctccgccccgatggaaagttccgtgtcaccatccgccacgcaggcgatgaccggaactcctgtataaaattcacacattttccggttgtcctcacagagcacgtctccctgtctgtagtggtttaaaatgatccccttcagagcgatcccctgttctttgaggtaatatgcagtcagcgccacgccgttgatcgttccaagccccgcgtccgcaacgatcagacagccaaggtcacaggcttttacaacatccgggaggcggagatctgcctcatcgaagcagagcggacacaggatcccgccgcttccctccacggtcacatattcgtatttttcacagacttcatggaactttttcagtaccgtttccatccggaccggatttccctccagccgcgatgccagatgcggggagactgccgtctcataaatgtacggacacatctcctccagcggctggcggatccccgacattgtttttacctgaagagcatcccccgggatcaggctgctgtccgcgcgtctctcattcccgctcattgccgccttatagtaggccgcgtccgctccgctctccttcagctttttcacgatcagaccggtcacatacgtctttccgacatcggttcccgtgcctgtgataaaaatatttctgctcatctcttatccaagtctcccttccctgatcatcgggatcatccgttttccgatcgccgcagccagaatgcacagcgcgatatcccccggaactgccagcaaaaagcagtataaaaacagcggccacagaccgatcggcgtgttcagcacgaaattactgatcacataatagtagaccatgccgaacgcatagacgataaaaaggccgatgaaatttgctgccagaagccgtccgtagccgggatgacttttctcattcgcgatccgtccggtcacataagcggccgccgcaaatccgatgatgtacccgaagctcggctgaaagatgtagccaggcccgccgccctgcgtaaagataggaagtcccgccaggcccagcacgatgtagatcacgaccgccagcgccccgtttccggggccgagaagaagcccggccagcatagtgaacagaaactgcagggtaaacggaacgaccggaacaggaaccttgataaatgccccgactgcgatcagcgcgacaaacatcgcgcacagtacaaggtcttttgttttcatacgcttcaaaatgatttcctcctcaaatacatgaacgtcccggaaatccggaacactttcccttgaaatgtctgaaatctccggcgatccggagcgtctcagctttctgcacatgcgcatgcttttaccgtctctcccataccttctgggacagccgccgccatcctcagatcccgggtggtatcacagagaagaactgagaaggagcttatcatagaatttttgtattgtcaacctattgtttttatacggttgacaattatattaaaaagataccgaataagctctatggcctactcggtatcctggtatcattacgtttatcgttcctgttcccgcgctcttcgaacaatctcacttcatccactcaaacgcgatccgcggtgttccatccggaacgtaaatgatcccgcatctctcaaatccctgtttttccagggctttctgcatgactttattatgttcgtgggtatcaatcctgatatgggagatgttggattttgcaaaatccatgatccgcccgatgacattgtgaagggttccgtcgctcgcgacacgatgtaccgcggcgtatggggcatcggatttccactcaccctgctcaatcaccgcgtagcatgggtctgcgccgatgataaaagcaaaggccgcatggatctcgcctgcttcctcgagaacgtacagatttcctgcttcaatatccccccgaagcagacgctccggagcatcttcgccgtcccactggctgaaattcccgtggtcacgcatgaactggcgggcggccgcgtagatttcatggattctcggaagatcggccggagctgcttttctgatcgtaaaggtatcttctgtcatggatttcatcctcctgcatatgtatatttttcactggcctgttttcgtcattgtatcacagcatattttgcaagacaatctgtcatttttgcgtaaggaccacagggaggaaaatccaccgggatcctttgcatcccgccctgtgatcctcagtgcaagtttcctgccactgcttattactttacgcagcaaaagcgtgagacttacttgctcttggtaaagtatttcttcagtctttcccagggcttaccatggaatcacctgttttctgttctgtacttcctttgtactgctcatagtatggtccaaaatccgcctgctatgcgcgctgataacaggttccctgttccattttttccatgaatcgcattccccgggcggtcacatcacctgaaaagctggaacacaccgcccgccgattccatcgcaaacgtcatttctttttttgtcaccggatgaaaaaaagtcagcgatgatgcgcaaagggcgatcgactctctctgtccgcaaaaatttccggctgatgttcttttttctgccgccatgccatacttcatatccccataaagcggcgttccatgatacgccatctgcacacggatctggtgatgtcttccggtctttaatgcaacttttacgagactcagcccttttccgggcatcccattctcttccccattgatcgtttttaacacctcataggagagctccgccttctttgctccggttatccccttatccacaacctgtgaataattcccgtccggtgttttcaccagataatccacatagttatccaccgtattcacaggctttccgtggacaactgccgtgtagatttttttcatcttatggctctgaacctgctcactcaaagcagccgctgcccgtttcgtcttcgcgtacaccattacaccggaaaccggcttgtccagtctgtggataactcccacatacggttccttccccggtgtgcatgatttgttgataaccaggtgtttttttacctcactcaccatatccggcgcgaatcgttttgccgcctgggattccactcccgccggctttacgacgacgatgatctcgtcatcctcgtataatacttttaacatcaaaatatttccccttgcatatttttatcgtaagtggtatagtatattcaaacatgataagtagttttcaaaactacatgtcatgttcctggtatttaatacaggttactcattcacatgattggaggaatgattatggaactgaaaataaaagatcccggaagcgcgctgactcactttatcgcaatgctggccgctatggctgccgcagcgccgcttctcgtaaaagccgcatccgtccccgggacgatgcatttaaaggcgctcagcgtgttcatcgtcagtatgatcctgctctacgccgcaagtacggtctaccacaccttcgatatctcggagcatgtcaataaacttctccgaaagatcgatcacatgatgatcttcatcctgatcgccggaacttacactccggtatgcctcatcgtcctcggaaaccgttccggctaccggatgctgtccctcgtctggggcatcgcgatcgtaggaatcatcatcaacgccctctggatcaactgcccgaagtggttctcctccgtgatctatatcgcgatgggctgggtgtgcgtcatggcgatccgtcagatcgtcgcagccctgactcctgccgctttcgcctggctcctcgccggcgggatcatctacacgatcggcggcgtgatctacgctctgaaactgccgatcttcaattcaaagcacaaaaacttcggctcccacgagatctttcacctcttcgtcatgggcggaagcttctgccactacatgatgatgtacggatatgtggctgccgcataaaattttcataactgttcagtaccttcacacctacaggaacctcccccggagcttcccttcggatgcatggcaagttacacgcaaaaatccattccagatcggctgcgccgatgggatttttgccttcaaacccatgttttcttacggtcagcgcagtaaatgcgcagacctactgaacagttacaaattttccaactacaccaatttctattgtcttcatttccggcgcggctaaaaaccgcgcctttttcagtatagcagacttcagctgctttgtcattctgaactgttttggcggttatcctgcctggtttcatagaaagttccatcggcatttcctatgaaacagaaaaagcagagcctgccagcatttcgccagcaatctctgctcctttattattgttcttatgtatgaccggattcttaccccgggcgcttttcctcacaagatccatattccggatcctgcctgtctttttatcgtttccgtctcttttcgtcccgcttccgcttctcctcgagcagccggttgaattcggcttccgcgtcgccgccttccgcaatgagacgctgtcttctcttttcacgccggagtgcttccgcttccgcctctttcttgttactctggatcctgaaccagataccgccgccgatcagggctgctgccgcaaggatccccacaatgatcaagacgatcttcaccggaaatgcagcttttacatctccgcttccggcctggtccgacgcgtcttcactgtctgccgcagtcgtcacatccgtttctcccatggtctccgtctctgtctggtcatcggtgtttccgtcatcggatgaaggatccgctgcgtccgcactttcttcggacggttcttccgcagccgtggtctccgtcccgcctgctgcctccgcagccgcgagcgcctccgcccccgccttcgtcatcaggtacgcggatccgatctttctctcgttataaatatagttcaggacgccgaccgttccctccggcgctccgtccggaatcgcaccgagactcagctccgcgtccgcaaagctcgcatccttcgggagtgtgatcttctttcccgcctggaccgccagatcagatggtgcatagcttgtcccgttgacatccacctggtcatcgcctgtgacatatcttgtctcattctccgcgatgtccacgttctggaaacggttcagtccaaactgcaggagattctttccgtctacaaaatactgtctcggacttccctttaagataacagatacgacacgtctaccgtccttctctccgtatgtgacgagtgtgtttcccgcttttaaaagataccctgtctttccggcaaccgcctccgaacagtagtacgggctctcggtatcctccgtgatcacaaggcggtgctcatttctcacactcaccccgtccgggttgttcgtggtcgcaccgaccttccatgatttcgcggagctgatctctaaaagcttcggattgctgtacgccgcagctgcgatctttgtcatgtcgaacgcagtgacgacctgatcatcattgttgagtcctgacggattcgcaaaatggctctccgtgcatccaagctccgcgatcttcgcattcatcatatccacgaaatccgggatgctgcccgcgacatgttccgccagcgcgttggccgcctggttcacggacgccaaaagcagcgcatagagacagtcctcaaccgtcatcgtatcgccagccacgaggcttaacttatttccgctgtccgcctccacggagttcatcgctttgtccgagtaagtaaccgtatcggtaaggtccgcatgctccagcactacaatcgccgtgaggatctttgtgatactcgccggataatattccacatggctgttctgtccgaagagcatcgttcccgtgtccacgtccatgacagctccggcttccgcctcgatccccgtatcggacggccagtccggtctcgcgaacgcctgtatcgtccccatctgggcaaatacgagcacgccgcagagtacctttgccagtttcttttttaacgtatgaatcataaatcttttctccctgtgttccggttattcggcccctgggccaccagctcctctttctgtttccgggaaaactgttttacctttgcttcccggctcatcgcctcttccttcgtctcgaacgtctcataccacaccagccgcaccggccgccgcggtttcgtatattttgcgccgcgcccggaattgtgcgcgttcacccgcttttccagatcattcgtccacccgcagtaaagcgttccgtccgaacactccagaagatatgtgtagttcatctgccggtctctccttctcaggttccggtacccaggcactccctgcccgcgcaccgcagcacgatcttccgatacttcgcgttccgtctttttacatattatgtaaacggcaatgggaccatggaatccatcaccgtcctccgaaagccagcgcctgcggaatctatatgaaagcatcgggatgccctgttctgttgtgatactgttattttatgcggcgtcatcagaaaggttccggaagctccggaagcacttttttcctttccggcgtgcgcaaaaaatccgttacagtacacgggctctccatgcccgcatactgtaacaggattttgccgatgcttcgcattccaaatcggcaaaatccgcgaccataacggtatcatacggaattttcagttcagaaaattcctacccgcgaaaagtaacaaaaagtcccactcataccattatataaaattttccccgaattgcaaccagacattcggggaaaataaaaatttcagccctgtaccgtttttaccaggatcagcctgtcaccggaccggatcgtgctgtccgtcagatgattcagttccatgatccgctccacgctggtgtggaacatccttgcgatcttccagagcgtatctcccggcttcaccacatatccgatgatccccggcatcttctttaacttctctgtatcaagcggctcctccgtcaccgctgccacagtctgcacacacacaggagtcagcaccagcacatccgccgtgatctgcgccttcacctcaacggcatccccgcctgccatgaccgcggaaagtccggaaatccccggcgcgatctcgtagaccgcatcctgcggcagtccgtccgcggctgccatcagatgaaacggcaggacctccgacgccgcaccgacaggcgcctgatcatccgccgtcaggtacagaagccggacctccagcaccccgtccatgtggatcccgtcctccctgatctgcacctcgtcgatcttcacatccccgtcagcatggcacatctgaaggatcctctgtcgcccggtgagctgtatcttctcctggatctttgtccgcacctggttccggaccgccagcgtatcaaaacatgcagtgcctgtctccgggatcacttcccggtccaacgcatagaggtcgctcaaaagctccacctcttcctcctcatagagcctgatatccagctccatgaccgcgtccacggcgatctcccgcatctccccgtcggcatccggctgcagctccagatcccggtgcaccagctttaccgtgataaacgggatcatgtcctccgccgactccgtaagctccacgtccccggaaaacggaacagtctcctcaaaacactgcaccggcatctgcccgccgcctgccgagtagactgcgaacacgagaagatctccgttgatatggatcttcccgtcgagcggcttcgtctccacatcctgaaggcgcatatcctgccacaaaagagtctccgcatctggattatttcccggtattgaaagtacctcccgcacccggaacgtatcccgccgccgcacagcgatcgccgccacggtcagcgtcttctttaacacctcgacctcaccgtcaaacttcgcatcggacgccgcctccatgtcccggatctcgtctgccctgaggttcagcgtcacgagtgccttgacattcagctttctcgaattgatgagactcacgttcagatcatccaactcccaccccgcctgaacataatcattttccgaaagtcccggcatatgtaccgtctccgtaaacggaatgctgcccgcgagcgccgtgagttccccgccgggacgccggtacaggatccgaaactccagctttccactcacctccgccttctcaccgggatttttcaccgagtcgatctttacctccccgttttccatgatcagctcctccacatcatccatggaatccggcacattaaaatcgtcatccagggtcatctgggacgtgacgttcccccggcgacgattcatgtggatatgcttcttcaaaagttccatcataaaaacgccaccatacctttccagtttatgcttcaggaaattgtatgatgacgtttaacattttatacctgctgtttacagctccttcttcgcctcttccagctctttttcaagctcccgcacccggcgctccagctcatcgatcgtgtcctggatcttacagatgtgctccatattgaccttcttcgccgaatccttcaccggaagaccgtccttcttcacctgtctcgccggaattcccgcagccgtactgttctcctccaatggcttcagaaggaccgcattcgccgcgatctgacaattatccccaacctcaaaagcaccgaggatcttcgctccggctccgatcaggacattatttccgatcgtcggatggcgctttcccttcttggttccgacgccgcccagagtcacaccctgatagatcgtacaattatccccgacaaccgtagtctccccgatcacgatcccgcatccatggtcgatcaggatcccatgtcctaaaactgctcccggatggatctcgatcaaagtaaaaaatctggcaatctgagagatcaggcgcccaagaaaccgcatattatgcgtccagaaccagtgagcgatccggtgccagatcagtgcatgaactccctgatacaacaacagaacctccagcgcactcctggccgccggatccctctcctgcaccgccttaacatcaagccagatatccttcaataacatccttttcctctccttctgtcattcatccgtaaccatcaaagatcacccagcccgttccggcacaatcccctccggacagcctgcagatccgccaaaataattaccagtattttaacagaattcgttgctaaactatcctactgaaacaccaccggcttatcccgaaactccgtcctcacgatcaacaccggaaacgactcttccgtccccttcgcctccccggcctccggcccctgaagctccgtccggatcacgatcgaattatccgtctcataaagcgccttcaccgccacactgtacccgccgcccttctgaggtccctcaccgatcacaatatacatctcctgaccgtccgcatatgtaagcttaaacgctttctccctcttcttatcgatcagctccttcagcgccgccggaatatccgtctccccgctgaccgtaaactccagatcctctccccttttctcctccgaatccccgggctgacatccagtaaatgccgcgatcccgcccaagatgaccatcaggactcccagcaccgtaagcacctttctcgcgcgttttggcaaccgtctgaacataaaataagatccccatcatggattttgttacaatcctattccggggatcctgaaattatgatgctctcacatcgttacaatccacgggcacttcctgcccgtgaaaataacctcatatctgcatttcagcgcagagatgaccggttcttttccctcagtcgctgtccggcagaaacttgatcttcaccatgatctgctttgcaacctgattctccgcaagctcaatatcatccacatgagtcgcgaacggcagatcgccctcaaactcctcaagctccacactgatccagttctgcgccgcatcacgggcattctcgatcgcgtcctctaagtcagcgccatctgcctcacacatctccagatccgggaaaaatgcgtggaaaccggttccgtcttccttctttgtaaacacagcaggatatgtaaatgtcataatactctcctttcccataaaacgaaaacaggccgcaggctgcaaagcaaaacgctgcaggctgcggcccatgttttatatagcgggtgatcttctataactgttcattaccttcccagttttcgattactcgttatcctctttcttatcagaatgctcacgtctgtcgtcgcggcgtccgcctcttctgtcgtcacgtctctccggacggtcgcttctttcgcgtctctccggacgagtcagcttctcaagatcagctgtcatgtcctccggtctcatcgtcaggttgattcttcccatgcggtcaacctcaacgactcttaccgtaacctcatcgccgatgttgacaacatcctcaaccttagcgacacgcttgtcggaaagcttggagatgtgaaccataccatccttgttcggagcaagctcaacgaatgcaccgaattccatgatgcggacaaccttacctgtgtagatcatgcccggctcaacatctgtcacgatgttcttgatcgtagcgatcgccttgtcgatcatctcctgatcagtaccgcagacattgactgcaccgtcatctgtgatgtcgatcttaacgccagtctcgtcgatgatcttgttgatcactttaccctgcttgccgactacatcgccgatcttagccggatcgatcgtgatctgggtgatcttcggagcatacttggacagagtctttctcggctcagagataaccggagccatgatgttgtccatgatgtagatacgggcttcacggcagcgtctgatcgcctcctcgatgatcgggcgtgttaaaccgtggatcttgatatccatctggatcgctgtgataccctcgtgagtaccgccaaccttgaagtccatgtctccgaagaagtcctcgagaccctggatatcggtaagaacgatgtaatcatcatctgtctcgcctgttacaagaccgcaggagataccggctaccatagtcttgatcggaacacctgctgccataagggacagagtagatgcacagatgctggcctgggatgtggaaccgttggactccatcgtctcagatacagtacggatcgcatacgggaactcttcctcgctcgggagtaccggtacaagagcacgctcagcaagagcgccatgaccgatctcacggcgtcccggtcctctggacggctttgtctcgcctacggagaaggacgggaagttgtagtggtgcatatatctcttagttgtctcattctcatcaagaccgtcaagacgctgtgcctcggaaagcggagccagtgtgcaggcatttaagatctgagtctgtccacgtgtgaacatacctgatccatgtacacgcggaaggatgtcgatctcagcagctaacggacggatctcgtcgatgcggcggccatccggacgcttgtggtcttttaagatcatctttcttacggtcttcttctgatactggtagacagcctgtccgatcagcggaagccactcttcattctcagcaaatgcctcttcgagacgctctgtgatctggcggatgttctcctcacgcttctgtttttcatctgtgaagacagcctcttccatctcagcaggcggaacgatctctttgatcgcagcaaacagctcatccgggatcgcgcagctctcgtaagtgtgcttctccttgccgcactcagcaacgatgcggtcgatgaacttgatgatctcctggtttacttcatgtgccttgaagatcgcatcgatcatggtctgctccggaacttcctttgcaccggcctcaatcatgattactttctctcttgtggaagcaacagtaagtgcaagatcagataccttcttctgtgcggaagtcgggttgatgatgaactcaccgtcaattaaaccaacctgtgtcattgcgcacgggccgtcgaacgggatatcagaaatgcaggtagcgatcgcagaaccgagcattgctgtaagctccgggctgcagtccgggtcaacagacataacaatgttgtcaagagttacgtcgtttctgtagtccttcgggaataacggacgcatcggacggtcgataacacgggaagtaagggttgcattctcggatgcctttccctctctctttgtgaatccgcccgggatcttacctacagagtataatttctcttcgtactctacacttaacgggaagaaatcgatcccgtctctcggcttgtcagatgctgttgcggtagaaagaacaacagtatcgccgtagtgcatgaaagctgcaccatttgcctgctttgcaacacggccaacctcaacagtgagggtacgtcctgcaagttccatggaaaaactcttaaacatggcttcgtctccttttcattcatttgcgacagaagaagccgaaatggatctgtccgtcaacaggccggaacctgccggacatccacccgaaactactaaactggacacgagttacaatccatgggcactccatgcccctgcattgcagcaagattcttccgatgtttctcatgcacactttagcggtctcggacgtttcttctgccaatattttgtttacttagataacacaaaggtggagtacacgaaaaacatgcgctccacccataagtttgctattactttctgatgcctaacttctcaataagagcacggtatccttcaagatctttcttcttcaggtatgcaagaagaccacgtctctgaccaaccatcataagaagaccacgtctggaatgatgatctttcgggttaacttttaaatgctctgtgagctcagcgattctctctgtaagaattgcgatctgaacctccggtgaacctgtgtcgcccggttttctgccatactcagcgataatagctgctttcttttcctttgaaatcattgtgatttcctccttaaaattcttaaaacttaccgatcaccaggtcccggttggagttatccgcagaccgagcgtcggcgcttttcgcatactccgacagtatatcatacctgtctgcaaaagtaaatcactttttgtagctttgcactacttttttaggcttcctcacttgcaaagttaaattccacccctctgtggaatttaatcctgcaaagtagaatttacttttgcaattcactttttttaagcgtatttgggtatctctctgctactttccttggtaatctcccacaaggaagcgcgaagcgccttcccaacctacactcccgacgattcccagcggtgagcttccgggctggggcgccttgatccggggatctggttcctcttagcccgcaggtaactgcgttggagaataggggacacttgtttgagcgaagcgagttgtgtcccctgttctccgcccttagcagttgcatgcaggcttagaggaaccatccccgcatcccgggcgccccggcccggaagctcaccgcgtaccccccgtcagcaacttctatctcatcaaaatcccggtccaacctcctgctccgtcgtcccttccgtctccggcgcaaaccccggtccgacactctcctgatcaccgcccgccgcaggcgttgtcggcgcttccgtagtcggtgccgctgttgtaggagccgccgttgtctccggtgccgctgttgtcggcgctgctgtcgtcttcggtgctgccgtcgtcgcagcagccgtagtcgccgccgtctcatccttcttcgttccactcgtcgaagcactctccgtaccgtctaaatggtagcacaggaccggatcgcccgccgaaatattctcgtagatcgtctttgcgaccgccggcggcagattgacacatccatgagaaccgttcgtcttgtagatcgtcccaccgaacgtctttctccagttcgcgtcatgaagaccgatccctccgttaaacggcatccagtaagataccggcgtcgcatatccctgtccctttaaagtcgcattccgctgcttataagtgatcgaatatgctcctgcaggagtactccagcccttcgccgcatttcccgatacgaaatccgcctggactaccagctttccctttacgtagaaataaagatgctgtgccgtaaggttgatctccacatatgtattcccgtaatcattccccgtccggctcgcgcccttctgggaatactccggctccctcgaggtctgttccccgtttttgatcaggctcacaagcgtcgctgcctccttcgcctgattgatcttataaccgtagcttccgccggtgatggaaaccgtcttcccgtaggatgtcttcagactcttcgctttatacgcagtatcataagaggcagccagcttcttgacatactcagtcgcctttccctcattgattccgacactcgttccgttcacagtcagccagttgcggatctcatctccgctcaaagtctcagacttgtcaccgaattgataagtgatccttgccccgacatacttgttcatcgtctcacaagccgtctttaacgcctcgtcctcggaagtgatggacggagacacataacatccctgttcctccagatccacgctctcctccagagacatgaccgcagcggccaccgcctctttcaccttgtcctccagaagctccgttccctcatcttctttgatgatcgtgtagcccccggacgtataatcagagatcttcgcgtcctgcggttctctcatattttccttatccatgcaggagagactgtccaccgcttcgcccagcatctcatcattgtatcggatcagcgcgtccgtattcacctcattcacggattttccgaagcggtattttccccactccatcggtttctgggccgcgatcgccttcgccagggtatcgtcaaactccgcgtagagtcccacttcttccccggtgatcgactcggagagatcctcacgcccgttgatcgtgagtttgtagccctttaactgctccatgatcgcgtcttccacttccgccgccgtctttcctgtcacatccatcccgtcaacgatggttcccggcagaaaacatgtcttgtattttaaagattcatgccagtaaagtccgccgccaacggctccgacgaggacgaccacgccgccgcacacggcagcgatcttcactgcaagatccttattcattccaggtccgcggtctcttccccgttttcttcctttctgggctttgaattccgcatatgtcatcgtcggcttctgcccggacgttcctttttcctcgccatccggcttattttctaactccaattttccttctccacttttccaatcattctgccgccttttttctttcaagatccaggcgcatccttttctgactctgttttatctgtattcagccaagatggcttttctgaaaagagtgatagcgttccctgcactccctgatatcatgatccagctgcgctttcagcgcgtcgatcgatgcaaacttcatctccggtctcacaaaatcgagaagttccactttcatctcttttccgtagagatcccccgaaaaatcatagagatatgtctccacaccgatcggattatccccggagatcgtcggtttcgctcctacattcgtaaggcctccgtagacctttccgtccacagtcacccgcgtcacatagacgccgaacttcggaagatgcttcacagccggcgggatcagattcgccgtcggatacagctttgtatgcccgatcgcatttccatgctccacttttccagtgacaaaataacaatatcccagcaggtcattcgccttccggatatttccatccgccagcatttcccggatataggtgctgctgatgatctttccttcctcatcacgctctttatccacgataaaatagcgataaccatactttccggaaagccgctccagcatcgcacagtccccggccgctttgtatccgaaatggcagtccggtccggagacaatgactccggcgttcatccgcccgacaagaatatcggagataaattgttccggtgccatatggcagacttcctcgtcaaacgggtactccacgatataatccacaccgacctgctccaggagcatctcgcgttccgggttcgtcatgatcatggtctgcatttttcccttcacgagcgtccacggaggcgtcgcgaacgtgaacacggcgatcttaaatccctgttccttccatttcagcatctcgtgcatcagcttctggtgacctctgtgaagtccgtcaaactttccgatgctgacaactgtcttctctttgatctgaaactctctggtttctgcgatgtactgcatgtcaatttcctcccagaaagattttctccggatagtacatccgtttttccgcgtcataccgaaatacgccgataaacgttccatccgaatggtaaacgcggaacacgtccccatctgttacattcttcaccgcgcggctgcggaacggatttccgttctttaagagcttatccagctcctccgtctccgatcggatctccggaagatctttaaagacttcctccaccggaagtaccacctcaccgaggcgcccttcctccttcagcttctgaagatcatccagtttcaggctgtctttgatctcaaatctccccactttcgtgcggagcagttccttcatgcatccgccgacggaaagcttcgcgccgatatcatggcacagggtccggatatacgttccctttgagcaggacacggtcatcgtgacctccgggagatccatcgtctcgatctgaatatcaaagatctttaccgggcgcgccttccgctccacggtctttccctctcttgcaagttcatataatttctttccatcgacttttaacgccgaatacatcggaggaacctggtcataatccccgataaaggagaggactgcctcacggacctgactttctgtaagtcctgacgtgtcctttgtcccgatcactgtccccgttgtatcctccgtgtccgtctccgttcccagaagaagaacagcccggtatgtcttgtcatgatcggtcagcatatcgcagagttttgttccttttccggcacacaccggaagaacgccttccgccgccgggtcaagagtccctgtatgaccgatctttctctgtccgaggatccctctcattttcgccacgacatcgtgggaggtgaatcctttttctttatatacgttaataattccgtcgtacattctttcctccgctcttatggacacacggtcccggaattttcattccagaaaattttcacccatgaagagcagcattttcatcccactgctctttgatctttccgctgatcttctctgcgatctcctccggctttcctgtcatcgtgcagcctgcagcctttacatgaccgccgccgccgaagctctgggcaatcctgctcacatcaacctccgagttcgtcctgaggctcaccttatattcgtccggatttcccgtctcatagagcaggaatacgacctctgcgccctcaatgactcgcagctggtccacgatcccgtccgtcgccttgaccgtgcatccgtattcctttaactcatccgttgtcaccacagtatagatgcagcggtcgtcgaggatcctgacactgtcgaggagcgcacgtccgtgaagttttgcctgaccgtatgtctttgcgaagaagctctcatcgatgatcttcgggaaatcgatccctttctccatcaggaaccccgcgatatccatggtcttcctggaggtgttggaatacttgaagacgcctgtgtcatgggcaatccctgtatacaggcactctgcgaccgctttgctgatcttgtcctgatcgaggagaccaaacagcacttcgctcgcggagctcgccccgctttcgatcacattgaccctgcagagacctttgtttgtgatatgatggtcgatacagaacgtgtcctttgccatctcccggtaaggtgcgaacgcaccgaggcgcggaacatcgctggcatccgatgtgatgcaaagatcgaatgtttttgttccgtcatattctgtgtgtacatcattataaccggaaagataggaaaatttcactcccattttctccagatagaccgaaacctcaagtccctcataattttccttcagataattataaagtcccaggcaggatccgatacagtccccatccgggtttacatgtcctaagatcacgatgctcttctttccctccagcatctcatcaagaattcccaaagctttcgcctcctcgtaatcagaaaaatccggcagaatccgcgccgcgcgcgtctgaccggattcctccatatgatcctccgcggctgcttcatttccgcagccgcggtgcgtcttctgttccgatcgttccggctcccggatactcctccggaccgctccgatcattccccagattttctactggtcgtcgttttcttccttatcatcctcatccggcagatcctttgtcacctcatcgatgagttttgacatgcggacgccgtactcgatggactgatccagcacgaagaagatctccggagtattccggaggttgatcttcttcgcgagctgggtcctgataaagccctccgcgctctttaagccgcggatcgtatcttttgcctgctcctcatccgcaagaacgctgatatacgccttgcagatcttgaggtccggtgtgaccgagacctggaccacacttgtcatcggatgaatgcgcggatccttgagctcggagcggatgatctcgctcagagctttctggacctcgccgttgatccggatatttttaacactgttttttctcatgatattacctcttctttaaaacctatctcggtacctctaccatgatgtaaacttcgatcatatcgtcttcctggagatcgttgaatccctcgaatacaagaccgcactcgtaacctgctgcaacttccttcacatcgtccttgaaacgctttaaggatgcaagcggtccctcgaaaatctgctcaccgtctcttgtgatgcgtgccttgcttccgcgggtgatcttaccgtcaagcacataggaaccagcgatcgtgccgactccggatgccttgaatgtctggcggacaaccgcatgaccggttacctgctcctcgtataccgggtcgagcatacccttcatggctgcctcgacatcctcgatcgcctggtagatgacacggtacagacgcatatcgactttctcgcggtctgcgatggacttcgcctgtgcgtctggacgaacgttgaaaccgatgatgatcgcgttggaagcggatgcaagggaaacatcggactcgttgatcgcgccgacgccgccatggatgactttgacaacaacttcctcgttggaaagttttacgagactctgttttacagcctctacggaaccctgtacatcggcttttacgatgatcggaagttccttgacatttccggccttgatctgggagaacaggtcgtctaaggaaagttttgcctttgtatcttcgatcagcttgttcttgctctcagcgatgaatgtctcagcgaagcttctcgcctctttctcgttctggtgggcgatgaagatctcgcctgcgttcggaacgtcattgagaccgaggatctcgaccggagtggacgggcctgcctctttgacacggttgcccttgtcgtccatcatcgcgcggactttaccgtagcagcagcctgccgctactgcgtcgccgactcttaacgtacctttctgtacgagaacagttgcgaccggtcctcttcccttatcaagctgcgcctcgatcacaagacctcttgcgcggcggttcgggtttgcctttaactcttttacttctgctgttaaaaggatcatctcgagaagttccgggattccctcttttgtatgtgcggaaaccggtacgaatacggtatttccgccccagtcctcagggatcagctcatactcggataattcctgttttactctctctacgtttgcgctcggcttatcgatcttgttgatcgcaacgatgatctcaacgcctgcggctttcgcatggttgatcgcctcaacggtctgcggcataacaccgtcgtccgctgctactacgaggatcgcgatatcggttgcctgggcaccgcgcatacgcatggctgtgaacgcctcatgaccaggtgtatcgaggaatgtgatcttctggccgttgtaatctacaacataagcaccgatgtgctgtgtgatgccgcctgcctctctggaggtaacgtttgtctggcggatcgcatcaagaagagaagttttaccgtgatcgacatgacccattacgcagatgaccggcggtctcggaaccatgtccttctcgtcctcttcatcctcttttaagagttcctcgatgacattgactttcttctctttctcgcagagaacgtcatattccattgcgatctcttcggctttctcaaagtcgatctcctggttgatcgtcacgatcgtgccctgtaagaagagcttcttaacgatatcagccggacgtaatttcatcttttccgcgagttccttgatggtgataacctccgggatcacgatggtcttgatctcctcgaccttcgcctcctccttcttcggctgcggcataaccggagcttttacgcccttctggccctttcctggtttgcctttcatctccatgtcgcggtctttctttgcgtcatgctctttcttgtaagcattcttgctctgcttcgtattctgctgcttctgtgcaagcggagtatcgaaggacggtttggacatgcccattccgccgcggtttccaccctgacggttgtcatttctgccctggaagccaccctggcggtttccatcatttcttccctgatagccgccctgacggtttccgtcgtttcttccctggtagccgccctggcggtttccatcatttcttccctggtagccgccgccctgacggtttccgtcatttcttccctggtagccgccctggcggtttccatcatttcttccctggtagccgccgccctggcggtttccgtcgtttcttccctggtagccgccctggcggtttccgtcgtttcttccctggtagccgccctggcggtttccatcatttcttccctgatagccgccctgacgattgccgtctctgctgccctggtaaccgccctgacgattgtcgcgattgccctgatagccgccctgacggttgtcacgattgccgtcgcggttcgggaacggacggctctctctcggctgggactgaccgtctgttcttccctggttcgggagcggacggacattctctctgagatcctttgcaggtgcctcagattttgtctcctgtttctgtgcaggtgctgccggtgtctcggctgtctttgccggtgcttctgccggtgcgtttcctgtcgtcggtcttacctgcatgccggaaccgttgttcggtcttgccggtctctgtccgccctgtgtacggtttcccgccgggcgcttctgtgtactgttctgcggacgataaaccgcagcaaatttcttctttgccggtgctgccggcgcattattttctccctcagccggaactgccggctttgtggaattctcctgattctgattcaatgtatctgttccctcttttttctttcctaaatccttttcaaactcactcacgctcgctacctccaaatcacgttacagtgcacagccacttttcgcccgtgtaccgcaactggatcttgccgatgcttcacattcctaatcggcaaaatgcttcaacagtgcctcggaaaaattcggatcgatcaccgccagggacgctctcatctgctttcccaggatgtggccgagttcttccttgtttccgaactcaaagtacgggactttatagtaagtacacatgttccggaacattttcttcgtgttgtccgaagattcttccgacacgatcaccagcccggcttttccggactttaccgctttttctgtggaaaactcgccgcttctgacctttccggccttctccgcgagtcctaaaagtccaaggaccttatttctgttcatcgatctgttccatctcctttttcagactttcgtaaacttcttttggaattgccattttaaaggagcgttccagtccacggctcttcactgccttttcaaagcatgccatggatgggcagatgtatgcaccgcgtccgttttttctcccggtcgcgtcgatggaaatcacgtcgtcagtaccttttaaaacccggatcagctcccgcttgtttttcatttcaccgcagccgatgcactgtctctgcggaaccttctttactgtactcactgtcgtcgttcccttctctcctattcttctgtctcggcctgtgcttcggaagtctcctctgccggagcttcattttctgccggagcttcttctcctgccggctctacatctttctcgtactcgccctcaaaaccttcctcgccgaagtccatatcatcgaagagtccaagctctctcgcctgtgtctcgctcttgatatcgatcttgtaggtggtcagtcttgcagccagtcttgcgttctgtccttctttaccgatcgctaaggataactggtaatccggaacgatgacctgtgcctctttctcgtcctcatccgcaacaacggagatgacctttgcagggctcagtgcgttctcgatcaggaatgccgggttgtcatcccagttgatgatatcgatcttctcaccgcggagctcatttacgatcgcgttgactctcgcgccgtttaagccgacacatgcgcctaccggatctacgttcggatctgtggagctgactgcgatctttgttctggaacctgcctcacgggcgatcgcacggatctcaacggtaccgtcacgaacctctgcgatctcggcctcaaacagacgtctcacaaggtccggatgagttctggatacggagattctcggtcctttcgggctgtccttgacttccaggatataaaccttgatacgctcggttctctggaaggtctcgcctttgacctgctcagcctccgggaggatcgcatcgatctttccgagatctacgctgacattgcggccgatgtaacgctgaacgataccggtaacgacctctttctccttgcactgccactcgcttaactgggatttccggctctcctcgcggatcttctgtaagatcacgttcttcgcgttctgggtcgcgatacggccgaaatcatgggaatcaatggggatctggacgatgtcgccaaggacatgtctcggagcgatcattcttgcgtcggcgaggctgatctgtgtgaccggatcctccacgttctcaacgacctctttttccatatatacggaataatcgcagccatccggatcaatgatgactttcacattgtcggccttgccgaaatggttcttgcaggcagtgagaagggagttctcgatggcctccagcaatgtgtccttactgatgttgtactctttttcgagtatgttcatcgattccatcagttccttgttcattttttatcctccttattaaaaatcgaatgccagacgaattaaggcaatgtcttttctattgaatgtactctcggaaccatcctcgtagcggatcgtcacggtgtccgcgtcatatgctgtgaggatccctgaaaaatctttctgtctgtcgatcgcgcggtacagcttgatgtcaaccgcctcaccgagacttctcttaaagtctttctctttctttaacggtcttccgagtcccggggagctcacctcaaggatatagctgtcatcgataaagtcctctttatcgagccagtcgctcagacgtctcgataccatctcacagtcatccactgtgaagccgccctctttgtcgatgtacgctctcaggtaccaggtaccagcttccttcacgtactccacgtcgaccagttcataattgttctcttccatgatcggggttaaaaacttctcgaccctggattcatattcctctcttcttgccatgggtttccaccgcctctctgccggaatattccggttatgcaaaacgaaagagtggacgtttcgtccactcttttgaccggttacttatgttatcgatagttatcgtaccacagaagctcggaaaaatcaaggggtttccttggaaatatgcctatttgcgggatttctgtgcatctttgccggatcgttctccctctgccagcgcactgcagcaggattttaccgatggttcttccgtctcattgcatggatgacggatttctgatatactgttcctatcttaattatttagaaagcagaccagataatatatgaaacgattcgtgatcgggatcctcgcacatgtcgacgccggcaagacgaccatgtccgaggcaattttatatgaaacaggaaaattaaagaaaatggggcgtgtggacaaccgggacgcgtttttagacactttcgcgctggaacgcgcccggggcatcacgatcttttcgaagcaggcggtctttccgttaggcgacgcctccgtgacgctccttgatacgccgggacatgtggatttttccgcggagatggagcggacgctgcaagtcctcgactatgcggtcctcatcgtgagcggggccgacggggtgcagggacatacggaaactctttggagactcttaaaacgctaccggatcccggtatttatttttgtcaataagatggatcagaaagggaccgataaagaagcggtcctggcatccttaaaagaacggctggatccggcgatcgtggattttacggggatttccggatacggagagattcttgactttgggaatgtttcgtcagacggttccggaagcggaatgacagtggactctttcgcacggtccagttccggaaatgagagatccggtgaagagatttttgaggagatcgccacctgtgacgaagagctcctggactcctacctgacagacggagtcttaaaaacagaagatgtgcgtaaagcgatccacgacaggaagttcttcccgtgctttttcggctctgccttaaagcttaccggtatccgggaatttctgaccgcattcggggaattcgcgtcatgtccggactatccggcagatttcggtgcaaaagtgtttaagatctcccgcgacgaagccggtgttcggatgacacatctcaaggtgaccggcggtggtttaaaagtccgggattctcttactgattctgaggaaaagatcaaccagatccgcctctactccggagcaaaatttgaggcgctcaaggaagcggaaccaggaatgatcgtcgctgtcaccggcatctccgatacaagaccggggcaggtcttcggatctgcctctgagagttctctcccgcttttagagcctgtcctcacctaccggatcctgctgccgttcgggaccgattcccacacgatgctaaaaaacatgcggatgctcgaggaagaagacccgcagctccacatcgtctgggatgagacactcggcgagatccaggcgcaggtcatgggcgatgtgcagatggagatcttaaagagccaggtaaaagaccgtttcggcgtggagatcggattcggggaaggaaatattgtatataaggaaacgatcgcaaagaccgtcgaaggagtcggccattttgagccgctccgccactatgcggaggtccatctcctgatggagccgggcgaaccgggaagtgggatggtctttgcagcaaactgcagtgaagatatgctggataaaaactggcagcgtctgatcttaacacatcttgaggaaaaacgcttccgcgggatcctgaccggttccgagatcaccgacatgaagatcacgctgatcgcgggacgcgcccacctgaaacataccgagggcggcgatttccgccaggcgacttaccgggccgtccgccagggactctgcgaggcgggatgtgtgcttctggagccttattatgcattccgtctggaggtcccatccgagaatctcggacgcgcgatggcggacctcgaccggatgcagggtgaattttccgcaccggagcaggacggcgcaatggctctgctcaccgggaccgcgccggtttccacgatgcggaactaccagcgggatgtgatgtcctacacgaaaggacgcggaagattgacgctcagcctttccgggtatgaaccgtgccacaacgcggaggaagtcatcgctgcttccggatatgatttcgattttgaccttcaggacccggcaggatctgttttctgctcccacggcgccggctttgtcgttccgtggaacgaagtgaaaaactatatgcatgtggagagtccgctcgcaaagcagcttgcgaaggaagcgcaggagcgggatttaagagaggcaaatgaacggctccaggcgatggaggccgatgtggcggccgggaaggttccggccggagcaggcggcggcagtgcaaagtttcattccggcagtccctctggtgctgtttctgaggcagcggcttctgcaaatacaagttccggctcttccggcggccgcggagacggctctctctccttctacgatgataaggaactccaggcgatcttcacccgtacatacggtgaaccgaagcgaaaactcgcctccgactatgactcccgcaccgtgatccgtgccaaaaatacagctcctgtaaaaccgtcaaaagaaaaagaggagccggaagacgaatatcttctcgtcgacggctacaatatcatcttcgcatgggacgagctgagtgagctcgccgccgtcaatatcgatgcggcccgctacaagctcatggacatcttgagcaattatcagggattccggaagatctgcgtcatcgttgtcttcgatgcctacaaggttccgggcggtgtcgagaaagttcagaaatatcacaacatccacgttgtgtatacaaaagaagcggagactgcagatcagtacatcgaaaaagtcgcgatccgcatcggcaggcgttaccgcaccaccgtagcaacctccgacggcgtgatccagctcatcatccgcagccagggctgcatcctctggtccgcaagagatttccgtgaagagatcgaacgcgtcggcaagctgatctccgaggagaaaggaaaacataccggcagtgcgaagaattacctcttcctgcacgccgatgaggagacgagaaaatatctggaagatgtgcggctggggaagaaaccggagatgccgtagtcatttttcgcaaatggcggaatttctcatttttctgccttgcgcggttgcctgcggcattctcaggcttcgcgcaagtgcacattcctggcacatactgcctttttccggaaagtttcatcgaattttccgcaaaaacaaaaaagaggccttcaccagtcttcccaattttctgccgctgacatattcagcttctgaaaatttggggatgaccgtgaaggtctcttttttatcttatctgatccattattttttcatggattcgattacgcattcatgtttctttgtactcttatcataattgatccccaccagcagtaaatttccatggtaatctttcaatgcattcccatactgcttttcttttatctgtgccagcgcggcatccgcacctttatcccactttaattctatgataattgccggtttatccagatggtgtttccgtgggatcatacagatatcagtaaatccttttcctgatggcagttcacgcacgatcgcataatattctctcgcaaaataaaatgcaagactgaccgtacaactaagtgaattttcatcattatactgaagaatagaaatctcttcatgtgccttatcgattcctgctgccactgtatcagcatccattttccacagtgcatccagtaatctgcgggatgcttccaccgaatctgcaactccatgccagctcatggtactgatcgcattgacatattctttcgaaacttccttattgggaatttccactgtcccattcgtactattgtaagtcagatatccgagatgtaccagcagcgtaaggacatcatcctttgtcgcaaaagtcgtcatatcgttactgaaagtaccaatattgacgtacactgcctcgcctgcaagcattctgacgactgaatcctgcagcccatccatattcatctggatatagatcttcagtgcttcataagtttccgtctgattccagtatgttccaaacttatgtctgagcatggcctctacaacagatttcgggctgtacatggaataatactgatccccggactgccggtgtgcgacaagcccatatccatcataccatgcctttgcctcgtcaaaatccatctcatatttctgacagagctgtgccacttcctgtccggtaaatccaaaatactccgcaagctcccccggatctgtcatggaatactctgtaaacatatttaacgcagaatgtgatccgtatttttttatcggaagaatgcctgtcatatacgcaagagcaacatactctttatcctttagccatgccctcagaaaatccagatatttcttctgtgaatcctgatcctgctggtattcccggaacaggcagtcccattcatcaatcaggatcacaaatgctcgtttcgtctttgcataaatatctttcattacctggatcagattactctcgtcccgaaaacgaacatcataaaaatgctccatgagatcaaacaccagatattttttcaacatcgaaagcatctcatccatacttcctgtcatgctgaggaattcctgtatgtttaccttgatcacatcatattgatttagatgagcacgataggattccgctttgctgatcttcagcgagcgaaataataaatctgcgtcttccccacgctcataataagcagcaagcatatctgctgccattgattttccaaaacgtcttggtcggcttacacacaggaacttttgtcttgtatccaaaactgcattcgttttttcgatcagacctgtcttatctacataaatttcagaattcaggctctcctgaaatcccttgtttcccggattcaggtaacttcccatgtgaaatcctcccttctttattttccgcacttaccaaggatctcctcacagatctcctccgctgtctttccatccgtcgcaacggtgatatctgcggccgcctcatacttcggacgacgtttttccatcagatcctcaatgtaagaaagattcatatttccattcaggaccgggcgctctgtgctgtccttgactctcccatagatcgtctccggtgtcgctgtgagaaggacgatctttccgcatttcttcataagacggacattctcctccttcagcacggctccgcccccgcatgagatcaccgccggatcccggtccgaaaaactgcggatcagctccgtctcaagtgaccggaaatatggctcacctttctccttaaagatctccgcgatctccatctgttccccgttcacgatctcctgatccatctccacctgctccgccccggtcatctccgccagacgcgccgcattcgtactctttccacatcccataaatccgatcagaaaaatatgttccttcagtcctgccatccttacattctcctctttcgccgcccgtgccacacagaatttccgttctgtcctcgcaggtatcattaagaaaagtatatcagatataaaaaagaactgcaagccggggattaccgcaggccctgccttgccgctatgtcgcgttacccccccccaagttttccccagaataatctgaaagctctcatttccgatgtatctcaacggtagctttccgccaaaccatccttcattcctatagcgccgatccaacccagcagtgagtttccgccagcacatcttgcatctctcttagcgtccgatgtatcccagcggtgagcttccgggcaggagtgcatgatccggggagctcaccgcgtaccactcgccaacatattctgcatttcatctctccattgcattcccccatccccactgctataatagaaaaaatgaaaataatcccccggaggtacctataaaatggaacatcagacacccaccccgatcaccggtcacaccgccctgatctgccttctcggcagtccctgcgcccacagcatctccccaatgatgcacaacgcatcctttgaagcactcggtctcgactaccgctatctcgcctttgacgtaaatgaagcaacacttccaactgctgtcgccggcttaaaagccctcggtgcccgcggtttcaacctgacaatgccggacaaaaacctcatggtctccctctgtgacgacctctcgaccgcagcgcggatcatcggcgcagtcaacacggtcgtaaatgaaaacggtcggctcatcggacacaacacggacggcatcggctacatgcagtccgtaaaagatgccggttttgacatcatcggcaaaaaaatgactcttctcggagccggcggcgccgcgaccgcgatcctggtccaggcggcactcgacggcttaaaagaaatctctgtcttcgtaagaccgaccagccgattctatgaccgcctggtacatactgtggacgagctcacaaagatcaccgactgcaagatcaaaatctgcgatttttccgacgctgaactcttaaaacaggaactcgcagacagcgcaatcctcacaaacggaacctccgtcggcatggctccgcacgaggatacctgcccggtcccggaagatctcgtcttcccggacggtctcatcgtatccgacatcatctacaatccgcgcgagacaagactcctctccatggcaaaacatcaggggaacccgttcttcaacggttcctacatgctcctctaccagggcgccgaggctttccgcctctggaccggaaaagagatgccggtggagcagatcaaacgtgattttttctccaaataagacagtctgcaagtttttgatcctgcatcccggatatgccggatttcacaaaaagccgatgaaatcagggtagctccacccgatttcaccggctttttcatttacgcgaacaacgagccaaagtccgcgcttgcgcgagaccttggcgactgtcgcgataacaaggggaaactcgcgaagcgtgttttcacttgttgatctgattcttttattttcctcaatacctcattttccgttcagaacattcctatccatgaaaagctgcccgaatcgctccttatttgtaaatataccgctttactgtgcatcgatgatctcctccgccatcgcgaacatctcctccgcgctcagctcctcgccaaacttgaacaggctgtacccctggccgtccatgtcccactcgaccatacaggaggttgtgatctcgatctcatcactgccgtaagcaaggtcaaagttgcccgcttcctgggcctttttgtcctcctcggtgagttcataattggccggcacaaatttgttgaccgtcttatagaatcgaagttccgtgccatccccgcacgtctttacatccgtcggagcgctcccgccgtccagcccgacttccgcagaaaatgtgatcggttccatcccctcttttccataagtaatgtcgagatggatccccttgcccagcttatttccatccttgtcactcgtctcatactccaccgggacagcactctcgaacgtatatccattggaaaactgttccgggaaatttaccttcgggccatgtttctcctgaagctttaacgcctgttcataagtatgcacctcatctctccggtcactgtgcgatgccactcccgcaatgttcccgatcgcaaatgctgtcatgctgccaaatacacagatcgctgccaccgcgatcactgcctttttcataaatcctctcttcatatgagtttcctctctttctatctgttcatatacatgtttcctgatccgcacctcctgcagggattcatccggaagttcgcctgcgcggctctcaaacatttttttcagtctttcttctaagataggatcgtccatgtttttcctccttcctcctgcgtgaggaccttctttagctgctccttcgcatggtacagtcttgatttcaccgtgccctcgaacactccgcagaccttcgcgatctcgcggatcggcatgtcattataatagtaaaggatcagaaccgtcttctgtttcggcggcagcttctccaccgcctcaaaaaggatccgttcctcctccttcatgatgcaggtttccaggaccgaccgttttgtgtcctcctgcccggatgccggttcctcctccggacgctcccgccctgtctttttgcagatcttccatgctgacctcgtgagtatccggtaaaaccatgtcttaaaggccgccggctctctgagcttctttctgtttaaatagcaggcggtaaatgtctcctggacaatgtcctcactgtccgcagcatttccggatatcagccatgcggctctgagcgccggcttctcatattgctccatcaatgttccgaatgcctccatgtcgccatcgatcatccgtctcacgatattctcttcatccatgccctgcctcctctcttttttgatgcatctgtcttatagagacaggaaccttgaggaaagttcattttttctaataatttatataaaaaagacaaaaaaattggcttcgtcacattcagtcttaacgctaagttgtctgcagcaatccgtaccttcgcacaagtacgcatcattgatacatcgtaccttcttatttatcaggaagtttcatcggaatttcctgtcagacaaaacaggacagtgctctacatttctgtcgacgcactgtcctgtatcatgatccgtttatttagtttacacacatgcacatccgatccgcgatcctgacccgtacagaccgatcgttctttttcaggggctccgtacatgccagactcatattctctcagtcacagcttgccatcaagcgtaaacttcctgactttctgcttttcgttttcctgaatatgattcgtcacagtttgctcccgcttgtaaacttcctgtacttctgaaccgccttttcttccgcctctttcatgatctcctccaccgagttgccctcgatgtcgagtccctcagcggtatagcatacggtctcattgatcccgtaatagaccttgcagagcttctccagatactcatatccgagattcagctccccgatggatccgccgctggtcgtcacataatggagactgtccgcatggcacagaccgcccggaatgccctttgatgagaacgtaaacgtcagacctgtcacgcagatctgctccagataacatttcatccgcgccgggaatgagaagtcccagtacggagctgcaacaacgatccggtccgcagccgcgaactgcttcgcgtaagtgaaaagcggtccctcaaaatttcctgctcttgtgagcgattcccggagcgcgctctccttacccgtgaagagtttcagatcttcatcctcaagatttaaagtctcgatctcatactccccgttctgattcattacctttaacaacgcctgtgcgagctgttccgtccttgagatgccgcggttgacgcaggcatcgatgaataataactttttcatagctgatctccctcgtttatgttttacccatgcacctgattctgctatattgatccagcttttacacttatcatgaagccaaaagcaatttcactgtttctgcacacatttcagaccgtctttatcacagattttcctttggctgtcacatattcagcagccgtcttgacaactccaggatctcctccgtgttcctgctgttgaagatctcaacttttccacaggattcccggtccgagagaagtccgcgctcctcaagacgccttttcgtctgctttgcggtcccgaatccgccgtcgtaaacgaaaactcccggcagatgtttctggatcacttcacggatcagcgggtaatgcgtacatccgagaacgaccgcatcgatctctgctttgtcgtacggtgcaaactgtttttccagataagcatcgagaaccggtccattgagcacgccgctttcaatatattccacaagtcccggacacggcatcttgatgatgttcgcatcgtcctcataaatatgcatcatcgaattaaatttcgtctgtgacagcgtcatcggggttgccatgacgacgactttggaatgttcctttgccttgaccgcaggttttaacgccggttcgatcccgatcaccgggagaacctcctcatatgcggctcgaagttctttgatcgccacacttgtcgctgtattgcaggccacgacgattgctttcgcgccccgttccagcagaaattccacatctttttttgtcaggtcgatgacctcctccggcgttcttgttccgtatggggcattcgctgaatctccataataaataaaatcttctcccggcatcagtttgaccagctctcttaacacgctgatcccgccaagtccggaatccaaaacgccaatcgggcgattgtctgtactcatttttctgtcacctcaccgttttttctgttcttctatatcactctgcctgccagcgcttccgtatcgctgaatctcctgccgcaattctcccatcgcttctttcaggaagtccgctctgttggcgcattatcaacatggtcttccctcatatctgcggagtctgctttttcaatcttctccgctgttactggattttccatctttcgtccatcttaccacattttcctccgtttgaccatccacagcctccccgctttcgctttttgtgcaatttttaagatttttgtcaaaatattttttatttttggttaatctgttttgcaaaatgctgctatactatcgctgtaacaaagagaacagcaaatgttcaaccaaacttaacaaaacccccttttcaaagctgagggctgctaagcgaatccggcagaacaaaagaagttgtttgccggcaatcagatttttggaggaaaagataaatgactactttaaaagctgaaaaaagaagcatggatgttaaggcaaagagattaagaagagaaggatttgttacaggcaatgttttcggacatgccatcgaaggttctatcccggtaaagatgaatgcaatggacgttgatcgtcttttaaagacagagcataaaggcggccagatcaatcttgatgtcgaaggtcaggtttacgatgtcctgatcaaggaagttgattacaattccatgaccagaaagatcgatgagatcgatttccaggcactggtaagtgatgagaaagttgcttctactgctgagatcgtgatcctgaaccgtgaagccgttatcggcggtgttcttcaggaagacttaagcgaggttgcttataaggcattcccgtccgctcttgttgagacaacgactctggatgccgctggcctgaaggtcggcgatactgtccgcgtgaaagatctcgagatcgcaaagaacaaagacatcgacttaaagactgatccggaggcagttgtactctccgtcatcccggttcacaacgttgttccggctactgaagtgacaacagctcctggcacagcagctgcagatgacaaagagaccaagtaattgctcagggatcgaatcatttatcaaataaagtcaaaactggcggtactgctcccctgtgggcggcgccgccagtttttttgcagaaactctgccaacaagttctgtccgatagatctgtcacgcataccgtaaatccggggccgggactcagccgggacattttttgatttgacaacttccacgttttctgctatactgtccctgctcatcggagggcttgtaaacgcatttacaaagctggataagatgccggaggatcgttcggtattttatccggctttttttgttattccgcggataccttttgcccacgcgaaaatttttcatggatcatttaaggagaaagtcagatcctgcagagcgtcacgaccgtgatcaccgggatcgcgatggggatcatcgtcctcgccggtctctgtcttggctatttttcgttctttcatggagacctgatggcctccctgttcgcgagagatcctgacgtcattctcgcggcagccacttatttaaaagcatatgccatcgactgcatcctgacctcgttcctgttctgcttcgtcggattcttcaatggaaacagccgcacgctctttgtcatgctgcaggggatcatcggctcattcggtgtcaggatcccggtcgcctttttcatgagccgtcaggccggcgtgaccttatttcagatcggtctcgcaacaccggcttcttccctcgtgcagatcattctctgtattgggtatttcctgatgtttcacagaaaactcagaaaggaaatgccgaaaagccctgaatcccggtcattataaaaagtctgcacatttattctgtcactgtgacactgaatacgcgattcgcatcttttaaagaatgtgctgagacaccttttctcgcctagagctgtcattttcagttaaacaaaaaggggatcagtccactgcaatgcacactttttgcgaattgcagtgcggtctgatcccttttcctctttgaactgaacattatctaagtccctatttacatttgtgtgtctgatgtatcaacagtataatgatacatttcacgaattgcgtatgcaattagaaaatcaagtagtccaaattccataaaatgaaattttagggcaaattacagacattggcttggctgtagtatttttaaacaacgtgtgttagactactgttatacaaatcggaatttgaggaggtgttcatatgaagagagcattg

SEQ ID NO: 2047 - DNA, 1346 bp, Unknown
  gut microbiota DNA sequence
aacgaaaaaaaattgcatcctggtatgttatgcttccgggaataccggtgcaggaaaagaggaagcttgagaaatccctgaagtacaatgtctggagcagtctgattcgctttatgatattatactttattttctcctgcgtctggctattcggggttggaagatacgatccttttgagagagtgaccggttatccgttagtgggtaagaagcctgttacagcagttgttcaggaagatggtacgagcgcatcggttaaagatcccaatgaaggagagcatgtcatttgcaacttaatggatatgggcattgatccaaccggttatacatatggagatcggctcactacatactggatgtgggatgaagaaagcaagacgtatcatctgatgacagcacttccggaaaaagaggcttcccgcatcgaatatatttttgatgcgtttatgctaactggttatttggcaattatggtgacagggattgtgatttttttcttaagaagacgcatttatacgggatggtttacgcccttttactatagaatagaaaaattctgttcaacttatgatgtgcatcgaaagtatccgggttacgatacagtggatgcgtttattgcttatggaaatgacaacctcaatgtagttgcacgtcagtttgcggctgttcacttgacgatcgatgaattaaagcaaaagagacggaatataatgatcgctacagtaacaggtatcctgatcatggcagctatcattcttgcaataaccctgatagtcagtgtgcaaacggctgtagaaaacagaaaaaatgaagaaagaatagtaagagttttggaagaacttcagtctgtgatggatggtgagattgagccgttaggtgatcggtcagaatattacaacttcgcggatatggtaaacagagcaaaagaggcatttacagatgaagaagtttattataaattattggcaacagatgaatatgtggcatggatcatcacaactgagaaaaagacaaatgtatattttgacagatacacaccgatagatgggaatgttggtgataaagatgttgtttataaactggaaatctccatggtatcggatatcatacagccggacgatattttacacgatcatacaggaatttttccagcagaaaagcattcctctgcgttcacacaggagtagtttatggcatatcaatataaaaaaagtaaataaaaagctattagtccctcagatcgaaattgattgaggatatatgccgaaatgggaatgagggagtaggaaagccggtaccattatacaaagtaaacattgaggggctgtcgcactaacaaatatttt

SEQ ID NO: 2048 - DNA, 14736 bp, Unknown
  gut microbiota DNA sequence
tgtaacaggaaattccgaggaatttcctgttacataaaaaggcactgacgtgccaaagatgcgcactcgcgcaaagatgtagactgtcgcaagcgaccgcgcgaggcgcgagaatgtgccaaggcacattcttttatattgaaaatcccgtacgatacagagacgcaaaaacagatagaaaagaggaaaaattatgtttcgcagaatcggaaaaaatgatccatgctggtgtgaaagtggaaaaccatattgtgagtgtcatatgacatttgaccagaagatcagtcgcgcccgcttcgcaggccacgaggttccgtcccacaagatcatcaagacaccggcacagatcgaggggatccgtgagagcggaaaactgaatgtagcagtccttgactatgtggcggagcacatcaaggcgggaatcaccacagaggagatcgatcagtgggtatacgactttacgacaaaacacggcgggattcctgcaccgttaaattatgagggattcccaaagagcgtgtgcacctccatcaatgatcaggtatgccacggaatcccgtccaaggatgttgtcttaaaagacggtgatatcatcaacgtggatgtctccacgatccttcacggatatttctctgattcgtccagaatgttcctcatcggcaatgtggacccggagaaggaaaaacttgtccgcgtcacgaacgaagctgtggaaaagggtctcgagcaggtaaaaccgtggggattcttaggagatatgggtcaggctgtccatgactatgcgaagcagaacggttacactgttgtcgaggaagtcggcggtcatggtgtcggtcttgagttccatgaggatccgtttgtaagctatgtgacaagacggggcgaggagatgcttatggcaccggggatgatctttaccatcgagccgatgatcaacatgggccgcccggatatctttgtggatgacagcaacggctggacgatctataccgatgacaggcttccgtccgcccagagggagatcatggtactcgtgacagagaccggacatgaggtccttgcgtggtagaaaaaacgagagaaaaatccaatagaaaacagggaaattccttgaaaagtatctgaaaattcggtataatatagttaaataacagtaaacgtgagatttgaataaggaggatcgtgtatggagttaaagtataacaaaattcagacgaccggtacagataccccgttaaaaatcgtaaagggacattttgcaacgaatcatgcccacacgaattactattttgacctgacgacggtaaagagccgtctgagtgaggctggaggaattgcccaggcactcgtgcatatgtatctgtacgatatgatcgttgatacgatcgtatgcatggaagggaccgaggtgatcggaacccttcttgcgcaggagctgacaaaaggcggtttcatgtcgaagaacgcccacaagacgatctacgttatcaaaccggagttcaacagcaacagccagatcgtgttcaaggacaattaccgcgcaatgatcaatggaaagaatgtgctgatcctcaccgcgaccgtgacaacaggtctgacgatcaacaaggcgatcgagggtgtccagtactatggaggaattattcaggggatctccgcagtattcagcgcacttgagaatgtcaacggaattccgatcaagtcggtattcggattaaaagatgttccggattaccagtacagcgattacagaaactgcccattatgtagggaaggaaagaaactggatgcgctgatcaatccgtatggatattcaaaactgtaaaaaaatgatctgaaataggaccggctctgcaggccggggaaatcccagtgcctgcagagctttttcttttaacagggaactccgatgaattcccagttaaacaaaaaggcactgacgagccagcgatgttacataactctggttcatacaagctataaaaagaaactacttgcaatttctgacaaagtgcttataataaaacatagcaacattgctgaagggcaactggaaaggagacgcaaagatatgacgaatcttattctactcgcagtcgtgattcgaattatcgtcagcattatcgtcgtggacgggaatgcttatttgcgttatactgaatctgggattgcctgatagaaacttgaaagaacaagttacgaaagaaagcaaagccttacagtgtaacgctgtaaggtttttttatacctgaattttaatacggacatttgtccgtgccagaaaagaaaaaggcgggaatgtctgacagagccggacattcctgtgagaaataagatgaggggaaaacagctatgaaaatgaacggagcgcggatcctggtggaagagctgatccatcagggcgtcagagtgatcttcggatatccggggggagcagtgcttgatatctacaatgaactctatcttgcgtctgaccgcatcggacatgtcttaacggcccacgagcagggagctgcccatgccgctgacggatatgcgagagcaagcggaaagaccggcgtggtactcgctacaagcggaccgggcgcgacaaacttggtaacgggaattgcgaacgcctaccttgattccgtaccgatggtcgcgatcaccggaaatgtcgcggtgaacagccttggtaaggattccttccaggaggtcgatatcgtcgggatcacgcagccggtggtcaaacacaactttatggtccgtgacataaaggacctccagagaacgatcatcgaggcatttgagatcgcaaattccggaagaaaaggaccggtcctcatcgatatcccgaagaacgtccagtccgcagaatatgaatacgtggaggacttaaaggtcccgagcgttgtgaaaaaaccgagaaaatccgagtgcggaaatatcgacgaagtcgtagagatgatcaaaaaagcgaaaaagccgtttatctatgcaggcggcggtgtcgttgcggcgggagcacaggatgaggtcctggagctctcaaagagagtcgatgcggcgatcggactttccatgatggggatcacatccgttccggcctcctacccgttaaacctcggaatgtgcggaatgcacggaaaatatccgtcgatcaaggcacagtccgaatgtgacctgctccttgcagtcggcgtaagattctccgaccgtgcaacgggcgatttaaacgaatatacaaagaaatgcatgacggtccatatcgatatcgaccgtgcggagatcggaaagaacgtcagccctgacgtgagtctctggggagatgtgaaggagatcctcacaaagatcctggaagcactcccggagcataaacatccggaatgggttgcagagctggaaggttacaaacacgagatgatcctcccggcgccgaaaccttacggaccggaagccatcattgaagaagtccacaaacactgtacggatgatacggtcgtagcgaccgatgtcggacagcatcagatgtggacgatgcagttctatccgtttgaaaagccgcacacacttcttacttccggcggtctcggaaccatgggatatggcttcggagcagccatcggcggatgtatcgcagcgagaggcagaagaaccgttctctttaccggagacggaagctttggaatgaacttaaacgagatggcgacggcggtgagccaggagctcccgatcacgatcgtcgttttcgataacgatgtcctaggaatggtgagacagtggcagacgatcttctatgactgccattattcccagaccgtccttgacagaaagacagatttcccggcgctcgcaaaggcgttcggtgcagacggatatgccgtttacacgatggaagatctgaaaaaagccctggatgcggcagacaagtcctcaggaccagtcctgatcgactgtcacattgatatggatgagaaagtcctgccgatgatcccgccgggacgttccatcaaagatatgatcgtggaaggataaggtgaccatggaaaacaaagttgaaaagtttgcggtcgccatgatcgtaaacaaccgcttcggcgttttgaaccggattgccggtctctatgcaaaacgctgttataatatcgataatatctctgcaggtacgctggatgatccgaactatacgcggatcacgatcgtctccacaggagatgaatatatgaaggaccaggtggtccgtcagctggaaaaactgatcgatgtccgtgccgtgacacttctcgagccggaaaacaccgtctttgcccagcacatgtacattaaaatgcatctgacaggaacccacagaggttccagcaaacaccaggtgctggatctgatcaacgaatacggcggaaaagtcgtagacttcggtgaggaacatctgactgccgagattaccggagacagcaaaaaagttgaatcttttattgaaaaagtcagagattttggtatattagaacttagtcggtcgggagagatcgcgatcggtttagggatagacaacacattaagtgtcgatcacaatgaagaataaggagaaaaaaacaatggcaacaatgtattatgagagagattgtaacttatcacttcttgatggaaagaaagtagctgttatcggttacggttcccagggtcatgcacacgcactgaacttaagagattccggcgttgatgttgtagtaggcctttacgaaggttccaaatctgctgcaaaggcaaaagaggatggcttcacagttatgctcacagcagacgctgttaaggcagcagacatcatcatgatccttgtaaacgatgagaagcaggcagctctctacaagaaagacatcaaagataacctgacagcaggcaagacacttgcattcgctcacggcttcaacatccatttcaaacagatcgttccgccggcagatgtaaacgttatcatgatcgctccgaagggaccgggacacaccgttcgttcccagtatgttggcggcaagggcgttccgtgcctcgtagctgttgagcaggatccgagcggaaactccatggaagttgctaaggcatacgctgcaggcatcggcggagcaagaggcggtatccttgagacaacattcaaggaagagacagagacagacctcttcggtgagcaggcagttctctgcggcggcgtttgcgcattaatggaagctggtttcaacacacttgttgaggctggttacaagccggagaacgcatacttcgagtgcatccacgagatgaaactgatcgtagacctgatcttcaacgctggtttcgagggaatgagatactccatctccgatacagctgagtacggtgactacgtaagcggtaagagaatcatcggcgacgaagcgaagaaggcaatgaagcaggtattaacagagatccaggatggtacattcgctaagaactggatccttgagaaccaagttggtagaaccatgttcaacgcagcaagagcagcacacgctgatacacttgcagctaagacaggccgcgagttaagagcaaagatgggctggaagcagacacaggatcttgacgaggctaaatagtcgcgtaggaaaatgagcagtgcaaaggcggcggggaaagattcacgttgtgcttgcacataagtgaatctttgccgacggctttatagggcgaatgcccgcgcacgaatggacgcaagtccgtgagtgtgccactgcggggcagaaaactctgcaaatatttcagggccaggcatcaccgcctggctctggatttcataaggagaaaaacaatgaattcagataaagtaaaagcaggcgtagaacatgcgccgcaccgttccctgttaaaggcagacggatacaacgatgagcagatgcgccgcccgttcgtcggcgtcgtaaactctttcaacgagattgctccgggtcatatgcacttacagaacatcgcacgtgccgtaaaggacggtgttctcgctgcaggcggaaccccgatggagttcgatacgatcggtgtctgtgacggtatcgccatgggacatgacggaatgcatttctctttaagctcccgtgagctgatcgctgataccatcgaatgtatggtaaaggcacactgctttgatgctctcgtatttatcccgaactgtgataagatcgttccgggtatgttaatggcagcaatgcgtctgaaccttccgtgtatcttcgtgtccggtggtccgatgctctccatcaaccagagagacttaaatactgtatttgaggctgtcggcgcaagaaaagcaaacctgatcaacgatgaggaactcgctgagatcgagggaagctcctgcccgggctgcggttcctgttccggtatgttcaccgcaaactccatgaactgcttaacagaagttcttggtctcggtcttccgggaaatggtacgatcccggctgtatacgcagagcgtatccgccttgcaaagacagctggtatgcaggttatgaagctgcttgccgatgatatccgtccgcgtgatatcgtaacaccggcagcatttgagaacgcgctgacaaccgatatggctctcggctgctccacaaactccgcacttcatctccttgcgatcgctcacgaggctgatatcgctcttgatcttcatatgatcaacgacatcagtgagcacactccgaacctgtgccatcttgcaccggccggacatcaccacatgcaggatctgatggaagcaggaggaatctccgcagtattaaaagagcttctcgatgcaggaatgatccagggacagtgcaagactgtaacaggaaagacggttgctgagaacgttgcacatgcagtaaaccgcaatccggaagttatccgtccgattgataatccgtacacaaagacaggcggacttgccgttcttttcggaaaccttgccccgaacggcgcgatcgtaaaacgttctgctgtaaaaccggagatgttagtcaacaccggtactgcaaagtgctttgactccgaggaagaggcgatcgctgcgatctacgcaggaaagatcgttccgggcgacatcgttgtcatccgttacgagggaccggcaggcggcccgggaatgagagagatgctctccccgacatccgcgatcgttggcatgaaactcgatacgaccgttgctctcctgacagatggccgtttctccggcgcatcctgtggtgcagcaatcggacatatctctccggaggcagctgcaggcggcccgatcgcttacatcaaggacggcgacaagatcgcgatcgacatcccaaactacagcttaaagcttctcgtttctgatgaagagatggaagagagaaagaagaccatgaagatccgtgagccgaagaagctgactggatacttaaaacgctacgcaaagaacgtatcctccgcagataaaggtgcgatcgtagagtaggcgaaggattcatagggcagacgcccgaagcttcctggctgcgcaagcaggcaagaagatgcacgtcgaaattgaagagaataaaaaaagggcggcgggcttgttgagaagctgcgccgtcctttgcatcaagagaggaaaccatatgaatgagatcgtatcaaacctgctcgtatacggcagcctgccggaagactcgatcctctggcagcttgcggatatctgcgaaaaattaaaaaatcagacagagtccaaagacgcactgcgcggacgcgtattccatcaggtaaaaaatcttctgacggttgcaacagactatgcatttgataaaaatttatggcataattacctgactttcctgctgatcacgaacgagaatccgttcagcctcgtctgtgaaaagatgggggctcaggacggaacggtcaacaactttgtgactcatgactttgagatgttcaaaaagctgttcgactatgatttctcctggatggaaaaagaactttccatcgactgcttcacccagctgactcactataaggcgatccgtaaaaaagagctgatgtacaataaaaatgtcagcgaaaaggtgagaaatttaagtgaacagcttgagacggctgagtccggagctgatttcttcaaatatgtgacggaattctacaaggacttcggtgtcggcatgttcggtctcaacaaggcgttccgcattgctgagaatggagacggctccgtccgcttcctcccgatcaacaacatggatgccgtgatgctggacgacctcatcggatatgagcttcagaagaagaaacttgtggagaatacccaggcgttctgcgacggaaaagcggcgaacaacgtcctgttgttcggcgacagcggtaccggtaaatccacgagcatcaaggcgatcgtcaaccagttctatccgcagggcctgcgcatgatcgagatctacaagcaccagtttaaggatctctcgacgatcatcgcccagatcaagaaccgcaattacaagttcatcatctacatggatgatctttctttcgaagaatttgagatcgagtacaagttcttaaaggccgttatcgaaggcggcgttgagacgaagccggacaatgtcctgatctatgcgacatcaaaccgccgtcatctgatcaaggagacatggaaggacagagagaatatggagcacagcgaagatctgcaccgttccgacactatggaagaaaaactctccctggtcaatcgttttggactttccatctactatgcgaagccgaacaaggaaggcttcaacgagatggcgatcgcacttgcgagacgtgcaggaatcactccggatatcatgacggacgaggagatttgctacgaggcgaaccgcttcgagatgcgcggcggcggactttccggccgtactgcccagcagtttgcgaattacctgctcacgatcaaataagaatacttacagagtacgaagccccagtatggagacatgccggggcttttttgtttaacaggaaattccgaaggaacttcctgttaaacaaaaaggcactacgtgcctaagatgcacactcgcgcgaagatgaagattgtcgcaagcgaccgcgctcggcgcgagaatgtgccgaggcacattcttttttataactgtttcgactcgaaaattcgctaagatccgctaagagaatgctgcaagatatttagatatttacaaaataatagaatatagtcagaaaatgacgagcaaaaacccgaaatcacacctgcttaaccttgaattcgacagaaagaaaatcgtataatttctacattcctaccggagaagatcaaaacgtgaaagatcgcggcggctatccgaaaggaacaggggaaatgaaagaaaaagaacgcagagtataacaggaggaacattatggcagaattatcaattgcgatcgcggatgacaacagacagactttgaatttacttggcgagatcctggagaaagaggacgggatccatgtagttggaaaagcagataatggcgaggacgcatacaatatgatcgtccgaacaaatccggatattgtcctcatggatgtgatcatgccgagacttgacggaatttctgtcatggaaaagataaagaataacacgcagatgaagaaccacccttcgtttatcatggtgacggcggccagcagtcaggatgtgacagaggatgcgttccgcctcggagcgaattattatatcatgaaaccgttcaaccgcgacgtgatcctggacaagatccgcagagtctgccgcggacgggcgaaagcggcgggcaatgtacatacggaagtgaaacgggtacagccttatctcgacaaggagaactacatggaacagaatctggagacggatgtgacccagatgctgcatgagatcgggatcccggcacatattaagggatatcagtacctgagagatgctatcatcatgtcggtccgggataccgagatgttgtcttcggtcacgaagatcttatatccgacgatcgcgaagacccataaaacgacgccgagccgcgtggagcgcgccatccgccatgcgatcgaagtggcctggggaagaggagaactcgacacactgaacagcctcttcggatatacggtaaacggcggcaaaggcaaaccgacaaattcagaatttattgcattgattgcagacaaaatccgactggattataaacgaatctgaaaaatctgaaaaaacaaaaaagacccactttctaattttacagggatgtgttatactgaatctaatagcgggcacagagcgctgttcactggcagggatcttttgaacggaagatcccgtatgatgcagttctggctgcggatcctgccgacaggggatggaaagaccgacgggatcacgttaccgggtccatatcggtgaacggtaacgcaagaaaagtggaaggatgggttatcatgaaaaaaatattgtttgtcgcttccgaagctgtaccttttatcaagacaggcggacttgccgatgttgtgggttccttaccgaaatgttttgataaagaatattttgatgttcgggtcatgatcccgaaatatctctgcatcaaagataaatttttgagcaaccttacttatgtaaatcatttctatatggactatctgggacagagccgttatgtcgggatccttgaatatgtttatgaggggatcaccttctattttatcgacaacgagagctatttctggggagataagccgtatggagactggtattacgatctggaaaaattctcattcttctcccaggcggccttatccgcactcccggtaatcggttggagaccggatgtgatccactgccacgactggcagaccggactgatcccggtatatctgaaaggcagattcggcgagggcgaattcttccgcgggatcaaatccgttatgacgatccacaacctgaaattccagggcgtttgggatgtgaagacgattcagagattttccggtcttccggactatttctttactcctgataagctggaagcttataaagacggaaatatgttaaagggcggtctcgtgtacgcggatgcgatcacgacggtcagcaatacttacgcggaggagatcaagactccgttctacggggaaggactggacggactcatgcgcgcccgcgccaatgatctccgtggtatcgtaaacggaatcgactacgatgtattcaacccggagacggacccggatatcgttcagaattataatgcgaagaacttccgaaaagaaaaagtcaaaaataaacgcgcactccaggaagagctcggacttgccagagatgataagaaatttatgatcggtatcgtctcgagactcacgagccagaaaggtctcgacctgatccagtgcgttatggacgagatctgtacagacgatgtccagttagtggtccttggaaccggcgatgagaactatgaaaatatgttccgccattatgactggaagtatcacgacagggtatcggcgcagatctattattccgagccgctgtcccacaagatctatgcggcttgcgatgccttcctgatgccttccttatttgaaccgtgcggactgagccagctcatggcgctccggtacggcacggtgccgatcgtccgtgagaccggcggcttaaaggatacggtgtggccgtacaatgagtttgagggaacaggaacgggattctcctttgcaaactacaatgcccacgaaatgttaaacatcatccgctacgcgaaacatatcttctacgataagaagcgggagtggaacaagatcattgaccgggctatggctgtagatttttcatggaatagctccgcaaagaaatatcaggaattatacgactggctgatcggatattaagttgttcacacaatccattcccgcccacgcatccatgtgggcgggaatgtcatttacgcgaacaacgagccagagtccgcgcttgcgcgagaccctggcgactgtcgcgataacaaggggaaacccgcgaagcgagttttcacttgtctgaatagccgcctgataatgatcttacagaaaagaggaaaacatgacaatatggaatgaacttctgggaaaccaggtgctgatcagtgctgtgctggggtggacggtcgcgcagtttttaaagaccgtgatcgatatggtcctgaaccggtcttttaatcctgaacggatcttcgggtccggcggaatgccgagctcccattcggctaccgtctgcgcgctcacaacagcttccggaatgaaatacggagtcggaagttttgagtttgccgtcagctttgtccttgcgatgatcgtaatgtacgatgcgatgggagtgagacgggagacgggaaaacaggcgaagctgctgaatagtgtgttttttgagaatattctgaatcttgatggagtatttctccaggaaaaattaaaggaatacgtgggacatacgccgctgcaggtagctgccggggcgatcctgggaatcctgatcgcagtgctcattagttaattgtactaaattgaatataaaatatacacaattatgcataaagagtattgcaaaaaaacgcgaaaatatgtgaaaaaattacgaaagatttacaaagggatgttgcaaattttggcaacatcccttataatatgtacaggccttttttccgatactcaatttttttgtgcgaaatctctaaaaccagagatcgtgtgatggggcacggggttaccgcaaggggagcaaagaaatgagggcagccacagacatcttaagtctaagctaaatctaattctaggaggaataacaacttatggcaaagtgggtttataagtttaaagaaggcagtgcagctatgagaaatcttctcggcggcaaaggttgtaaccttgctgagatgacaaatctcggtatgccgattccgcagggattcacagtaacaacagaagcctgcacagattactataacagcggaaagcagatcacaaaagagatccaggaccagatcttcgaagctcttacatggctcgagggcgtaaatggaaagaaattcggtgatacagaagatccgttgcttgtatctgtacgttccggtgcgcgtgcatccatgccgggtatgatggacaccatcttaaaccttggtttaaacgatgtagcggttgagggcttcgcaaagaagacaggaaatccgcgtttcgcatatgactcctacagaagattcatccagatgtattccgacgttgttatggaagttccgaagtcctacttcgagaagatcatcgatgagatgaaggaagcaaaaggcgttcactatgatacagagttagacgctaacgatttaaaggaactcgctgagaagttcaaagctgtatacaaagaggctatgaacggcgaagagttcccgcaggatccgaaggaacagttaatgggcgctgtaaaagcagtattccgttcctgggacaacccgcgtgcgatcgtttaccgtcgtatgaatgatattccgggtgactggggtaccgcagtaaacgtacagaccatggtattcggtaataagggaaatacttccggtacaggcgttgcgttcacccgtaacccatccacaggtgcaaagggcatcttcggtgagtatctgatcaatgcacagggcgaggacgttgttgccggtgttcgtacaccgcagccgatcactcagcttgagaaagatcttccggagtgctacaaacagttcatggaactggctatgaaacttgagaaccatttccacgacatgcaggatatggagttcacgatcgaggaaggcaagctctacttcttacagacacgtaacggtaagagaactgctccggctgcaatccagatcgcatgcgatttagtagatgagggacagatcactcctgaggaagctgtttgcagaatcgaagcgaaatcccttgatcagttattacatccgaccttcgatccggctgcattaaaggcaggcgaagtgatcggacaggctcttccggcttccccgggtgctgcagctggtaaagtttgcttcacagcagatgacgctaaggcagctggtatcggcggcaagggcgagagagtgattctggttcgtcttgagacatccccggaggatatcgagggaatgcacgctgcacagggtatcttaacagtccgcggcggtatgacatcccacgcagctgttgttgcccgtggtatgggtacctgctgtgtatccggttgcggcgagatcaagatcgacgaggagaagaaagaattcacactcggcggacataccttccacgagggagactacatctccttagatggtacaacaggtaagatctacaacggcgatatcaagactcaggaagcatccgtaggcggaaacttcaagagaatcatggattgggctgactccttcagaaaacttggcgtccgcacaaacgctgatacaccggctgatacaaagaacgctgtaaaacttggtgcagagggcatcggtctttgccgtaccgagcatatgttctttgatccggagagaatccacaacttaagaagaatgatcgtttctgatactgttgaggcaagagaggaagctttaagcaaactccttccgtaccagaagggtgacttcaaggctatgtacaaggcactcgagggcagaccaatgacagtccgctacttagatccgccgctgcatgagttcactcctaagacagaggaagagatggctgatcttgcaaaagatatgggcatcactgttgat

SEQ ID NO: 2049 - DNA, 4207 bp, Unknown
  gut microbiota DNA sequence
atgtatgagatcagcgatgggaagccgtgttccggcgtgagaggatgccagtaagcatcgaccgccttccatacagtgatccggagagggaaactgtacatttttatgtggagtacatggtacttcgcctgtggaagcgctgttgtcgtacagacgtttcctgaaaacgcggccgcgcagggaagctttgcgactgcggaaaattttcaaaggaggaatgtgtgacggtccgaaggaaggagcggtcacgcagaataaaacatgaaacagacaaatacgaaaaaattagcggtggcagccgttttctgtgctgtcgcagtggcaggaagcttattttcatttccggtattcggaagcaagtgttccccggtacagcatatggtgaatattctctgtgcagtcctcttaggaccggggtacggactgggtgcggcattcgcggcggcgctgatccggaatcttctgggacttggaagcctgatggcgtttccgggcagtatgttcggcgcgctgatctgcggacttgtgtatcagaagacgcagaacattccggcgacactgatcggtgaggtatttggaacctctgttcttggcggactcacggcctatccggtagcggtcttccttatgggaaagagtgcggcaggtctggcattttacgcatatgtgatcccgttccttgtttcaactgccggaggtgcagtgatcagcggtgtgctgatctacagcttaaagaaagccaatatccttgcagggatgcaggaagcaatgggacagtagaggagagagaagcatgttaaaacagatgtttgatcaggtgcgggagaagagcccgctgatccacaatattacgaactatgtgacggtcaatgactgcgcaaatatggttctggcctgtggggcttccccgatcatggcggacgacaaggaggaggtcgcggagatccagacgatctgcgcaggcctcaatatcaatatcggtacgctgaacagccgcaccatcgagtccatgaagatcgcgggagcgcgggccaatgagctgggacacccggcagtgttggatccggtgggcgtcggggcatcgacactccggacatcgacagctaacgaactcttaaaaacggtaaaattcaccgtgatccgcggaaatatctctgagatcaagacgcttgcggtgggaacaggaaccacaaagggcgtggatgcggatatcgcagaccgtgtaaccgaagagaaccttgatgaggcggtggcattcgtgaagaaatttgcggagaggacaggggctgtgatcgcggtcacaggcgctattgatatcgtggcggacgcaaaaaaagcgtactgcatctacaatggccatccgatgatgtcctccatcacgggaaccggctgccagctttctgctcttacagcagcatttgtgactgcaaatcaggagcacccgcttgaggcggcagcagcggcagtctgcgccatgggactcgcgggggagatcgcccataaacggctgacaccgcaggacgggaacgcaacataccggaattatattatcgacgcgatctgtcatatggacggggatgagctggagcacggggcgaagtttgaagtaaaataggacttgaaattatgccgatgcccacatatactgtgtatagtatttcagacagaaggaaatgaacagcatggtcattgatgaagaactttacagacagtatctgcgcggcgatgaagcaggacttgaggctttaatgagaaaatacggtaacccgctgaccttgtatatcaatggctatttgcatgatgtccacgaagcggaggacctgatgatcgaagtcttttcctatctgttcacaaaaaagccacgcatccgggacggcggtcttaaggcttacctgtataaagcagcgcggcacatggctctgcgccataaaagcagacatcggcttttcttcagcctcgatgacctgacggaagagccggatggaaagacgttggtggaagaggtcattcggacaaaggaacgagatcagatcctgcatatctgtatggatgagctgaaggcggattaccgggaagctctttatctgacctattttgagggaatgagctaccggcaggccgctgaggtcatgggaaaaagtgagaagcagatcaccaatatggtataccggggaaaagcgcgtctgcgtggattactggagcgggagggaattaccaatgcgaagtaatgaggaacggatcgcggaagtaaaacgtcgtattgcggaaaaagaatacaaaaaaagactgcggagagaatgggctgcagcagtttgctgcgtggccgcatgtcttgcggtgatcgcaggtgtttccctttccatgcctgatgctgtcagccggatcgagatgggaacttcctctggctttgaaacagcggcgacgatgttaggcggcagcaccgcacttggatatatcgtggtcggactgctcgcttttgttctcggcgtgtgcgtgacggtgttatgtttccgcatccgtagactgaacgaagaagaacagacaggggagcaaaagggggaaaatgcagatggaagtcatcagtaacctcttgcaagccgcggttaccctgttgggctttttcctgggcggtatccggtatctgaaaagccggaaacaggagtatttcctgctgacctgcttttatggctgtttcttccttgggtctctctactggacgatgtatctgctcttattatccaaaacgccgcaggtcttttatgtgtcagagttcggctgggtagcaagtgtcattttcctttccatgctgcaatacacgctttcttcggaagaagaacggagatttccgtgcaggaaggccttaagtgccgtcctgatcggtgttccgctgtgtatattttactgcacatttggagatatcctctccaatctgctctggtgcggtatgatgatcgttgtttcctattcttctatccgggggcttgcctattccagaaggcagaggggagctgcaaatagtatgaaatattttcatatttggatcctttgctatgcgacattagaatatgccctctggacttctggctgcttctggccgggagattccattttcagcccatactgctggtttgatcttctgctggcaggctgcctgctcgctttgctgccggcaatgggaaaggcggtgcaggaatgacgtatattgaaaatgtttttatctgtatggcatcgccgttactggtcgctgccctgtgcatgggaaaacaacagacaaaattctttctgttctgccttgcaggaatgggggcgtgtcttctttccgcttatatcaataccttttttgccgcgctttatggtgcggataaccttgccgccactgcggagattgccccggtggtggaggaagtcatgaagcttctgcctctgcttttttaccttctgatatttgagccaaagacggagcagatcaaaatctccgctgtgatcacagctctttcctttgccacctttgaaaatatctgctacctgatccaaaatggagccggacatttttcctttatttttttccgggggatcggaacaggagcgatgcatgtgatctgcggagccattgtaggcggaggccttgcgtatgtgtggcagcggacctggctgaagattgccggaacctgcggtctgctgggagcagccatcacgtttcacgcgctctataatctgctgatcgcttacggcggcgcagtgcagtatgctgcctatgttctgcctgtagtgattttggcagcgggaaagctgattgcccgccgtctgacatcgtaatataactttattttgtgatttttgggagctgtttttaagcagctctcattttttttgaaaaatctgcttttggggtgagagtttttccggatttttgtacctatataagtgaaaggcctttaagctgagttttcagaaaggaggttttgcgtgcatgtatgatacacaaaagcgtgttgcactggcaaaggagcggatagcggaatctcgccgccgacaggcgcggcgaagcattcgcagtctgtcggcactgtgcgctctgctgtttttgtctcttctgggaacggtagggacggtgcagagccagccgatggatgctgcgggaatgtacggggcgatcctgctgcatgagggtgtgggcggatatgtgctggaagcggtcatttccttt

SEQ ID NO: 2050 - DNA, 1317 bp, Unknown
  gut microbiota DNA sequence
cagataccatagaaatgggggaaaatcaatgagaaagccagaaaaacaaaagaaacaaagagaacggatctatgcggcactgctctgcatctgtacgatgctttctttggtttctgtgcctgtattggcggcagaaatgagaaaaggggcgggcagccataaacataccccggagtgttatacgtggatggaaaaatgtgtccatgaacatacgctggaatgttatccgcagaaggagataacggaacctgcggccacctcatctgatgcggtggagcccaccgaatgcggccatgtatgcagtgaggaaagcggctgcatcacaaaagaattaaattgtcaatatgacagcgaaagcactccaataacagcaaaagcgcttatgaaaaataaagcgatcgccacccggtccaatgcacggaaagtctcttctatctatcgcgcacaggaaatgatcgatgctttgccggacgtaacggatatcaataacgataacatcgaggaggtaaggcttcagtttaaggctgttgaggacgcaatgatacagctttccgttgaggactcggtcgtacttgatatcgctcgctatctgaaggttgccgcggtgctgtatggaccgtttcctgacatccagaatcctatcctcggcacagatattaaatggacgatcagcagagacaataagaccattacgatatccggtaaaggggaaatgcctgatttcgacaatactagttccggtaaaaggtgtccctgggaggacaaaaagtctaagattgacaaggtgatcatagaggaaggagtgacaacgattggaaaaaatgcatttagtggatgcataagactcagtgaggtgcaaattccaaaaacagtcaaaacaatagggactgccgcttttatggactgtaacaccctaaggcagattgatattccaaatagtgttaaaaatgtgatgcccttcgcgtttcataaatgcccgcaacttgggcaagttcacacccattggaaagatccggatgaagcagagttgtcattggcattttatctgcccggtgaatcatggccggagaatctgacgatatatgttcctgacgcgtataaagaaaaatttgcagctgcatggaaaaattggaaggtaaagggcgaaacttacacggtctcttttaatggagacggagcaccgggatatatggagtcagttgaaggcatatccggggattacgttcttccggagtctggttttacatatcaatcagcgatccttgattactgggcgctggataatcctgatggagagaaagcgggctgcccgggaga

SEQ ID NO: 2051 - DNA, 18055 bp, Unknown
  gut microbiota DNA sequence
ataaaattcggaactgtctcatcgaaattgtaaaaaaatagatcaaaaaaagaagaacgtttgcataatttataaaaataaaaaattttatcattgatttgccgggtgacttgtgctaggatatatgacaaatcagccagattcaagacttcacattggtagagaagagacgaggtgaagtaatacaacggatcatgcgactgggctggattcatggccgcccctgagaggagagaccatagagcaatcagagaggggaacaaaatttatgagcagagtttacaacttttccgcaggtccggctgtgttgccggaagaagtattaaaagaagcagcagcagaaatgctggattataacggaaccggaatgtccgttatggagatgagccaccgctcaaaagcgtttgaggagatcattcagacggcagagcaggatatccgtgatctcttaaagatcccggacaattacaaagtcctgttcttacagggcggcgcacaccagcagttcgctgcagttccgttaaacctgtttaagaaccgtgtcggcgattacatcatcactggccagtgggcaaagaaagcatggaaggaagcaaagctttacggaaccgcaaatgccatcgcatccagcgaagacaagacattcagctatattccggactgctccgatcttccgatcgacgagaatgctgactatgtctacatctgcgagaacaatacgatttacggaacaaaattccacacactcccgaatacaaaaggaaaaacacttgtctctgatgtctcctcatgtttcctctcagaaccgatggatgtcacaaaatacggcgtgatctacggaggcgtccagaaaaatatcggaccggccggcgttgtcatcgtgatcatccgggaagacctgatccgcgaggatgttcttccggagacaccgacgatcatgcgctacgatgtacaggcgaaggcaggatctctcttcaacactccgccatgctacggaatctatatctgcggcaaggtattcaaatggctgaagaaacagggcggcctggaagccatgaaagtgagaaatgagagaaaggcaaagatcctttacgattatctggatcagagcaaaatgttccatggaacagtaagaaaagaggaccgctcgatcatgaacgtaccgttcgtgacaggtgacaaagacctcgatgccctgttcgtaaaagaggcagaaaaggccggattcgtgaacttaaaaggtcaccgcactgtcggcggtatgagagccagcatctacaatgcaatgccggaagagggcgttgtaaagcttgtagaattcatgaaaaaatttgaggcggagcacgcgaacgcgtaaggctgccggatcgaaaagattacaggagagacattatgagaaagatttgctgtttaaatcagatctcccactacggtacagaccgcctcacaggagattatacatttgtagatgatatcaaagacgcggaaggagtcatggtccgcagcgcatcccttcatgagacagaattcccggagggacttcaggcgattgcgagagccggagccggagtcaacaacatcccgctcgatgagtgcgcgaaaaagggaatcgttgtattcaacacaccgggtgcaaataagaacggtgtaaaagagcttgtacttgcaggcctgtttctgacatccagagacgtcatcggcggcgtggaatggtgcagagagcatgcaggtgaggaagatatcgcaaagaagatggaaaagagcaagaaagcctttgcaggaaatgagatcaagggcaaaaagctcggcgtcatcggactcggcgcgatcggctgcgaggtagcgaatgcggctgcagctctcggaatggaagtatacggatacgacccgttcatctccgtcaacgcggcatggatgctgtcccgctccgtaaagcacatcatggacgtcaacacgatctaccaggagtgcgattacatcaccgttcatgttccgcttctggattccacgaaatatatgatcaacaaggacgctttcgatcagatgagggacggcgttgtgatcttaaactacgcgagagaccttcttgtcaatgacgatgacatggaagcggcattaaaggcaggaaaagtaaagaaatatatcacagacttcccgaacgcaaagacatccgcgatggaaggcgtgatcgcaaccccgcatctcggcgcttccacagaggaatctgaggacaactgtgcggtgatggctgcggatgagttaaaggattacctggaaaacggaaatatcaagaattccgtaaactacccggcatgcgacatgggtgtatgccaggttgcaggaagaatcgccctgctccacgcaaatgttccgaacatgatcggccagatcacctcgatccttgcggctgaggggatcaacatcgcgaacatgacaaacaagagccgcgataaatacgcctacacacttctggatcttgaggactcggcaaaggcagaggcagttgcccatcttgagaagatcagcggaatgtataaagtccgcgtgatcaaaggctgaaaacagatttacaggcccgatgtgtacggataaaaacggaaaacggtttgtgatctcataatactgaaaatggtagaaagatccggtcatggtgggaaaactcgcgaagcgtgttttcagttgttacgcgaacaacgagccaaagtccgcagaatcccgcaaatcctgcaaaaagagcggttatgcttgcaaaagaggcgaatccgctttataattctatcataacgcttccgggtgccgtgaccacgatcagatggatcagggcgctttggaataaaagagaaagatccaggccgcaggaaggtctaaatgaccggaatggctgcctgctaacacagaacagaaaggaacattgttgtgggaaaagtaattttaacaggagaccgcccgaccggacgtcttcatgtaggacattatgtaggatctttgagaagaagagtggagcttcagaattccggagagtacagcgacatctatatcatgatcgctgattcccaggcacttacagacaacgcggataacccggagaaggtccgccagaatattctggaggttgccctggattacctgtccgcaggtcttgatccggagaaatccacgatctttatccagtccatggtgccggagctctatgagatgaccgcttactatatggatatcgttaccgtttccagattacagagaaacccaactgtaaagagcgagatccagatgagaaacttcgaggcgagcatcccggtcggtttcttcacctacccgatcagccaggctgccgatatcaccgcatttaaggcaaacgtggtcccggccggtgaggaccagatgccgatggttgagcagacaagagagatcgttcacaaattcaatacggtatacaacacagacgcactcgtgatgccggagattcttcttccgagcaacgacgcatgccgccgtcttccgggaattgatggaaaggcgaagatgagcaaatccttaggaaactgcatctatctttccgatccggaggaggaagtaaagaagaaagtcatgtccatgtacacagatccgaatcacttaaaagtcagcgatccgggacaggtggaaggaaataccgtcttcacatatctcgatgcattctgcaaggacgagtactttgcagagttctggccggattacaagaatctcgacgaggtgaaggaacactactcccgcggcggactcggcgatgtaaaggtgaaaaagttcttaaaccgtgtgcttgaggaagagcttcgcccgatccgtgagagaagaaagaaatgggagcaggacatcccggctgtatacgagatcttaaagagcggaagcgagaaggcagagcgcgtggctgcccagaccttaaaagagatgcgcgaggcgatgaagatcaactacttcgatgatgcggcgctgatcgcggagcagagccagaaatataatggctgatcggagaaaaaggaaatgaataatgcagatcagctccacatatattgtacccatggcaaagcgggggtgcgtgtatgcgggagctggtactggaactgatgggggaatacggaaatcttgccgtattcctccttattttagtggaaaatctgtttcctccgatcccttcggaggtgatcctgacatttggaggtgtcatgacgacctgcacggacatgacgcccggcggggtgatcctcttctcaacggccgggtccatggcgggagcagtcattctttacggagccgggagattccttccggatgagatatttcggaaactgctctgtggaaaggccggacagctgctccatttcagaccggaggatgtcgacctcgcgaaagactggttccgggatcgcgggaagtctgcagtctttttgtgcagactggtcccgatcgtccggagcctgatctccattcccgcagggattgccaggatgtcggtcatcccgtttcttgctttcacggcggcgggaagccttttgtggaatacggttctcgtctatgcaggcaggatcgccggagattcctgggagaaggtgtcagctgcgttcggggtgtactcagatctctttctgatggtggcgggaatctccgtcacatttgcagtattgttccggggatgcggggagagaaaaagaagtggataacccaggggatttaagacgaatgcaggtgaacgttggggcatcctcttagtcagcataagctggtagatgcggtattcttgcagagtaaaaaatccggggcggagaaatccagtaatatacagagaatactgacagataaaattatttgaataattatatacaatacaacaattaactaacaataataaaataaataaaaatatttctaaaaacatattgacaaaacggaacttatcgcatataataaagacatcaaaaagaaagagagaacaaagcaaagaagacgaaaaggttcgtacttaaaagattctaagtaaaggaggtacagtccaccgaacacataagtctcgttccgtttttcaaatctgaaaaatctggaacaaaggaaacacacaaaaccgggtaattgatcgaaaaaaagattatttgaaatccttcgagatatgacgagaaagtatcgaaaagagaaatacaatgatcgatatgagaacaaaaaatataaactttcggaaaaagccggcggagtgaaaaagaaaaacttcatatagaaacaaaatctaatgaaaacgaggtaagatccattggataacgcagaacattaaggtgggtatcgaaacagaaaattgattcggtacccaccttttatgatgtttgtatccaggaagctgccggtgctgacgctgccatcatcaatcctgtcggtctgaacttctaccggctctcagatcccctcacagtcaaacggcggcgtatattcttctttggcgctgcttctttcctgcatgaagccctcggtgagaccgagatcgatggcggtatcaacgaccttgttatactcgtaggaggtgatccggcggttgatctccgggtagtccgcgctcccgtaaaacggcgtgtactggctcatgatactgatgagatactggtgcttcgggaggttctctttgatccagtgcaggagccggatcgaatcgtcctttgctcccggaaggaccatatggcggatgacgacgccgcggtccagcatagacgggttcttttgattccagataagtccgccggtgaggcggatcatttcttttatcgcggcggaagctttctcaaaatagtccggagcggcagagtatttttttgagagaccgctgtccatgtatttgagatccgggagccagatatcgacgtagtcggcgagatcctggatcgtctcgatcttttcatatcccccgcagttgaaaacaaccgggatctgaagcttcggctttgcgagatccagggcacggatgatcgacggagcgaactgcgtcccggtcacgagattgatgtttgcggcgcctttttcctgaagctccaggaagatatcagagagcctggaagcggagatcgtctttccgtagttttcatggcttaactggaaattctggcagaacacacagcgcagtgtacagccggagaaaaagacggtcccgcttccggtcgtgccgctgatgcatggttcttcccacatatgtaaggcggctctggcggcgcgcagttcatgtccggcgccgcagaagcctgtggatactgtccggtcaacatgacattccctcggacagagggagcatgaccggtagatggattcatttaacataattgttgtacttctttctttatttgatcatatttggcttgcaagtttccggtgcatcgagagaagtttccggatgcacggatgagtagaaaaaatggttcctgcaccacagagcgaaaatttctaaacgaaaaatcccgtatgatgcagttgtgaatgcatattttgcagatatggtccgtgaaagtcggactcattttttttcgtcaggcagataatggtagagatcctgataatgctcaagctctgcgtcactctccgggagcgccgggatcagaccggtacagtcggtggcggagcaggactggatgtcgacctcccagtcggtatcagctgacttattttttgatggttctttcatacgatcacctcctggctgatagttttcgacgctgagagggaaaacatgcaggaaagtaattcataaaaaattttatcatgaaaaatgccggcagaacagacgatgctggagcaaataagtgcaggaaccttctgttacagtgcgtggcatggcgcgtgtcctgtaagcattcataccgaggcggcgtgcattatcggatatacggaaggatcacattccatgcaccctttaatttttcgagcgaccacgccgcattcgccggactcgtggacggcagggagacggcggggatcccggtcacggcttcctgatatttcctgtaataattccaggaagtctttccgttgcagaagatcgcccggatatcggcggtggacaggatcacggagaggtcgttcggcacgacatcgcggatcgaactgtcgctggagccttcgatcgagcaggaggcgatcacatcccagagcgcgatgcggtgggagaggagaaaagcctttttctcatcgatcgtgtccggaaccgggacgtccaggactccggccagggttttccagaagcggttctgcggatgatggtagaaaaaatgtccttccctggatttgacggacgggaaagatccgaggatcaggatctttgaattccggtcaaatacgggcgggatcggatgaataacagtgttcatgatcatttgcctttcagatatgataaaactttcggacggaacgtacatattgtattgtagcctttctgaaaattcttgtaaacacgtaaatttcatactttttttattgccttatggggaaactcaaattataatgattaggtataactatttgaacagttacaatagttataattttatatcacaaaatgcgggcagtgtccccaaaaggtgatatatgcgctaaagaagtggagaagataaatggacaacaacaatcagaacagaaagcggcccagcggacagaatatcggggttctcgccctgatcctcgtgatcacgctgatcgctgtgaccgtcatgaacaacatggtccgcaaaaaccagacccaggaactcgggtatgaggagtttgtggaatacttgaaagagggagagatcgatacggcgaagatctccggcaacaggatctatttaacgccaaagacttcttccacaaagctttcacgttttatccagtattatacagtgagaattccggactctgaacttgcggagcgtcttttagactccaacggagtccatgtggtggcagaagatacgagtacgagtgccagcatcctgaatttcctgatgggatgggtacttccgtcggcactgatgatcggacttctctatatgatgtacagccggatgggcggcggaggaatgatgggcgtcggaaagagcaacgccaaggtctatgtccagaaggagaccggagtcacgttcgcggatgtcgcgggtgaggatgaggcgaaggaatcccttgtggagatcgtcgatttcctgcacaacccgcagaaatatactaagatcggtgcaaaactgccgaaaggagcgctccttgtgggacctccaggaaccggtaaaacactgctcgcaaaggcggtagccggtgaggcgcacgttccgttctactccctctccggttccgatttcgttgagatgttcgtcggcgtgggtgcgtcccgtgtccgcgacctcttcaagcaggcacagcagtccgctccatgtatcatctttatcgatgagatcgatgcgatcggacgcagccgtgacagccgtttcggcggaaatgatgagagagaacagaccttaaaccagctcctctccgagatggatggatttgattcctccaagggacttctcgtcctcggagcgacaaaccgtccggagatcctggatccggcgcttttaagaccgggtcgttttgaccggcgtgtcatcgtcgataagccggacctgaaaggccgtgtgagcatcctgaaagtacattcgaaggatgtgcgtctggatgagacggtagacttcgaggagatcgcccttgcgacttccggcgccgtcggtgcggaccttgcgaatatgatgaacgaggcagcgatcaatgcggtcaagaacggccgtcaggctgtctcccagaaagatctcttcgaggcagtggaacttgtccttgtcggtaaagagaagaaagaccggatcctgagcaaagaggagcgccggatcgtctcctatcatgaggtcggacacgcgcttgtcaccgctctccagaaggatgcagagccggtccagaagatcacgatcgttccgcgaacaatgggtgcgctgggatatgtgatgcaggttccggaagaagagaaattcttaaatacgaagaaagagctcaaggcaatgctcgttgtctctcttgccggacgtgcggcggaggagatcgtttttgataccgtgacgaccggagcggcaaatgatatcgaacaggcgacaagagtcgcaagagcgatggttacccagtacggaatgtcggataaattcggtctgatgggtctggaaacgcaggaaaaccagtatctgatcggacgcaccgtgatgaactgcggtgatgcgacagctgccgagatcgatacggaagtcatgaagatgttaaaagaggcctatgcggaggcgaaacgtcttctctctgaaaacagggatgtgatggataagatcgcagcgttcctgatcgagaaagagacgatcaccggcaaggaattcatgaagatcttccgtgaggtcaagggaatcccggagccggaggaaggccagaaggacgatcacagtcggatgggcggcgagagcgctgagactgttgagtccgctgagaacgggaacaggcagccggagatggcagtgggatctgaacagccggcagctgagcaggttcagaatccggtgcaggatggaaacggtgtgatgccgcaggatccggagcagaagacagcagaaactcagaaaggtcagcagggatcggacaatggtcagggaccggcggagctgtaacagcctgatccggatcgacaggattccgcgaaattgcagtcggtggatcgagacaaccggaaaatgaaatacagaggcagaatgatatcggaagatgttgttctgcctcttctttttagaccgtatttggcgttgcatttacctaaaaacaaaaaagttcatagaaaatacaagaatatctggtagaataaacatgggtttgagtatgataacgttgtggccgcggatgttgccgagccggaatgggaagcgaagcaacggcaagatcctgttacagtgtgcgggtatggagtgtctgtgtactgtgaccagaaaagagagtggatatgcagcagaaatatttgaaaaagaaaagagaaatttctaaaatcgcggcgggaatcctggcgacagccctgctcgcctcatcggggcagccgcttatggctttcgcctcggaaaagattcagacgaatgacccgtccgcctcggaacagtgggcttttttcaatgacggttcctttgcagcggaggagatgaggaagtatccggtgtattcggatccgttcggacagccgacggagaatgcggagcttctgggaactcttgtggaggtgaaaaagcgccaggcggtatccggcgtagatattaacctggagcaggcatggaagacgtacggaaacggaaatcatgatacgatcgtcgcgatgatcgatacgggcatcgactacacgcatgaagatctgaaggataccctgtgggtgaacacggatgagatcccgggaaatgggatcgatgacgatgggaacggatatatggacgatgtctacggatggaatttttataataacaacaaccagattttcaccggggaagaggacagccacgggacccacggagccgggacgatcagtgccgggacgggaaacgggatcggaattgccgggatcgttcccggaaaccgggtgcgagtgatggcgctgaaggcactaggaggcacggacggcggagggagcacggcagcagtcatcaaggcggtcaggtatgcggaggacaatggagccgtgatctgcaatctgagcctgacatcgacggtggatgacaaggcgctgtatgaggcgatgaagaattccagtatgctctttgttgtggcggcaggaaacggaaatccgaagaccggaaagggagttgacacggatgcgatcccgttttatccggcggcttatgatctcgacaatatcatttctgtcgcgaatctaagtatcgacggaacgctctccgcaagttcgaactatggaaagaaaacggtggatctcgcggctccgggaagctatatcctgagcacaacgccgggaaatacatatggttacatgagcggtacttccatggcggcgccgatggtatccggtgcagcggcgatggtctattcctattttgacgggatcggggtcgcagatgtgaaggagatcctgatgtccacggtgacgccgatggagagcctgaaagatgtgacggtttccggaggaatgctgaatgtcggagcggcattatcctacgatatcagcacactctcaagaaagggattccagaacggcggaacgagaccggaaaatgggacgtcacctcatatcgagatgcagacctcgagcaggaacggaggaaattatctgactgtgcgcgttatcgacatcgacggggatctcgacaaacttctctatgcaaagggagagcacacggcggaggaatttgcgaacgggacggtggaaggaacgccatttacggtgaatgacaaagataccgcggcatttcagatcacggaaaaaggaacctataccttttatgcggtcgacaaaaaaggaaacggagccgtaaaactcgccagattcgtgtctgagagcgatgggccaggggcgtttcaataaaactcgccatacaaggatgcaggtaagatcctgtgagggaatatctgcaaatcccactgcgttattgcaggaaattttgccggacaggaatgtgaaaacgaaggaaatgagtcagaaaaaaattatgggatatgaaaaaggagagagacagatgagaacaaggagattggggaaaacaggtctgatggtgagcgagatcggctttggcggcgagtggcttgagcgccatccggaggaagagagcatcgagctgatcaaatatgcatcgaaaaaggggatcaacatcctggactgctggatggcggacccgaaatcaagaaatatcatcggtgaggggattaaagagaaccgcagccagtggttcattcagggacatatcggatcaacctggaaggacaaccagtatttccgcacgagagacatgaaatacgttcgcccggcttttgaggaccttttaaagagactgcagaccgattacatcgatctcggcatgatccattacgtggactctgaggaagaatgggagaagatccagcattctgactacctggactatgtgatggaattaaaggaaaaaggcatcatccgccatattggaatgagctcccacaacccgaaggttgcgatgaaagcggcggaatccggctatgtggagatgatcctcttcagcatcaatccggcgtttgacatgctgccggcgagtgaaaatatcgacacaatgttcgcggatgagtttgatgcagggctgaaagggacagatccggaccgtgcaaaactctacaagacatgtgaggagcacgatgtagggatcacggtcatgaaaggatttgcgggcggaagactcttcgatgcgaaacgttccccgttcggcgtttgtctgactccggtgcagtgtattcactatgcgctcacaagaccgggtgtctgttccatcatgtgcgggtatgacacgaaggaacaggtggatgcggcagcaggatacgagacggcttctgaggaagagaaagactatgcgtccgtgcttgcgaacgcgccgtttcactcctaccgcggggagtgcacctactgcggacactgcaagccgtgtgtcgcaaatctggacattgccatgatcaacaaattttatgatctggcgaccatgcagccggaggtccccgcgacgatccagtcccactatgaactcctggaccataaggcatctgagtgcatcggctgtcatgcctgcgaatcccgctgtccgttcggagttccgatcgcggagcggatggagaagactgcgaagttatttggatgctagaatgttacagtacacgggcacttcttgcctgtacatcatgttcagaaaattcattggcaggcgatgaaatgcagtttcgcaaaaaaattcacggaaaaagaatttcgcggaatgtcagaaaaatagaaaaagaaagagtcatgtcatccgacgagaatggcacggctctttctttttacggttacatcgagatccacccaaacgcattcgccacggagctcacaagaatgatcgcggcaaagatcgggcagaggtatttgatcatgaactggaagatgactttccgcttgaacaggtggccgccctcggtaacttcgttctcgatcttttccacaccgatgactctcgatacgagcaggcaggtcgcgatcgccgcgatcggcatcatgacggagttggtcagaaaatcaaagaaatcaaggaactgcattccgatcacggtaatgtccgccagcggaccatatccgaggcaggagagtgttccgagaaagatcatgataacggtcataaagacggtcgcttttttccggctccagtgcagctcatcctcgaaggtggatacggcgctctcggtcagggcgatggagcttgtgaccgccgcaaacaggacgaggagaaagaacaggatccctgtgcctgttccgaatcccatgcccgcaaataccttcggaagtgtgatgaacatgagggaaggtccagcctggagagtatccgggtcgccgccggagaaggcaaagacggccgggatgatcatgagtccggccatgatcgcgatcgcagtgtcaaagatctcaacatttttcgtcgaatcctcgattgaggtgtcctttttcatataggagccgaacgtgacgaggattcccatcgcgatcgacagggagtagaacatctgccccatcgcggagacgacggtcatccaggagaagttttcgaggtttggaaccaggaaatatttcacgcctgccatcgcgcctggtcttgtcacggagtagaccgcgatgatcacggagaggatcacgaggatcggcatcataaattttgagacgcgctcgatcccgttccggacacccatgtagatgatcacaactgtgaacatggtgaagatcaggaagcagatctccgcggaaaacccgttggagataaagccggagaaatagttgtcagctgcgagtgcctgtccgtgtcccagaagatactcaaacagatatttgatgacccagccgccgatcacggaatagtacggcacgatcaggatcgggatcacggcgttgatccagccgccggcggacaggagttttgactttccaaaggatttgtaggctccgaccgggctttttttcgtcatgcgccctaaggaagtctccgcgatgatcatcgtgtagccgaaggtcagtgccaggatgatatagatcagtaagaagatcccgcctccgtatttcgcggcgagatacgggaaacgccagatgtttcccagtcccacggatgcacccgccgccgataagacgaaaccgagttttccggagaacgaactgcgtttatgattcataatatagtctcctcgtgtttttttcacaaatacatttgtgcgtgtaagagacagtctatcatagaacatgcgaaaaagcaatttgatctgcgggagacggtgaaaatggaatagagaggccgcctgtcatagtttcagaacatggaatgacagcggatgcggcaaatatcagaggaaggtcgggataacaaatgagatacggtggatatatgaaaagggagttttttagcagcttttttcgttttttggaatccagaatgaaaaaaatccgtgaaacagaacatgtataaaaagaggaacatccggagaatcctataatttgatggcgaaattgatgattttgcgctataatacactcatacctaccggaaaataggatttaacaaaactcagcggtattcgtgactggagaaaaaatgagagattgtcagagtacgggggcatagatacagagaggtgaaattgtgttaaaagcagaaaatttagtccttcatgtggaggataacgggacgaaaaaatgtcttctggatcgtatttctttccaggtggacgatggagaaatgctggtgatcacgggaccgaacggcggcggtaagtctacgctggcgaaagtcctgatcgggatcgagaaggcggagagcggaaagatctttttaaatggggaggatatcacggattacgatatcaaccaccgtgcgaatgtcgggatcggctacgcgttccagcagccgccgagatttaaagggatgacggtgcagagacttctcgcactggcagcaggaagagaaatgtcagacgtcgagtgctgcaagttattatcggatgtcggactctgcgcggaggaatatttaaaccgtcagatcgacggaacgctctccggcggagagatgaaacggatcgagatcgcgacagttcttgcgaaggaacataccttatgtattttcgatgagccggaagccgggatcgacctctggagcttttccatgctgatccataaattcgaggagatccacaaagagaaaaaacagagtctgatcgtgatctcccaccaggagaagatcatcagcatggcggaccggatcatggtgatcgatgatggaaagatcaaggcggaaggtctcagagaagatgtccttccgtgcctgaacggtctcgataaatgtcatacatgtgcaggaaaagcgggggtgagagcgtaatggtagagttggatcatgtagtagaagaagtattgaaagtcatcaatgacaatggattttctcagaaaggcgctttcaacctgcgtcagaatggaacttccatctgccacggggacagtgagcacatcaagatcaaaaagaagacggacaagccggggatcgacatctatatcgacggcgagacaaagggtgagaaggtctatattccggtcgttgtcagcgtttccggtatgacggatcttgtatacaatgatttttacatcgcagatggcgcggacgtgacgatcgttgcgggatgcgggatccacaacagcggctgcaatgagagccgtcatgacgggatccacaccttccatgtcggaaagaacgcgaatgtctgttatcaggaaaagcattacggagagggaaacgggaccggcggtcgtgtgctgaatccggtgacgaatatctatgtgggagaaaactccgtatttacgctggatacggcgcagatcaagggcgttgactctacggtccgcgagacgcttgtcgagatggagaaaaactccagactgtatgtgactgaacgcctgatgaccgagggagagcagacggcggagtccaacatcgaggtccgcttaaacggggaggagagctccgcacagatcatctccagatccgtcggaaagggaaattccgtccagacgttccacccgaaggcggtcggcaacaacaagtgccaggcgcatatccagtgtgactcgatcatcatggaccatgcggagatcggctcgatcccggagattcgcgcgcgtgatctcaacgcggcaatcatccatgaggcggcgatcggaaggatcaacgatgagcagttattaaagctccggactctgggacttaccgaggaagaagcggagaacgtgatcatcgagaatttcctgaattaaacgggaagctgaagacgggaattttatatagaaagatttcgtacaaatccagattgataaaaaacaggtccgcaggtgaagatcaccggtgcggacctgtttgatttacgcgaacaacgagccaaagtctgcgcttgcgcgagaacttggcgactgtcgcgataataagggaaatattgtttttttagaagtacgtccgtctcttcggcgtattccagcttccgacaacgcgctttacgttggagatcgtgacaaacgcgttaggatcttttgactggacatagtccataaactgaccatattccttctttgtgaggatcgccaggatctcgctcttctgggcatcgctgtagccgccggtggccgtatagacagtgatgccgcgctggagattctcgatcacatagcggcggaattcatcgttgtgttcggagatcacgcacacccggatctttccggtgaactcatcgataaagtagtccagcacgagaccgctgaagtaggtcgccagagcaccgatgatcacggtctgaagatcgtaggcgaaataggagctcgcgaccgtcaccatgccggcgatgatgatcgactggccgagatccagatggagatatttgttcatgatcttcgcgataatatcgagaccgccggatgccgcgttggcgttgaagaggatcgcctgtccgaaacagatcacaacgatcataccaactacatccagggcgatgttccccgtcggagatcccggatccgggaaggcggtttcaaatacgaagagaagtaccgggagcaggatggagataaagatgatctttgtcccgaaagtcttatcgataaagagaaacgccaggatgatgcagatgatgtttaagatcagcgtcatgacggagagcgacagcggaatgaaatttacgaggactactgcgagtccggtgatgctcccgctgataatgtggttcggattcatgaaaaaatagactcccacggcgatgatgaaagtaccgaagaagatcgtggagaaatattttagtttttcgaacatactgtacgtcctttttctgtcagttttttgcagagtttccaaaaacaggagacattgtctgcgtgtaaatcatagagaaaaaagagcggattgtcaaacaggcgctttgcagtgtgagcacttgtatgcggcaaagtgcgggattatcctatttcagtttgtctaattcgcaaagaagcttacttttcagttcttcaagttcctcagcgcttggtctgttatcatcagcgtacatcttatccctcgggtaccaccaaacaggtcctctgccgttgtttccatagttctctatatcgccggtcatcctcggaaataaatgccagtgaatatgtgctccgccatccccgtttcccaaacattcataattcattttttgtgctccgaaagctttttttacggcttcagaaacaagtgtcatttcatataaatgctttgctctt

SEQ ID NO: 2052 - DNA, 4500 bp, Unknown
  gut microbiota DNA sequence
gtccctcgaggaagtacttgcaaagttaaaagaactgggcttacagctcaattccagtgacgaacagtaaattttggttgtgatacattcacccggaaggtaagtccgaagggcgcagaagggcgtagagcgactcattatggaaaaaaggcggcggtccagtaagtccaaagaagcgtgggcggctgttccacaaatggaggaaattaaatcatggcaggttatagaaaactcggaagaacttccagtcagagaaaagcattacttagaatccaggctacaaaccttttatatcatggaaagatcgttacaactgaggctagagctaaagaagtaagaaagatcgttgagagcctgatcgctcttgcagtaaaagagaaagataacttcgagactgtaaaagttactgctaaagttgcccgcaaggacgctgacggcaagagagtaaaagaagttgttgacggtaagaaagttactgtatacgacgaagttgagaaggaaatcaagaaggacatgccgtccagacttcatgcaagaagacagatggtaaaagctctttatgacgtaacagaagttccgacagcagcagctggtaagaagaaaaacacaaagaaagttgatcttacaaacaagctgttcaacgagatcgctccgaagtacgcttcccgtaacggtggttacacaagaatcatcaagatcggtcagcgtaagggcgacggtgctatggcagttctgatcgagctcgtttaattctgtatagcaattagccgtacggcagaacttaaggccggtggaatacgttttatgcgtgttctgccggtttttttgcgtcatatggataaaaggaaagccactgttcttcttccgcgatctttttgtgatcgatggaagggaacagtggcttttcgattgccataaaaggtgaccaaccggcttttgaaacaaaagattaattgatcccgaactgctgctgaaactgttcaaagaactggttgaaagctgccgcgttggccgggtctttcatcaagttggtgatcgtcagagcataaaagaactcaccaataccgaggagaatagcgatcacaccgagaatgatgcctgcgatggctgttccgcggaatgcccgcccgcgtttggagatgatcgcgaaacagatcgcgccgactccgcagatgatcgcaaccgggaatgcgaaacagcagagcgtcaggagcgcgaagataccgctgatcagggacatcgctgcaaatgagtttttctcgcgtcttgggcgctgcggctgatcctgccagtagggcggctgcccgttatactgaggaggaatctgctggttgtttgggttctgccagtaaggattctgcccgttgttctgaggaggaacctgctggttgtttgggttctgccagtaaggattctgtccgttgttctgaggaggaacctgctggttgtttggattctgccagtagggatcctgtccattattctgaggaggcatctgcctattgtccgggacctgctggtttgtatcctgtccgtctgccggggatgaaatctgctgaccggtctgttctgcaggagctgtttcagtggtttggtctttatattcagatgaattctgatcgtcgtaatctgtcatgaaaattcctcctaaatgtatgtgaaacttgtccgcgccgcggaaaaatgacacggaacagttaccgtatagtttaacatgaaacgccgcgcatgtccacatttaagttgcataagaggatggattgaattataatggagattgacatctccggcagcctggagccgtccggggaagaaccagaaggagaaacaacatggacattttaggcgtactgacagcggaattaggggtaaaaaggagccagatcgaggcagccgtaaatctgatcgatgagggaaacacgattccgtttattgccagataccggaaagaagtaaccggttccttaaacgatgaggtattaagaaacctggatgaacgattaaaatatctgcgcggactggaagaccgtaagacccaggtcctcgcggcgatcgaagatcagggaaaacttaccgctgatctgaagaaaaagatcgaggatgctgagacgatggtggcggtcgaggacttatatcttccattccgcccgaagagaaagacgagagccagcgttgcgaaggaaagaggactcgagccgcttgccgacacgatcatgctgcagatggcgaaggagccgatcgagactcttgcggccccgtatgtatcagaggaaaaaggtgttgcgaacgtgaaagcagcgatcgacggcgcaaaggatatcctcgcagagcggatctccgaggttgcgaaataccgcgcctatatccgaaacgtgacgaaggaagagggatcgatcgtctccgaggcaaaggatgagaagtcagaatctgtctatgagatgtactatcaccacgaggaactcgtgagaaagtgtgcaggacacaggatcctcgccttaaaccgcggcgagaaggaaaagatcctgactgtaaagatcgtggctccggaggagaagatcctgcgctatctgaacaagatggtgatcacgagagaaaacccggtgacaactccgatcctgcaggaagtgatcgcggacagctataaccgtctgattgctccggcgatcgagcgtgaggtcagaaatctcatgacggaaaaggcggaggacggcgcgatccaggtattcggaaagaacctggaacagcttctcatgcagcctccgatcgccggacgcgttgttcttggatgggacccggcgttccgtaccggctgtaagctggctgttgttgatgcgaccggaaaagtcctcgataccgttgtgatctatccgactgcaccgcagaataaggtcgaggacgcgaaaaagaccttaaagaagctgatcgagaaatatcagatttccctgatctccgtcggaaacggaactgcttccagagagtctgagcagatcatcgcggagtttatcaaggagatcccggaacacgtccagtatgtgatcgtaaacgaggcgggagcttccgtatattctgccagtaagcttgcgacagaggaattcccgaaatttgatgtaggtcagagaagtgctgtctccatcgcgagacgtctccaggacccgcttgcagagcttgtaaagatcgatccgaagtccatcggcgtcggtcagtatcagcatgatatgaaccagaaacatctcggtgaggcgctcgggaatgttgtggaggactgcgtaaacaaggttggagttgacctgaacacagcatcggcatcccttttggagtacatctccggcgtgtcaaagatgatcgcgaaaaatattgtcgcttaccgtgaggagaacggtgcattcacaaaccgccgccagctcttaaaggtcgcaaagctcggcccgaaggcgttcgagcagtgcgccggatttatgaggatcgcgggcggggataacccgcttgacggaacgtctgtgcatccagagtcctacaaggcggcgatggaattgttaaaacgtgtccatgtggagccggaggagatcacaaaaggcggagctgccgggatctcaaagaagatcatggattataaaaagctctcagaggaactggaagttggtgaggagaccttaaaggatatcgtaaaggaactggaaaaaccggcgagagacccgcgtgaggagatgcagaagccgatcttaagaacggatgtccttgatatgaaggacttaaagccgggaatgatcttaaagggaaccgtcagaaatgtcattgatttcggcgctttcgtagatatcggtgtccatcaggacggtcttgtgcacatttcgcagctttccaagaagtacatcaagcatccgcttgaggcggtcagcgtaggggatatcgttgaggtgaaggttctcggagtggatatggcgaagaaaagaatttccttatctatgatattggacgaggaataaattctaaattgtcgatatgaaggaatatttaattggcggaaaagtcctgaaatccctgcggcaggaagaaactgattttagcgtaggaatgccagagatataaggcttttaaggagactaaccagataaaaatgaataaacaggtcagacggagaaacatccggcgagccgaagaaatggaggagtcattcatgaagtataattttgatgaagtgatcgaccgtaaaggaacccatgcagtgaaggttgagcgcctgccaaagggagcggacaaggattcactctccctctggatcgcggatatggattttgcctgcgcagaaccgatcttaaaggctctccatgagcggatcgaccggaaaatcttcggatacaccatgtacgatgcggacgagtgcatggatgcggtgacaggctggatgaaaaagcgctacggctggaatgagagcagagagaacctgtttttctgtccgggcattgtggctgcctatgcggcactcatcaacctcctcacaga

SEQ ID NO: 2053 - DNA, 26155 bp, Unknown
  gut microbiota DNA sequence
atcggcaaactttcactccggaaaattctgcctgtgaaaagcaacagacaatctgcatagtccatctttaaatcaccaatactgattccatgaataaatggaatcagaaatgccggagaaaaccgaaaaaaatagggagatcccgggcagggatccggagaaaatacgtggaagattttatcatctgcgggctgaccggatggggactcgagatcctgctcacatccgcggagagtcttgcggctggggactggaaaatgatgggaagaacatccctctacatgtttccgatctatgggctgggagtgctgcttggaccgatcggaagaggagtggacgcgtggatcggggatttcggggaaatctctgtgcgggaccggatcattcgccatgggatccttgatatggtgctgatctttctgacggagtatctcaccggatcacttttaagaatattcgggatctgcccatgggactataccggaagaatgcttcagatcaacggggtgatccgcctggacttcgctccgttctggttcgggatcggtctcctgtttgagtatctgacaggccggaagacaaaaagtccgttgccgtaggggctgtgtgccagtggcacacgttcagcaccggccgaagcgtacggaacagttacaatttgagatggatttgagatggattccacctgtatttgagttgcaaatgaaggtcatattcggtataataaatctatatgaacctcaacacagtaactctttaaagtgtacgaaaaaaagggagtcccggataaaagaatgtgcccgggaatgtgacccggaacacacgccgttctgtgtgaacgtccgcggaatttccggggcgcgcaaaagacagagaagagtaagaaacaagagacagccgcggaaaatgacggctgtgatcagacaagggaggtttgtacttatgattcgattgatcatggtcctggtcgttctggtcggatttctgatcgtcagttatccgttcctggtggcccaggtttcacttggaaaaaaagatccgcatgcgagagatctggagtcgatccgggttgtccgggcagtgttccggtgtctgttaaagcttgcgggtgtgacgatcaccgtaaagggtgaggagaatattccaaaggacacagcagtcctctatgtgggaaaccacagaagctattttgacattctgaccggttatacgacggttccgacgctgctcggatttgtggcgaaaaaggagatggagaagatcccgatcctcagaacctggatggtcaatgtgaactgtctcttcctggacagaaaaaatatcaaggaaggtttaaagacgatccttcaggggatcgagaaggtgaaaaatggtatctccatctggatcttcccggaaggaacgagaaatacgaacgacgatatcacagagcttcttccgtttaaagagggaagcctgaagatcgcggagaaatccggctgtccggtgatcccggtggcgatgacaggtactgcggaagtcctggaaaagcattttccattcatcactccgtcccatatcactgtctattacggaaaaccgatcaatctcaaagagctggatccggaagaccggaaacatccgggtgcatatacgagaaatgtgctgatcgggatgctgaaggagatgcaggaagaaaagtgataaaagaccataccggtcgatcacttcacaaattccggaagagaaagagcggatcatgtttaaggaaaaaagggtccgcgtgctgtaaaatgacagaaagcagaggcaatagaaatacatgaagaatcttgacttaaaagaatgcagggacaggctggatgtgatcgataaagagatcgtccgcctgtttgaagagcgcatgtccgtctgcggagatgttgcagaatataagatcggaacgggaaaagccgtttatgatgcgacgagagaggcgcagaagatcgcggcagtccaggatctggcgcacagcgattttaacagagaggcagtgaaggagatcttctcccagctgatgtcgatcagccgccggtatcagtatggtctgttatccgcccatggaatgggaatggataccggtttttccgaggtagaagagatcgccaaaaaaggaaaacggatcgtattccagggcgttgagggcgcatacagccatgcagcggccaaagcatactttggtgaggatgcggatctctaccatgttccggaatttgaggataccatgaaggaggtcgaggaaggacgcgccgattacgcggtactcccgatcgaaaattccacggccggtttcgtgatcaacaattatgacctgctcttaaaatataagaattacatagtaggcgagatctatgttccggttgcccacatgcttctcggcgttccgggtgcaaagctctccgatatcaagacagtttattcccacgcccaggcgctggcccagagctctgatttcctctctgcccataaggaatggaaacagatcgcagttttaaacacagccgttgccgcgaagaaggtcatggaggagcaggacccgtcccaggcagctgttgcgagccgcactgcgggggaactctacggaatggaggttctcgcggaggagatcaataacgtaaagggaaatacgacgcgcttcctgatcctcgggaaagagccggtctacgcaaagaaagccggaaaaatcagcgtcgcgtttgagatcccgcacaagagcggatctctttacaacattctcggaaacttcatcttcaacaatgtcaacatgatgatgatcgagtccagaccgatcccggagaagagctttgagtatcgtttcttcgtggattttgaaggaaacttaagcgacgcgggagtccgcaacgccctgacagggattgcggcggaagcttccgtcatgagaattttaggaaattattgatgaaagacggtccggtattttccggaccgattcttataagaggaggaaaagctatggcagcccttacatttgcagccatcgatgtgggatcgtttgaggttgagatggggatctatgagatctcaaacaggaacaggatccggaaattggaccatatccgccatgtcacggcgcttgggagcgatacttacaacaacggaaagatcagctatgagatggtggaagagctttgcgatgtacttgcggggtttgccgggatcatgaaatcctacaaggtcacggaataccgtgcctatgcgacgagtgcgatgcgtgaggcgagaaacaaccggatcgttctcgatcagatccgcgtccgcaccggcatccagatccgtatcatcagcaactcagagcagcgattcctgggatacaaggcgatcgccgtctcggatgatgagtttgatgagaatatccagcaggggaccgcgatcgtggatgtgggatttggaagcatgcagatctcgcttttcgacaagaaccttcttgtgaccacggaaaatctgccgctcggtgttttgaggatccgcggcactcttcaggacgtcaatacgacggtggagcagtaccgggatctcatcggagagatggtggacaatgagctggaaaactataaaaagatgtacctgaaggataagaagatcaaacatctgatcgggatcggagaaaatatcctctatctgttccggtatgaggatcacggaaaaccgctctgcagagtcacgagagagcgctttgacgagttctatgcgcgccttgtcacgatgaatgagacacagatcgaggaggcattcggggtgagcagggaatatgcgtctttgcttcttccgtgcgtggtgatttataaaaagttccttgagatgacaggagcggagatgatctggatcccagggatccgcctctgcgacgggattgcggccgagtacgcggcggacaagaaactcttaaaattccgtcacaattttgacaatgacatcatcagcacctcgcgcacgatggcgaagcgctaccagtgtctgagccgccatacggagacagtggaaaaatatgtgctccagatctttgacacgatgcggagataccatggaatggggcagagagagcggcttctgttacagattgccgtgctgatccacgcctgcggaaaatttatcagcgtccgcaactccaacgagtgcgcctacaatatcatcatgtcgacggagatcatcgggatctcgcacctggaacgtgagatcatcgcaaatgtggtccgctacaacatccgggatttcgattacaacaaggtccggatggagaccgagctggacgctgtgacagacagcttcggcgggcagaatgaggtcatgctcctgatcgcgaagctgacggcgatcctgcgtctggcaaattccatggaccgcggccacggggacaaacttgcggactgcaagatggcagtaaaagacggaaagctcatgatcacgacggattatccgggcgatatcacgctggaggcggtatcctttgaacagaaggcggcattcttcgaggagatcttcgggatccggccggtcctgcggcataaaaaataccgctagatgccggagtgcagacagggatattgctgcgaaacacgatgaattcaggatgtgaaagggtgtccggagccggttttcgtctgcgcactgcgtgaacaaaaaccggccggatacaggaaggcagagaaatgaaaaaagagttaaaaaaggggaatgctcagaaagaacagaaggagcaggatccggcacgcttcaatgatccgaaaaattatgtaaaccgagaactcagctggctggaatttgactgccgtgttctcgaagaggcaagagataagacgacaccgctctttgaccggctgaaattcttaagcatcacggcatcgaacctggatgagtttttcatggtccgggtcgcatccttaaaggatatggtccatgcgggatataaaaagccggatatcgcggggatgaccgcgtcggagcagctggaaaagatcagtgtgcggacccacgagcttgtcacgcagcagtacaacacatataaccggtcgctgctcccggctcttcggagcatcggactgaaccttatcgagaatcacgaggacctgaccccggagcagggcgaatttgtggaccgctatttccgtgaggaggtctatccggtcctgacgccgatggcggtggattcctcaagaccatttccgcttgtcagaaacaaatccctgaatattgcggcgctcttaaagaaaaaagagggcggcaaggagctggagtttgcgatggtgcaggttccggctgtccttccgaggatcatcagcctcccggtgacaaccgatgagaacaaccgtgagatgcggaatgtgatcttcctggaggagatcatcgagcggaacatgcagcagctgttcttaaactatgatatcgtgacgtcccatccgttccgtatcatgagaaacgccgatttctccctggacgaggaggaagctgtggatcttctcgaggagatcgaaaagcagttaaagcgcagacagtggggcgaagtcatccgtctggagatcgaggacaaggcggaccagagacttttaaagatcttaaagagagagctggaagtcaacgaggaagacatctttgagatcccgggtgcgctcgacctgacggtcctgatgaaaatgtacgggcttgatgggtacgaccacttaaagaccccgaaatatacgccgcagccggttccggctctgatgaatgacgatgatatctttacgaacatccggaagggcgatatccttctgatgcatccgtatgagacgtttgatcctgtcgtggacttcgtgcggagcgcggcaaaggatccggaagttctggcgatcaagcagacgttataccgtgtcagcggcaattccccgatcatcgcggctctggcggcggcagctgaaaacggaaagcaggtatcggttctcgtcgagctgaaggcgagatttgatgaggagaacaacatcatctgggcgaaaaagctggaaaaagccggatgtcatgttatttacggactcgtcggcttaaagacgcactcaaagatcacactcgtggtccgcagggaggaagacgggatccggagatatgtccatcttggaaccggaaactacaacgattccactgcaaaactttacacggactgcggaatcatgacctgcaatccgatgatcggagaggatgcgactgcggtcttcaacatgctctccggatattccgagccgttaaactggaacatgctttcggttgccccgctgtggctcagaacgaaattcctgcatctgatcaaccgggagacgaagcatgcaaaagacggaaagccggcatcgatcattgcgaagatgaattccctctgtgacaaggagatcatcgccgcgctgtatgaggcgtcctgcgcaggggtgaagatccgcctggttgtccgcggcatctgctgtctgaaggcggggatcccgggactttccgagaacattgaggtccgctcgatcgtcggagaattcctcgaacatgcgaggatctttatctttgagaacgacggaagtgaagagatctacatgggaagtgccgactggatgccgagaaacctggaccgccgtgtcgagattatgttcccggtattgagagaggaactcaaagacaggattcgcagatatatggagctggagttggaggacaacttaaaggcccatgtgcttcagccggacgggacatatgaaaagccggatcgccgaggaaaacttccggtcggctcccagatggcactctgcgagatggcagtcaatgctgcgaaagaggagcggaagaaaaaacagcaggacgaacaggcccgcgtgtttattccgatcgagagtgaaaactgatccgcgagcggctgtaaagccggcagcagaagtgcagctccgtgactgacagagaaaaatgaaaaagtttataaaatttttattagcactcatcaaaaatgagtgctaattttattgacattttgattttctggtattaaaatatgtcatgttgaatcgaacagctgttaaaaatcccggagatccggggcgataccggctgtcctgaaagaagaaaaaagtagctgtttaagaatggaacggttacagagaaaataaaaaacagcggtccggcgggcggcaatacagatcgtcccccgacgcgcgaatggaaataaggagtggtttaacatggcaaaaagcggaagtctttcaatcaacagtgagaatatattcccgatcatcaaaaaatggctgtattccgatcatgatatcttttatcgtgagttagtcagcaatggctgcgatgccatcacaaaattaaagaaactggctctgatgggcgagtatgagaccccggacgatgaaacgtataaagtccaggttactgtaaatccgaaggaaaagacgatcaagatcgaagataacggtctcggtatgacagaggatgaggttgacgagtatatcaaccagatcgccttctccggcgcccaggatttcctgaacaagtacaaggataaagcgaatgaagaccagatcatcggtcatttcggactcggtttctattccgcatttatggtagcggacaaagtaacgatcgataccttatcctacaagaaggacgcaaaaccggtccactgggagtctgagggcggtaccgagtttgatatgaaggaaggcactaaggaaggccacggaaccctgatcaccctgtacttaaatgaggacagcgctgagtttgcgaatgagtaccgcgcaagagagatcctcgacaagtactgtgcatttatgccggtcgagatctacttaaacgatgagactgctgagccgcagtacgacacgatcgagaaagaggaactgaccgacaaggatacgatcatcgagacgatcgttgagccggcaaagaccgaggagaaggaaaaagaggacggatcgaaggagaccgttgaggtgagtcctgcgaaagagaaatataagatcgcaagacgcccggttccggtcaatgatacgaacccgctctggaacaagcatccgaacgagtgcaccgatgaggagtacaaggagttctaccgcaaggtattccaggacttcaaggagccgttattctggatccatctgaatatggactatccgttcaacttaaaaggaatcctctacttcccgaagatcaacatggagtacgagagcatcgaaggaaagatcaaactctacaacaaccaggtattcatcgcggataacatcaaagaagttattccggaattcctgatgctgttaaaaggcgtgatcgactgcccggatcttccgctcaatgtatccagaagtgctcttcagaacgatggatttgtaaagaagatctccgattacattacaaagaaagttgctgataagctctccggcatgtgcaagacagatcgcgagaactacgagaaatactgggatgatatcaatcctttcattaaattcggctgcttaaaggacgagaagttcgatgagaagatgaaagattacatcctctataagaacctggacggcaaatatctgacactcgctgactgccttgaggagaacaaggagaaacacgagaacaagatcttctatgtaacggacgagaaagagcagagccagtacatcaacatgttcaaggaagccgggatcgacgctgtgatccttccgaacccgatcgatgcccctttcatgcaacatgtggagcagaagaatgagggcttaaagttcctgcgtatcgatgcggatgtcaacgagacattcaaagagacggaggagaccgatgaggccgcgaaggagcaggagaagaaggacgccgagactctcgctgaggtatttaagaaggcgatcggaaacgacaagctgaacgtgaaagtcgagaagctgaaaaatgaaggtctcgcttccatgatcacagtctccgaggagagccgaagaatgcaggatatgatgaagatgtacagcatgtacggcggcggttccgatatgttcccggctgaggagacattagtcctcaacgcaaacaacggtcttgtaaaatacgttcttgccaacaaggacggagagaagacaccgatgctctgcgaacagctctatgaccttgcgaaacttgctcacggaagtctttctccggagcgtatgacaaagttcattgcgagaagcagtgagatcatgaaggaagaatatggtgcataagagaagagattttctgatcacatttacagttttatgtctggccatgtgtgcctgctcaggccttcagtacctgggcagtgcgttctatctcatggtgcggcactgggtgttcagcctggagagcggcgggggtcgtctgctctccgggctcttttcgtccccgtggaccggagtcctcgtgcagtatgtcttcagcatcggacttccgttccttgcggtgatcccgatgacatggtttctgcggtcagaccggagaccggcccagaaactttcggcggaagtatgggtttctgcgctgttcatggcgctgggactcggctatatctttaacttcctgggagtctttcttgactcgtttatttccatatttaccggtgtatcggctggagatatgaacccggtgatggacgcactggatgcactgacgccgggaatggtgatctatacctgcctggtggctccgtttatggaggaactgctcttcaggggagtgctgttaagaaaagcgagacgatttggagaccggacggcggtcgtattcacggcggtcatgttcgggctgatgcatgggaatctgaaccagttcctgtatgcggtggtgatcgggctggtgctcggttatctcgcagtgcggacgaaccggatcctttacaatgtcctgctccatgtggcagtgaattcgttttcgatgctgctcgtgatggtggaggacgggctctatgcgctggggctttcctgggcggcagcggcgttttcgtttgccagttttcttatggtcctgctcctcatcgcggcagggatctatttcttcttccgggacggacgccgttactggtggcagatggggcagcggaacggagtgccgacatcgtataaaaaatatgtgtatctgaatcccggatttcttttttatgtgatcattttcgggatggagatgctgtcgtatatgatgaaatgagcgcaagagagccataaaactgcttgcagatttatggcgaacggcgaatgccattaacgaggattccgcctgcgtcagcaggcaatggagcgcgtcagcgcggggaatctgagtttaagatgattttgtacgtcacagacggattgatccggcagaatatactgcgggcagtggacacactgccgcgataacgtggtatgttctgccggatttttcgtttgaaatgcttgaaatgggaccgggctcttggtatagtagtgggagacatccggacggtccgacaggagaaatgatccgggagcgcacgctgatccggaaaggaagagcggggcgtcagaatgagagtaagaggagacaacatgcagagaatcgcgaaatttgaaaaagtaagctttgagcagtttaaaaaagactggcagggggaacacccgcaggatacagacgatatgataaaggagatctatgacgggatccgtctcccgaaacgggcgaccgcaggctccgccggatatgatttcttcgcaccggccgcatttacattgaagcctggtcagatgacaaagatccttaccgggatccgtgcgcggatcgacgatggatgggtattaaagctttatccgagaagcggacttggatttaagttccgcctgcagttaaacaatacggtcgggatcatcgacagcgattactacggatccgacaacgagggccacatccaggtgaagctcaccaacgacagccgtgaaggaaagactgtggaagtggaagccggaaccggtttctcccagggaatctttgtggagtacggcatcacggtggatgacgaggccgatgaagtgagaaacggtggattcggaagtacgacacgcgcgtaggagacagagcaaatttccgaaggcgcggagaatgaagaatcagaagtatcacagaaagaacaaaattaaatatatagttgaaaaatgtataaatattatcgaaaatcagaaaaaagagaaaaattaaaagaagatatattgaatttgaaccgcacaccggctgcggtcgtctgtgaagaccggcatttccatgcgaaagttcgaaaccatatcgcatcagctcttctcatcgctggcatgctttttctccttaccggctgcggtcatgtgacagaggagatgaaggcggggaaggaaaacgggatcgctctcatggagaacggcgattatgagggcgctgtcgcggagtttgacagcctgatcgatcagacaaagcatgtctcatcctttgagatcgatgtattaaaataccgcggtgaggcagaatttatgctgggagattacggtgccgcggcgtacacatatgatacgctggtgaaggtggataaaccgagagcggaatactattatctgggcgcggtgagtctcgcaaattccggcgatatggaaggcgctgaaaaccgtctggagtccggaacaaaggcggacgaaaaacatgcagctgccggctatgctgaagcgatggaagctcttggggcggcttatatgacggccggagatgagacgaaggcagatgagatctaccagacgctggtggaagaaggattttccagcacggaagtctataaccgctggatgatggcggcgatgaaaaaaggcgattacgaggaagcactgcagcacggggaagcgggatttgcactctccgatgacagggcgaagaaggagatcgccttcaaccaggcggtgtgttacgagtacctggggcagtatgagaaagcgctggagctgttccggagctatgaggaacagtacggacaggatgagaaagcggatcatgagatcgcgtttcttgtgacgagataggagaaagaatggcagaattgatagagatcggtgagcagcaggagcgggtgatcctgtttgccgccagcacgaacgactccgatgacacggaggaatccgtggaggagctgaaagagcttgtaaagaccgcgggagcggagacagtcgggaccgtgatccagaaccgggaaaacatccatcctggaacctaccttggaaagggaaagatccaggaactgaaggagatggtctgggagagcggagcgaccggagttgtctgtgacgatgagctctccccggcacagctcaaaaacctggaggatgccctggacacaaaggtcatggaccggacgatgatcattcttgatatctttgcggcccgcgcgaagaccagggaaggaaagatccaggtcgagctggcgcagctcagataccgtgccgtccgtcttgtcggactcagaaattctctgtcgagactcggcggcggaatcggtacgaggggtcctggtgagacgaaactcgaggtggaccgcagacggatccatgagcggatcagccagttaaaatcggagcttcaggatgtggagcgccacagggatgtggtgcggaaacagagagagcagagcggaactttgacggcggccatcgtcggttatacgaatgccggaaaatcaacactcttaaataaactgacaggagccgggatcctggcggaagataagctctttgcaactctggatccgacgacgagagcacttgtgcttccgggcggggagaaggtccttctgacggatacggtcggatttatccggaagctaccgcatcaccttgtcgaggcattcaagagtacgcttgaagaagcgaggtactgtgatgtgattctccatgtggtggactgctccaatccgcagatggacatgcagatgcatgtagtctacgagacgctgcgccgactggacatcaaggataaagagatcatcaccgtgttcaacaaggtggaccgtccggatgcggacaccgcctgccgggacatgtctgcggactataaggtacggttatcggcaaagacaggagagggcatcggggaactgctcgatctttttgccgtgatcttaagaaaccgcaggatctattttgagaaggtctttgcatacaaggatgccgggcggatccagacgatccggaagagcggacagcttctctcggaggaataccaggacgacgggatccatgtgaaggcatatgttcctgtggaactgtttgaagagctgtataaggactagcggaccggccggtcagcatcgggaactttctgtccggccgggcagaaagccggaagacagagaacgctgacagggcggacagacacgctccggcatgtggggaatgccggaaaatcggactttgcagcatttgatatgagggggtaatcttatggggaagacacggggaaaagaatttgccctggattttctggcagatgtggcgggcggttttatccaggctgttgcgctgcactgctttatcgacaacattgatatcgcgccgggaggcgccagcggtatggcgatcctgctcaaccgtctgacgagcctgccgatcggtacactgacatttttgatcaacatcccgcttctgattgcgtcctggatctatctggggaaggaaaagacgatcaagacattgaaaaccgtggcgatcatgacggtgatccttgatggactggtgacgccgtatttcccggtgtattcaggggataagatggtgtcctgccttttcggcggagtgctcatggggatcagcctggcggtcgtatttatgcgcggttccacaacgggtggcggcgatatcgccgcgaagcttttacagaagttccgcccgcacatgcagaccggaaaggctgtcatggctacggatctcgtgatcattctcctgtccatggcggtgttccggaatattgaatcgggtctttacggactgatcaatatggtagtcggaacgtatgtgatcgatgtgatcctctatggtatgaataagagcacgatgatcacagtgatcagcccgagatccacggagatcgcaaaggagctgatgagagatctggagcgcggctgcacgctcttaaagagccgcggtgcctaccgggaagaggaaggcgagacggtgatctgcgtgcttgataaaaaacagttctaccgtgcgaagaagatcgtctacgggattgatccgaccgcattcatgatcgtctccgaggctcaggaagtctacggggaaggttttctggcttccgactgggaagtgtaaaaataaagaaaagaaaaagacgatccgccaggtaatttgcggatcgtctttttgtgtcacgggagttctgggggaattcccgtgacgatgacttccggcatccggggaagacgccggtgaaggggtacggcctgaccgcggccgcggggttatatcaaaggatcgaattattcgataatgccaaggctcttagcgtactccgtatactcgtcgtaccattcgttgtagagattctgatcaacaacttcatcgatgatctcgttaatcctgtctgtcagggcatcttcccctttcgggataccgattcttgttccctgtgtctccggatcaactttaaagtagaggttcggaacgatcacgaggttgctgtccgggttggattccagatataatcttgccattctgagagcagcgactatgacatcggctttgccggtctggaccatcaggaaaccatcgtttgtggaagaaacacggttgtattttttatagctcgggatctgttcctgtacgaactgttcctgaagggaaccgttctgtgcaacgacaaccttgtccgagagatcattgaaggatttgatgctgtcgacatcttccttgcggaccaggataccgtaagcagtctgcggatcttcgtctccgaagtaataacctttggagaggttcatggtctcagctcttgccggtgtgtaagccagagcggagatcgcgagatcatatttgccggtcgtgatgcttccgagaacgcttgtgaagtccatcggtttgatgcggacctcaacgccgagggattcgccgatataatttgcaagctcgatatcggagccgacataggcttcatcgccgctctttgtcggatcgatgaactcgttcggagcgaagtacggctcggtcgcgatctcgatgtatccgcgttccaggatgtcgtttaaacgatttccggagccggtcgtctctgctgccaccagacctgcgtctgtctgcggagttgttgtctcagatgccgttgtctgcgggatcgtagcgcccattgcggaggaaccggaacatccggtgagtgccgcagcggataataaaagtgacgtacctaagatgaaaagctgattgaatgtcttcatggatggttcctccttgtatgctcttgattcagcatgctaatgaactttcgatttagcgtggtaaattgctatcatggtgaagagtatacaggaggaaaaaagatttgtcaagtgggttattaaaaaaatttgagatctacttcgcggatgccttggagagcgccgttttcaccgccgatacgagcgccatggaggtgtactgggatccggcggggtattccagatcttccagactctggttttcgaggatctgttctgagatgagatccatggcaggagccattagaggatacatagtctcaacggagtcgcttaaagggacaagggacacggagcggatccccgtgtgatccacagcgacctccacattgacgttctcgctgcctaaaacgatgggagatgaataaagccccggaatatatgtaacagaggcgggagcagcctgtgaggagctctcggatgcctgatcaggcgtgtcatgggagatgttgtcctttttagggcggaacataaagagaaacagcatgatgaggacgatggcgaagccgataaaaagagccgtgtagatgatctccttcatcctgaggacgatgatttttgtttttgaactcatagaataatagatccttttggggatggtttgtattaatcatatgagagcggatgagaaaaaatacatggcgttcctttggtatggtccggagcatgggctggaagccggacaaaaagcttgacatttttatccggaacatatacggtttacatatctgaaatttgaataatgcctgaccgacggaaatgcggtcagggagcaggaggacatagaatgggattgtgcatggtgatgggcggttccggagccggaaaaacagaatatatctataggaagatcatcgagctgtccatgaaggagccggatggccgtttttttgtggtgacgcctgaacaggcgacgatgcaggcccagaaggagatcgtgagactgcatccgaatcatggaacgatgaacattgatgttgtgagctttgaacgtctggcttaccggattttttcagaactgtcgattccgcagccggagatcctggacgatacgggaaaaaatatgatcctgcggaaacttgcaggggagaagaaggacgaacttaccatgttttcgtctcatctgaaccgcccggggtttatcggggagatcaagtccatgctctcggaactctaccagtacggggcaactccggaagaccttaagatccagtcggcaggagacggtgtcggtcagatcctttcggcaaagctctccgacatggaggtgatctttgaggcattccgggagttcacaaaggaaaagtacattactctggaagaacttttggatgtgctctgtcaggtggcggagcggtcggagcttttaagggacagtgttatggtcctcgacgggtatacaggttttaccccgatccagtaccggctgatcggaatcctgttaaaaatctgccgggatctctttgtgacggtttctgcgacaatggagccgggactggatctttctgcggagtccgatgagaccgatctctttgatatgagcaggaagatgaccggaaaactgaaaaaactggcggaagaaaacggcataaaaatctaccgcgatctgatcttttacaaacgtccgctggtgcgcttccggaacagtcctgcgctcgaccatctggaacggacatttttccgttatccgtatcccagataccgcggcggcacgaaagaaatccttctcgtgcaggcgaaaaatcctgaggacgaggcagactttataacaaacaggatcgagactcttgtaaaaaagaacggataccggtatcgtgatattgctctggtatgcggggatcttacgggatacagccgtgagatcaccaagagctttgaggaaaatgggatcccgcttttcctcgatgagaaccgggatgtctccggaaatccactgattcgcctgatccagagtgctctcgatatcctgcagaaaggatttgattacgagagcatgttccgatatctccggacggggcttgtaacagatcagactgagaaagtggaccggatggaaatctatgtgcgtgcgatgggaatccgcggctttgccaaatgggatgcggtctgggaccggacgtttgatggcggagaaaatctgaatcttcttgaaatgaatgcttttaaagaggagatcatggcgccgctgcggctgctccgggaacagtgcggcggccggggagttccggtaaagacagtcacggatgcactggcggagcttctggagatgctcggcgcggaggaacagctggaaaagctgtcggagcagtttaaaacatgcggtatggaccgcgaggcgagagagtatgaggagattttcggtcttgtcacggaactctttgagaaatttaaaagtctcctgggggacgaatgtgtggccagaagagagtacgcggagatcctctccgccggtttttcagaactttctgtcgggatgatccctgcaggcgcggaccgtgtggtctgcggagacttaaagagaacacgtctcgacaagatcaaagtcctctttttcctcggagtcagccagggaattgttccggcggaccattcaaagggcggactgtttaccgacaatgagagggagatcttaaaaaagaattccatggagcttgcaccgaccgccagggaagagggctttatggagcggttttatctgtatctcatgatgacaaagccgtccgaccagctgatcctctcctggccggcggtgacggcggaaggaaaagagatccgtccatccggcatgatcggggagatgaaaaagagattcccggatcttgtgatctatgagagcggggaggagaaatgtccggatgtatccgtgacggcagcaaaaaaatccgtgctttcctggctgcaggagccggagaaaatgatggatccggcgcaggaagagccgagagtgctttaccgctttctctcctcggagaaagagacggaggccgagatggaaaatcttgcaaaagctgtcgcctattcttataaaaaaggagagatcggcagaacggctgcgcgggaactctatgggacgctgcttcggggaagtgtcacgagaatggagggatatgcggcatgtgcctattcccacttcctgaatcacggacttggactgcgtgcaggaaaagagtatgagctcgatctttccgatatgggaaatctgtttcaccagtcgctcgatacgtttttcagaaatatccgggatcacgggaaggatttcagaacgatcacggatgcggagcggcggactctggtaagaaaagcggtggaggaggtttctgcaaagtaccggaatacgatcatgaaaagctctgcgagaaatgcatatctcgaaaagaaagtggagaggatcacggaccggaccgtgagggcactgatctaccagatccggaagggcgattttgagccggaagagttcgaggtagatgtcagcacgaggatcccgctgaaagatggggaggcgctgaatctccggggaaggatcgaccggatggatgtgtttgaggatgaggataaggtctatgtgaagatcatggattacaaatcgggaagcacatcctttgatctggcgcttttatatcacggactgcagcttcagctcgtggtctatatggatgcggcgctgaaaatgcaggaaaaccggcatccggggaagcaggcggtcccggccgggatcttttattatcatatcgatgaccctgtgatcgaccgcgaggacgggatgacggacgaggagatcgaagccgggatcctgcgcaggctcagaatgaacggactcgtgaacagcagtctggatgtgatccgccatatggaccgggacatcgaaaaggaatccgatgtgatcccggttgcgttaaaggacggatatgtccaggaggtaaagtcctctgttgccgggggaaagcggtttgccagacttgcagattttgtgaacggacagctgaagactatgggcggtgagatcctggacggaaatgtggcggtcaatccgtataaacagggaaacaggacagcatgtgactattgtccataccacggtgtctgcggatttgatctgaagacagacggatatggattccgccgtttccgcccgatgaaggcggaggagatctggaaggagatcgatccggaggaatcagatgaaaatgagacagaggaacaggaaagcggaaacagaaaaccggaaccgaggagacgcaaggacggagaggagaagatgtgatggcgacaacatggacggatgaacagttacaggtcattgagacgaggcataagaatcttcttgtctctgcggccgcaggaagcggaaagactgcggtcctcgttgagagaatcatccgcatgatcacagatccggatcagccggtggacattgacagactgctcgtcatgacgttcaccaacgcggcggccgcggagatgcgggagcgtgtggagacggctctcggatcacttctcgacgaagacccgggaaataaaaatctggaacggcagagcacgctgatccaccatgcgaagatcaccacgatcgacagcttctgcctgaatctactgagggaacacttccacgagctggatctggatccgggattccgggtggcggacgaaggcgaacttctgctcttaaaagccgatgtgatgaaagagctcctggaggaatattacgggagagaagatgagcggttcctgcagtttgtggacacttatgcgtcagggcggacggacggaggtctcgaggactatattttaaaagtatgggagttttcacagagtaatccgtggccgggagagtggatcgccgcctgccgggacgagctttcggagagcagtgaggaaagttccggggaaaaaggcggaaaggaaccggcctggatgaaattcctgatccgggatgtgggacgccaggcggaggaatttctggatggtctttatgaggcagcagaacttgccgctgaggaggacggaccgcaggcgtatgccccgatgctggcggaagatatccgggcaatggaaatactgaaagaagcggagacttaccgggagatcgcagatgggattgccggattgaaattcggacgtctggcggctgtcaggggaaaacaggtggatccggagaagaaagagcgggcggcagcgctcagaaatgccgcaaaggacggcatcaaaaagatgaaagccctttatcttccgggtgatgtggattctgtgttttccgacatggatgcctgccggggaccgatccggatgcttctggaacttgcggaagaattttccgccaggttccaggaggcaaaagaagaaaagaatctggtggacttcaatgacctggaacattttgcactcgaaatccttacaggcggcagtccggatcacagaccgggagcagtggcggatgaactttcgggaatctatgaagaaattctcgtagatgagtatcaggacagcaatgaggtccaggagacactgatccgctgtgtatccagagaacggttcgggacaccgaatgtttttatggtcggcgatgtgaagcagagcatctataagttccgactggcgaagccggaactttttctggaaaaatatgaatcttacgggaatgaggatgatctgtaccagaagatcgagctccataaaaatttccggagccgacgggaggtccttgaaagcattaatgatgtgttttatcagatcatgacaaagcagttgggaaatatctgctacacggacgatgcggccctgtatgcgggagcaaaatttccggaaacgcccgaagaaggccaggcaaagacggaggtcctgctcttaaatacgggagatcctctttttgacggcatggatgaggaaaaagcggattacacagcacgtgaagcggaggcgagactgatcgctgcaaagatccgcgagctgactgatccggaatccggaatgcagatctataacggaaaaaccggtcagtatgaacgattaaagaaaaaggatatcgtgatccttctgcggagtctttccggatggtcggaggaatttttaagtgttctcggtgcagcaggaatcccggcgtatgcggagtctaggaccgggtattttacagcagtggaagttgagacgatgttaaatatgctggcgctcatcgacaacccgatgcaggacatcccgttagccggagtgctgaaatctccgatcggcggaatgaaggatcgggagcttgccattgtgatggcggactttaagcgggatccggaccgcggggaagatatcggattctatggggcagtgaagcactatctggaaaaacatgggaaacatgatgaaacgatgacatcggcccggaccggggaagagcgcgaagaagagatgatcttccggaagctgcagacctttatggatctgcttgcgaatcttcggagagaatccctgtatcttccggtctccagactgatcggccgtatctttgatcggacaggatacgacaaatatgcggctgccatgccggccgggaagactcggcaggcaaaccttgccatgctggtacagaaggcggaagattatgagaaaacaagctatcaggggctgtttgactttatccgctatatcgaaaaactgaagaaatacaacacggatttcggagaggcatcccggtccggggaacatgatgatgcggtgcggatcatgagcatccacaaaagtaaaggactggagttcccggtcgtattcctcgccggatgcggaaaaaaatttaaccgccaggatgcaagggggcggatcctgatcgacgaagagctcgggatcgcggcagattttctggatccggtgaagaaagtcaaggcgcctactttaaagaaaaatgtgctcgcaaggcgctccaaccttgaaaacatgggggaggagctgagaatcctctatgtcgcgatgacgcgtgcaaaagaaaagctcatcatcacggcgggggacaagtacctggagaacaagatcgaaaaatggggaatgaccggatcagtgggagcactgccgtttaccgtgctgagcgcggcgtcttcctatctggactggatcttgatggcagccgggggcgcaaaaagaacgatcgatgtgaaaaatgtcccgatgaaggatctccttgtggaggaagaaaaaaatcaggaagagaaggcaaaactttacctggaactggaacaactccgcggggaaaagccggaaaaaattccggaactgattcggaaaccgtatccgtttgagacggatctttccctgcatgcaaagatgtccgtctcggaactgaagatgcagggacagttcacggatgatgcggaaagcgcgttcctgatccgtccggagcgggaagatccggcggaagaaacggaacgggggccagagggagagccggagaaatctccggaagcggaagaacgtctgtctgccgctgagaagagggcgcgtcagaaacaggcaacagaccgcggtaccgcctgccaccggatgctggaactgatccatttttcggatatttccgggtatgaggatgtgaaaaaagaatttgaccgggttctctctgaaaagagaatgcagccggatgcggtccgcctggtgtcacccggcatgatcgcgaagtttttccggtccgggatcgccggccggatgaagatggcagacaggcagggaaaactgagaaaagagagccagtttatccttggaattccggcccgggagatgaaaacggcggattcggatgaactcgttctgatccagggaatcatcgatgcatggttcgaggagaaggacggacttgtgatcgtagactataaaaccgacagagtgaaggaaggggaagaacagactcttctggaccattatcaggtccagctgcagtattatgcccgggcgctctcccagatcacaggaaaaagagtgaaggaagcggtcatctattccctgacgatccagaaggagataaacgtaccgatcgggcagtagagaaggcggctgcggaaggctgccggagctgactgaaaaggaaggctgcataaaaaagactgccagatgttgtgaaaaaaggttacttttcacgggtaggaattttctgaactgaaaattccgtatgataccgttgtggtcgcggattttgccgatttggaatgcgaagcatcggcaaaatcctgttacagtacgcgggcatggagtgaccgtgtactgtaacgaaaaaagcgccgggcagtctttttatgcaaacttatttattctgcgatgatcagctctttcgcatacgggagagatgcgatccagtcgcagaaggtgtgccactcggtgagcttatgattctttctcgcgtgatagatgttcacgagagtctcatagttcatcgtgcaggtgcgcatctggttgtagctggacgggaggagctggatcatatcgtaccagtcctctttgttcttgccctcgttcatgtatttcaggcggatctgctcaaggcggtccacaacggtctgcatgtaggcgagagtgtccggagtcatatggtcgtggctgaaatcgtcgatgtcgaacggtttggaatggatcttgtgcatggtactcgtggagtttgcgacggtcgccactttgtaggtatcatattccttccaccagtagagtggagctgtaatgtccacggagacgaagatctggcggatgaatttgcggtggtcgcttccggccatgcggagacgtttcgcaagatcgatgtcattcgggccgaagacgaaatttccatcctcatcgtagctgctgtccatgcgtgcccagctgttcatcgggtttcttgcgccgcgcatggcattttcaaagttcatgacgcttgtgcgttcaaattttatcataatgttttctctccttggttaaagtctggcgaaaaagcagtccggtgcttccgagcaccgtccacaccgccggatgcattcccattataacggtttttttttgtatacacaagatgaaaacttgccaagcacagagaaattcattataatagggattcgaataaaaaagaatggacttcggcgtgcgccggttgaacggagaacaaaatgaaaaacgactatatcgtctgcgtctgtggagacgcgagccgggcggcttacctcataaagggagaaaaaaatgtgctctttgacgctggaatggcatattctgcggacaaaatgatcgaaaatataaaacgggaactgggagaaaggccgttagacgcggtcctcctgtcccattcccattatgaccatatttccggtgtcccgtttctcagaaaggaatggccggatcttgtggtctatggaagtgcttacgcaaagaagatcctggaaaaatcgtcagcgaaaaagacgatgcgtgagctctccgacgcggcagcgcagggagccggatttttaaaagccccggattataaggatgaggatcttgtggtggacagggtcgtaaaagagggcgatatcctgaacttcggtgatcataagatcacagtctatgagacaccggggcatacgaaatgttccctgtcctacatggtggatcaggatgtgatctttgccagcgagactgtgggagtgactaccagtgaagtgtatatgccctgctatctcgtcggttaccggatgtccttagacgcggtagaaaaactgcgccatgcgggggcaaagcggatattcatcactcacgtaggaatcttgactccggaaaacgcgggaacggcgatcctgccgggattaaagaaggaagaattctccgtggaccgggtatgggattatctggaagcggaattgaaacggacaaaagatgagatcgtgaagatcatccggaaataccctgcggaggaagaacgtctgcaggtcatgctggagacctatcacaaaggcgtaaaacaggaagaacagccggacttcgcgtttcttttgaacgcggcggcgacattaaaagttgtcgagcaggaatgcgtgggtcttgaacagttatagtatggaagaaacagcgggatataaaggaggaaaagagtcatgaatatcattgcggcagttgataaacactgggcgatcggaaacaggggaaagcttctggtaacgatcccggatgaccagaagcttttccgtgaggagacaaagggaaaagtgatcgtcatgggaagaaagacactggaaagccttccggcaggacagccattggcaggacgaaaaaatgtggtcctcacgagagatgaggcgtacaaagtaaaaggatgtgagatctttcataatttaaaggatgccatggaattcttaaagcagttcaagtcggaggacatctacatcattggcggcgcagaaatttacgaggcattcctcccgtactgcgatacagcccacatcacatggatcgactacgagtacatggcagacacctggctgccggatctcgataaagatccggattgggaagtgacggcggacagtgacgagcagacctactttgatctctgctacgagttccgaagatatgagagaaccggaaagaaagcattggctttgggagaagtataggagttgtcagatgctggcttcagaaaagaagcttgcttgtgaaaacaatcgtaactattcagtaccttcatagttacgtgcaaaaatccattccagatcagcttcgctgatgggatttttg

SEQ ID NO: 2054 - DNA, 524 bp, Unknown
  gut microbiota DNA sequence
gtgaagaatccgtcaatgggttccgaggacttttctgttctcttcccgaagttcggaccgggcgcacagttccgcttaggatccggaaataacgaggatccgaattccagacacggtcttcataactctaaaaacgtatttgatgagaagtgcatccgcacaggcgcatccgtcatcatccagtacgcgagagatttcttaagataaaggagaacacttatggaaaacaacaagaaaaagctgcagatcccaagtacatgtgcactgttattcatgctcatgatcgtctgcgccatcctgacctggatcgttccggcaggtgaattcgatacagagaaagtgggtaacttaaacaaggttatcgcaggtacctatcacaccgtagaagcttccccggtcggtccgtgggcaactatcatggcagtcgtacagggattctacaaagccgcaaagttaatggtcatggccatgtttgtcggcggtgccgttgagatccttgaaaagacaggagcgatccacgctgc

SEQ ID NO: 2055 - DNA, 3386 bp, Unknown
  gut microbiota DNA sequence
acattcttttttatatgaatgtttatataaagataagattacgtgctctttagtcacacttatttgtgcttgaaaaggcggactacacatataaatattcggtcatccggcaagccggacagctcactcacctccccgtgatttgtagtataccgagttccctgcaagaagaattataaagaaaaaataggctcaggggaacattttcataacgttttgtgcctgagcgaagcgaaaggaatggatataaatatgaatgaaactttcatgaaggagaagccggtctttccgcttctcctcggaatgggaatgcccatggtcctgtctatgctggtgaattctctttataatatagtagacagttattttgttgccaggatcagtgagaatgccatggaagcattgtctctggtatttccgatccagaacttcatcaatgccatggcgatcggtttcggcgtgggaatcaacgctctgatcgccacagcgagaggtgccggaaaggagaatgaagcgcgccgggcagcgactcagggcgttgtcctgtctgtgatccacgggatcctcctcgctgtgatctgtatcgttatcatgccaggattccttggaatgttcacaggcgatcaggaggtcatccggtacggtgtgcgttacgcatccgttgcattcctgttttcaccaatcatcatggcaggattagccttcgagaagatctttcaggcagtggggcggatgaaggtctccatgatcgccctgctcggcggttgcatcacaaatattatcctggatccgattttaatctttggactggcattctttccgaaaatgggaatctccggagcggcgatcgccacaggtgtggggcagcttatttcgctcatggtttaccttgccttctattttaaaggaccggttccggtaaagctggaagcaaggtataaggttccaggtggaaatacgatgaagaagctctacgggatcgggatcccggcaatccttaatctggcgctgccctccgtcatgatctttgtgttaaacggtctgctggcgcagtattccagaagctatgtggtcattctgggaatctactataaactgcagactttcctctatttcccagccagcggcattatccaggggatgcgcccggtgatcggctataatttcggtgccggagagcgggagagggttgcaaagatctacaagacaacgcttgccatgacaggtgtgatcatgacggcgggtacactgctctgtcttacaatcgccaacacgctgatcggagcctttacggacaatgcggagactatcatagcgggcggcaccgctctccggatcatcagcgccggatttatcgtctcaacggtttccgtaacggcatccggagcccttgagggaatcggcatgggtgtccagtccctggtgatctcactgctccgctacatcgtggtcatcctgccgtccgcttttattctttgccgtctcttcggcggcggagcagtctggaatgccttctggatcacggagtttgcggcagcagttgtggctgagatcgtgtatcggggaacgataaagaggaccatgccaaaaccacgataaaatataggtttttcggaaaaatttaatcgaaattttgaagaaaaacagttgacacacccgaccatgtataatataatgtataactgtgacatcggttgaaaatgctgtagccaaagccccggaaacagtattttacgataaaggaacattgattgatttagtacaaacaggaggtcaacccatgaagagctttatggctagtccagcaacaattgagagaaaatggtacgtagttgacgctacaggatatacattaggtcgtctgacatcagaagtagcaaagatcttaagaggaaagaacaaaccgatctacactccgcacatcgactgcggcgattatgtgatcgtaacaaacgcttccaagatcaaagttacaggtaagaagttagaccagaagatctactacagccactccgactatgtaggcggaatgaaagagacaactttaagagaaatgctcgagaagaagccggagaaggttatcgagttagcagttaagggaatgctcccgaagggacctttaggaagaagcatgatcacaaaacttcacgtttacgctggcccggatcacgagcaggcagcacagaagccggaagttttagaaatcaaattttaattagaggtctgaaaggaggaaattcataatggctagcacaaaatattacggaacaggcagaagaaaaaaatctatcgcaagagtatatcttgtaccgggaacaggtaagatcacaatcaacaagagagatatcgatgagtatcttggtcttgagacattaaagctcatcgttcgtcagccgttagcagcaacagagacagctgataagttcgacgttatcgttaacgttcgcggcggcggagtttccggacaggcaggcgctatccgtcatggtatctccagagctctgcttcacgcagacatcgagtaccgtccggtattaaagaaagctggtttcttaacaagagatccgcgtatgaaagaaagaaagaaatacggtctcaaagcagctcgtcgcgctccgcagttcagcaagcgataatctacagcttaataatgctaaaaaagcccggaaatacgccattttccgggctttttctatgcctgaaatcacctgattccgatagtgaaatttgaggaaatttgacttcaaattagcccattttgatgggtttaccatgggtttacggtctatttttgagcctaatgggtgggaaaatgggtttacagaaggccattttggaggggaaattcgccccatatccttgacagattttcgggaaaaatccggctgaaacggaatgaaaaatggtgtcggattcgtttggcgagttctgacgaaatctgcaaaaaaataatatcaggtatcctgttacatagagccttggctcattctttgaaaacgagaatgggtcgaggctttatttttttcgcccgaaatccggcgagacaaatttgagtaggaggtaacaggtatgacggatttcaatcagaagacccatgacaccgatgtgggcagtcatggcggacagtcgaggcagatgatggaggtgtttgagaaccaggagtttggttcgatccggttgttacaggaggcaggcaagaccttcttttgtgcaagcgacgtggcgaaagcgttgggatatgtgaatccctacgccgcagtgaaacgccattgtagaggccccctaacgaaacgcgagggggtcgttcagaaggtgaatcagtatggagatgctggagagcaggtcgttgaaatctcctttatcacggaaggtgatgtttaccggct

SEQ ID NO: 2056 - DNA, 2793 bp, Unknown
  gut microbiota DNA sequence
gggagaattcttgctgattcttgttaaagattgtaagaataattgtaacatagacgatccaacggtacaataaacgacagtttaaaatctattaattttttttaaaacaagtaccgtacacagacgctccgtccggctcgccgttcctgcccaaggttccattttttgtgatgcctgttatcacatttttgaaattagcttttcctctgatccgcctataataaaagaggatctacatacgcacaggatcttctgcctgcatgatcattccggcatattccattaccactcctcttacatttcgaacgtgtctggaacgatgcaggcagaacctccataccttttcttttcagcggacggtaccgatcggggatccatactccggtctctcatctcttccatttcgtgattcctgtttctgatccagcatctccagaaactccgacatacacttcgggatatagcggtttcttttgtaataaaaatagatcgtctggcttgcaaattccggggacagcttgtagtacagctcacagtttccctgcaggatcctctttgttattccgcttatattttctttatcgtgtctgctgttcgtactattttaataatttctatttttcaaaaatctgcctgaattccttcacctgtgtccgcccgatcggcagggcctcggcatcgtagtacttcatttttacgcagtacccgttattgtagctcacctgcatctccttcacgtagtcaaggttgatcagatagctcttgtggatccggaaaaaccggctttttttcaggtgcgtctcataattgttcagtgattcattctggagaaagaacgatccatccttcatgtggatcttgcaggagcgtttttcggtctcgataaagacgatgtcctccacatcgaggatctggaagctcgccccgacattcaccatgatctttccgatctcatatcccggttctgcctctttctccttcagattctcatggacacgcgccagcgcccgtttcacgcgctcgtagtcgaacggtttcaagagatagtcgatcgcgccaatctcaaacgctttcaccgcatactcctggaacgcggtcgcaaagatgatcagcgtgtcgggctgcttcctcttaatcatggaggcaagcgtcgtcccgttcatcccgccgaggttgatatctacaaaacatacatcgaatctctcgctgtccagcatctcaaggaacgtttcgctgtcatctgcctccgcgatctccgcgttgggttcacactggctgatcaaatactttaattcacttcttgccgggcgctcatcatctacaactgctattttcatacctcatacctcccatgttatgtcaaactcatctttcaccatgttgtctcattctgtctgcatataaaaaacgccattccccctgatgtcgttttttacaattttttcattcacctgaaaacatttcatcatcgccatgtctgtcatagcaatgatcagaatatttctgcactgatgattcccgttttccgcatctcatacactttttattgtgccgcgcctgcattgacactgcacggaatattcatccgcacatccgtcccctcctcactggagacgatctgcagcccatgtccgtttccgtagatcgcgatcagacgctgctggacattcatcatgccgatcccggtgtgctccaccttctcgcctccgtacaggctctggatgatccggtaatcgattcccggtccattgtcgatcacatcgatccgggttgatttttcctcctgcttgacgttcacgatgacctttccaacgcctttttctctctgcattgcgccatggtggactgcattctccacgatcggctgaaggatcaggttcggcacacagcattttaatgcctccggatccgcattgatctcgatggaaaggcgtttctcaaaccgcgcctcctcgagcatcgtgtacgctttcacatgctccagctcggtatccagcgtcaccatgtagtcaatgtcatccagcatgttccggaaataggagctgagtgccaggagaagttctctcgccttctccggtttctcccggcagaaataagaaattgtatttaaggaattgaacaggaagtgcggattgatctgggactgcagcgtccgaagctccgctttcctcagctcttccttctgtttttccatcttcgcgatcttcatctgcatcgcaaagtggttcgcgagtcccgtgacaaattcaatatccgcacggtaagaataggcatttttcttcaccagcatcacaagcgccaggacctttccctcatcgaggaggatcggcgcggagatgatcacattctccttataaagaggataaaatccatcctctggtaaaggcacgcagctgatcctcgtcgtcttgaaggtctttgtcgcggacagaagtctcggataattgttctctgtgagaacgatactggaaaatgccccgctccttgccagaaatttcatatcatcgatcagtgccgcgccctgacagtggtactcttccataataatgtcgatgatctttcccgccgtcttccggtcattctccacggaacccagatatggggtacaccgctccgcgatcctcatcgactgggaaaccttcgatgcaacctttaagtcctccgtgttgaagatcgatttaaaaacattaaagaagatcaccatgccgacggaattgatgatcaccatcggaacgatcacgatctttacgatctccacagcaccgtggaacgggcgtgtaatcattaggatca

SEQ ID NO: 2057 - DNA, 9972 bp, Unknown
  gut microbiota DNA sequence
gaagccgatcgggaaggacggtgttttttccgccctcgaccggtgcggacttcaggcggcagaacagtccagatccgtggaggttgcaactgcctgcggaaggacacagcttctggtccatgaagtctcttacaccgaatatgtaaggcggcaggtccttgtgcattttaaagatggtcaggaactggcagtctccatgagtcagaaggacttctccgcactcctgctccagtacccatggttttctgactgcatcaaggggatcctcgtaaactttgaagatgtggaaaagctcctggaagatcgttttcttctaaagagctgagtccagatcccgatcagccgtttaaaatataaggaagtccgggaacagtttctcgaattttcctattccatagtccgggggaggtcactatgacagaacttctttttaatgaattttgcagctattcttttcctgattggctgcgccgatgttacttttcgcgggtaggaattttctgaactgaaaatgccgtatgatacagtggtagtaacagattttgccgatttcgaatgcgaagcatcggcaaaatccgttgctgtttagttagcattgcgtatcttaaatacaaaatgctgcatagagaggaaccgtctttttattgtcctcaaatgcaaagtttttcgcagagagcttgatagcataggcaggcttgtaggtgtccatataaacctttaagctctttgctctggtattgtctgctgacttgacttcaatcggaatgagctgaccgtcacgctgaataataaagtctatctcagctccacgctcagactcccaatagtaggtgttatagccgtttatggaaagctgtacattaacatagttttcagtcataccgcccttgaagtcatttagctcctcaaccatatagagaatatcgtttgccactaagtctttcttggcacaaagcaatcccaaatccgatacataaatcttgaaagcatcaatatcacgatagttttccaaaggttttttgatttgcgctaccttataaacctgtgacacgataccagacagacagagccattcaatcgcatttttaaattcagaagcccgcccgccttttttaatcagcttatattgaaaacgcgtattcttctttgagagctgaacggtaatgttgtcataggcaagtctggttttcttgatttcgttcaagttattatacttgctcatatcgttgagatagcttgcaagaatagtaagaaaactgctttatatcatctgatatttgttttgacatcagcaatttctccgtatactccctttatagcaatttttctcctttcaagctttcctgcacaagatgtaaatttctcatttttccgcaaagtcacaataaaaaaaagggctgccgcccagcaaaaatatttgctgatgcgacagccccgatcacctaattccagaaatctaccttctccgtgagtccaatatgctctgccttaaacaccggatcttttccggcctttttctgttttccgtaatcatccagacagcggagaaccggttttaacaggatgaagatcaccggcacgttgatgagtgccataaagcccatcaggacatctgcggtatcccacacgatgccgagcttcatcgtagcaccgacgcagacaacgatcgctgcgatgatccgcattccccacttcgctccgttcgacggagtcataccgcaaagatatgcaaggcctgtctctgcatagtagaagtttccgagtaaagtcgtaaatgcgaacaggaacagggagacggtgataaagattacaccgaatttaccgagtgtgctgttcatggctgcctgcacataagccattccggccatgtctgcctgtggctcaacgccggagcagagaagcagcattgcagttgcggtacagatcatgcaggtatcaaggaatacggaaagaacctgaacgagaccctgctttaccggatgggaaacgcccgcggaacctgctgcacatgcggcagcaccgacaccggcctcattggagaagagacctctcttgattccaagcataaccgcagatcctgtgaatcctccgaaaatcgccttcacatcaaaagcgctgcggaagatctctgcaaacacacccggaagaaggttgatatgtgtcacgatcacaaacagtgcaacggcaatatagaagaatcccatgaacggaacaatcttttccgtgattcctgcgatctgttttccaccgccgctgatgcagacgaagaataacactgcaagcacaccgccaatgatccactttgcaagattttcatgctccacatatccaggaataacacggaacgcatccgcgatattaaacgatgcaaccaggttaaatccgaccatgtaggtcaggatcatgaacactgcaaacaggattccgagccagtgttttccgattgcctgatcgatgtagtaggacggaccgccgtagcagcctccgtcatcagaacggcgcttgtagatctgagccaaagttccctccacgaaagcggtggacatacccagaagcgctgtgagccacatccagaataaagatccgacacctccgagacagatcgctgtggatacgcctgcgatatttccggttcccacacgggatgccgtcgaaaccataagtgcctggaacgatgagatcgccttgtcgtcctcgctcggtgcgagaacaaccttgagagactcctttaaataacggaactggacaaattttgtgcggacggtaaagtagattccgcctgctacgagcagaatgatcaggatgtatgtgtaaagatagttactgagattcccgatcagttttccatacaaatcgtacatgtgttgttacccctcttttttctttttgtgtaacggttcaatgccatcatatctacaggaacctcccccagagcttcccttcggatgcatgaatcgtcatcattttgtttacctcagatattttactgtaagtttcttatattgacaatgttttctttcagaaacttccaccactgtattgtacggaattttcagttcagaaaattcctaccccataaaaagtaacgtcttattttctcatccggattctttctcccccttccttcacctttcttttttataaagaaggaagcttttgtctgccccgttttcccctatcagagctttcgctgcttccagccttttcttgtcattcaggcagaatgtacctgtcccaatttacttctttgcaaaaatatgaagtcccatcttcgaagaaaggaactgcaggatctttctccccgcaatgctgtttcccttctcatccagagccggtccatagatcccgatccccatcttcccgtcgacaaccgagagcagaccaccgccgacgccgctctttgacgggatccccacgcggaccgcaaattcaccggaaccgtcgtacataccgcaggtcatcatgatcgtcttcacgactcgcacggtgtcagaatccaaaagccgctttccggacggatctacaccgtcattggctaacagaagtccaagactcgcaagactctctgctgtgacgcttaaggagcacatttttacgtagaaatccagcgcttcctccacatttcccctgatcactcccttgctctcgagaagataagcgatcgcgcggtttctcgcgacattcgacatctccgaatgataaactttctcatccagaacgatcccctcatcctggcagaaacatctcgcgagctttagcatctcctcaaacgaaatcttcggctcgatataacttgcaacagcgatcgcaccggaattgatcatcggattgtacggatgactgttggatccctccagcttgatcagagagttgaacgcgtcccccgacggctccatccccacattctcaaacaccatgtcaaatccgcatacctcaagtgctactgcaaggctgataaccttcgagatactctggatgctgaaccggtccttcgtatccccgcaagagaaccggctcccatcccggcagaaaatgctgattccaagcttattcttgtccgctcttccaagctccgggatgtaggttgcaacctcccccttctcgatatatgggcgccctgcctccagcgcctcgttgatcagatcctcaaacatcacttttgtttacccctttcttttccatcatatgcccctgctgtcgcgtttcacgctccttcgcgcccaagccaccggcacatttaactttcccttattttaagcgtcctgacctctctcaagccgctctctcacttccttcaggaattcctccccgatcccggagatcggcacatccgcgagcgtcacatacccgaattccagctttacctcacagcccgggatcggcaccgagactgcccggaaatcagaaagctgcttatcaaaatcatggattccgatactgtaaaaatccgtctgcgagatcagattcatgagcgtcgcacgccctgtcacatagatctcctttttctttcccgtcattcccccgtcctcgccctttccgagaatccctgacaggatatcatcgtacagaccaagataccggataaaaccataatccgccagattttcccgcgtcataggctttttctcccgcacgagcggatgatccttcgaaatgacgatctgcggttccacataagaaagataatgatatgtcagccctttcgcctcgaccatcgcccggacctcatcatgcctctggctgtcaaaatgaaaaatcccgatatccgcacgacccgagatcacgtcctcgatgacctcctccatctgcccctcatacagccggtgcgtaaactccggctgatcctgatatctcctgacgatcgtgatgaaactctccatcacatgcgaaaactttgtcatggaaacattcagcggctccgccttttccgccacttttaacggcctcagatgcatcccttccatttccttcaggatcctgaccgcccgctccagaaactcatttccttccggtgttaaagtcacaccctgacggctcctgttcaaaagcggtgccccaaccgtctcctccagatcatggaggatctttccaagatgcgactgggaaatataaagcatctgggccgccttattgatcgatccgagtttcgccaccttgataaaatattccagatgtttcagattgatatcataactcacatcatttcccctaccttcgttctatcgacccatgtcagaaactttccacaaatcttctctctcagttcatcgttttcttgtatataatctatcattttttgctatagttttccactgttttgttattcgtcttcaagctaatggttatttcccccagaaaaaacacattgcaaacaacaaactcccacatatcttccccttgttatcgcgacagtcgccaaggtctcgcgcaagcgcggactttggctcgttgttcgcgtaaacaaaaaaagcgctgcccctaccagacagcaccctatactttatcttttatatcttacatagccaacacacagccgccggtcagcctccgagcacagttgcatattccacgggactggcttcctcttagcttgcggaagaatgcgttggagaactggcggcacttgtctgagcgcagcgagttgtgccgccagctctccgcccttagcattctttcgcaagcctagaggaacctcccgtggaatcccagcagctgtgcccggaggctgaccggcggcgtctctcccgcagcaaactgacctgcagcgtctctcatcagctcccgatcataatactgatgatctcatcattcgtctccttcattccctcttttgcgagacgtcccacgttgcggatcgtcgcctcgatcccggccgtcacgattccgtcgccgtcatcaaagttctgaccacgctttgccatatagtagccgatgatccctgcgtccactgcctcagcgatctttgccgcgcaggacgctttcgcgccatcacagaccatacctgagataatggctaccgcattgatcaccgtgtggaccacctcatcgtaggacgctccggaaagatacgcgatccccgctccggaacccgcgcccgcactgactgcgccgcagtaagcggatagtcttccaatgggcgtcttctggtggatcgtcgtgagatctgagagtgccatcgcccggtacatggtatcctcatcgactcccagctccgttgcgtatacgatgaccggaacagaagccgtgattccctgatttccactgccggagttgatgataaccggaagctcacatccgttcattcgtgcgtcagatccggctgccgccatggctctcgcccgcgtgcgaacatcatttccgttcatatcgagaagaagtgcgccgatgttggatccatactgaccacgcatgccttccctggcgatcgccatattgtaagttctctggcgctccagaacctctctgatatcattcacatccactgtgtggataaagtcccagatatgctccatatcgagcagtgagcggtccgtaagaccttcctcctcctcaccattcaccggggtatccctgataacttctccgttcttttcaatatgtaccacattcgtgtgataatttgcgatgcggaccatgctggtatctgttccgcgtgtcagtgtcacaataatatcaaaggtgatgccgttatcaatatgttccacttccaccggggtcgtctgaaggaattccttcatcgccgtgatctgctcttttgtaacagacgctatgacctcaagttcctttttcggatcacctgcaacgattcctgccgccgccgccgccggaattccctttaaatgatccgtattcgggacgatcacggattttacgttcttgatcatgctgccgctggctcctaccttcaccttctccgggagtccgccgagcacttccctcgcgactgccgcgcagtaagcgatggcgatcggctccgtacatcccatcgccggcttcagctcctcttccaggatcttcacatatgcctgatatctgatatcgtttttctccatcgtctgccccgtcctttcctccggcttttcctgccggacacgcattttatctcttgcgctttccttatcgttagcgtatcataggaatcaccgaaagtaaaattgaacgttttaaataaatcgtttacaaatttttataaatcaacattcaaaaactgcactgtcaagccatcccatccctgtccgcaggagaatttccgacagcgccatctattttcccaaggaggaacaaactatggaacttcgcgagatccgaaccttcttacagattgcccagaaacaaagcttttccaaggccgccgaggcactcggctattcccaggccgccgtcaccgtccagatcaaacagctcgaggaagaactcggcatccacctcttcgaccggctgggaaaaaagaccgtcctgacacaccacggagagatcttctatcactatgcggtcacgatcctcgggaccgtcgccgatgcaaaaaacgcagtcgccgctacttcggagctcaccggctccctcacgatcggaacgatcgaatcgatctgcgaatccatcttcccggaacttttaaaggaattccataaacaatacccgaatgtgtccgtgagcattgtcctcgattccccggacgtccttcttgaccgcatgaacaagaactcgatcgatatcgtctatctcctcgaccagccgatcgatgataaacgcttcgtcaaggtgctggaggcaccggaaccgatctcctttgtcgcctcctccgtccatcctttcgccgggaacgggccttcggagctctccgcgatcatcggtcagccattccttctgaccgaaaaaaatgccagctaccggttcgtactcgaccggtacctggcatctctcgggaaggagatcaaacctttccttgaaatcggcaacaccgaatttatcatcaatatgttgaagcagaacgccgggatctcatttctcccggagtttgccgtaaggcatgaagtggaatccggcatcctctcgatcctgccggtaaaggattttcatatggaattataccgccaggtcctctaccacaaggacaaatggcacaccggagagatggatgccttcatcgagcttgcgaaggagacgttccagacttcatccgtttcagacgcgttccctcaaacatgatgaggaaggtcaacataacaagcattgcagcgctcaccccgatggtcagcctgtaatcccctgttatgtcatagaatgttccaaaccacatgttgaacggggcgccgagaagcgttcccaccatggtggagtaggcgtacgccgtgctgtatgtctcgcccttccagaagatcctgcagaataatggcatcatgaccgaggaaagcggcaatgtcacaccgaagaacagggaacccgccatcacagtcttcggggagcccaggaacagcagcacatgaccaaagaacgccagcgcaatggaaaattcgaaggtctttatgatcccaaggctgtcgctgacctttccgaggatcagcttgctggacatgtttccgagaagggatatactcgtcatcatggccgccgcctgcagcgtcaggccggctgcgatcccacagggcgtcaggaaggaattcaggtacgcgcacgacacactggtccagtatgcacctacggcaatataaaattccggctgacgcagcaattcttttatcggagtcccgttttccgcggatgcaggcgctgatgtgcctgatacagccctttgctccacatcctctgccccgtacggcagaagtcccatctcttccggcttgtagcggagaatgaacagggagatcgggaggacaagagcgatactgacgattccgaccgccacatagctcatcctccatccgaatgccgggatcgccatcccaaggcagctgctgccgatcataccgacgaggccggagaatgccgcggaaattcctaccgccgttccggtctttttcttaaaccagtttccaagaatgatcggcgccgggatcatgcagacgaaggacgaggcaattccctgaatgatgcccgtcacatgccactgccacagttcccggaaggtacccataaggaccgcacagactccgtaaacgacagccgcaatgctgatcacgatccgcacatcatgtttccgaaagctcttcgccacaaacggcagcgccaaagcagaactgatgcagtagagcatccggtacagcgtaagttttcccagctcaaaccccagttctttgcagatcggggaataaaagacaccggcacaattgttgatgagtcccagagtcgccccctgcaggatgcagcagcccgcaaggatgaaccaggcatagtgcagtctgtttttcttttgttccattgttatttctgcctttcctcagcttttttcttttccgcatatcgccggtatccggctgtccgccccaaaaacttccggccacatatccgcccggttccatctccgtcactcactcttatggcagacatccgtcctctgcgggcatgctgaataaatctgcggaatacactttattccttaaagttatattgtagcattttttcttccattttcccatatttttttcatctttttgccataaagaacttgcaggataaatcttaagtatttataatagaaaacacggtaactgttcattacatcgaaacagtaccgcagtaaaaagacattaccgcccgaccccggcggcaaaaaatacaatgccgtcagacggcagaatggaggaatttccaatggcaaagaaagatatcgactggtccaatatcggattcggttacatcaaaactgattacagatatgtatccaattttaaagatggttcctgggatgaaggcgctctcatcacagacgatacgattacattaagcgagtgtgcctgcgtattacagtatgctcag

SEQ ID NO: 2058 - DNA, 38158 bp, Unknown
  gut microbiota DNA sequence
ctgatataaagataattccgggcaatacccgacagatagatttcaggaagtgagagcaataaaaatgaagacaagaattacagaaatgctgggaatcgaatatccgattattcagggcggtatggcctgggtcgctgagcatcatcttgctgccgctgtttccgaggcaggaggtcttggcctcatcggcggcgcaaatgcaccgggagaggttgtccgtgaagagatccgtaaggcgaaagcactgacaaagaagccgttcggcgtcaatgtgatgctaatgagcccgtatgcggatgatgtggcgaaggtggttgttgaagagggcgtgaaggtcgttacgacaggagccggaaatcctgcaaagtacatgaagatgtggaaggaagcaggaatcatcgtgatcccggtcgttgcttctgtggctcttgcgaagcttatggagcgcggcggcgctgatgctgtcgttgcagagggaaccgaatccggcggacatatcggtgaggcgaccaccatgactctcgttccgcaggtcgttgatgcggtatccatcccggtcatcgcggcaggcggcatcggtgatggaagaggaattgcggcggctttcatgctgggcgctgaggcagtccagatgggaacaagatttgttgtcgcaaaggaatctatcgttcatgaaaattataagcagagaatcatcaaggcaaaggacatcgattccgcggtaacaggaagaacccacggacatccggtccgctgcctgagaaaccagatgacaagagagtataaccgacttgaggcagaaggaaaatcctttgaggagcttgagtatctgacacttggaactctcaggaaagccgttcaggaaggcgataccacaaacggaaccgtcatggcaggtcagatcgcaggtcttgtaacgaaagagcagacatgtaaggaaatgatcgatgagatgatggagcaggcagataagctgcttggcggatgtcagaagtaaggagaatcatgggaaagacagcatttatttttccgggacagggcgcgcaggtatgcggcatgggccaggatttttatgaaaattcggagactgcaaaggcagtatttgaccgtgcgacggagcttttaggtttttccgttccggagttatgttttgagaaaaatgatcgtctggacatcacggagtatacgcaggcggcaatggtgaccacgagcgttgccatgatgaaggtgatggaggagcgcggcatccatgcggatgtggcggctggtttaagccttggcgagtactgtgcactggtggcagctggcgttatgacggcggatgacgcgatccgcacagtccgggagagaggaattctcatgcaggaggcagttccggctggagtcggcggaatgagcgctgttctcggcatgacggcagatgagatcaatgccgttgtggacgagattccgaatgtgcaggtcgcaaactacaactgcccgggtcagatcgtgatctccggtctcaaggaggcagtggagattgcggcggtgaagttaaaagaggcgggcgcaagacgtgtgattccgcttaatgtcagtggaccgttccactcctatcttttagaggaagccggagagaagcttggaaaattcctggaaaatattccggtagctgagccggtgatcccgtatgtggcgaacgtgacagccgcttatgtgacaaaggcagaggacgtaaagccgcttttgacacgtcaggtatcttcttctgtcagatggcagcagagcgtggagactatgctggcggacggtgttgaccgttttattgagatcggaccgggaaagacgttagctggatttatcagaaagatcaacagggaagcgacagtcatcaatattgagaaatttgaggatctggagaagctgaactaagtgatcgaaagagaaattagtaaataatgtcgtcagagacaaacccctgacggctgacagatagaaacacggagggaaacatgaatttaacaggaaaaatcgctcttgtgacaggcgcaagccgcggaatcggccgtcagatcgctctgacactggctggatacggcgcgaccgtcatcgtcaactataacggctccgcagcaaaagcagagaaagtcgtaaacgagatcacagcaaacggcggaatggcggagagcatgcagtgcagcgtcagtgatttcgaaaaatccaaagaaatgatcgatgggatcgtaaagaaatacggccgtctcgatattcttgtgaacaacgccggaatcacaaaagacaacctgatcatgaagatgtccgaggacgattttgacgcagttattgccacaaacttaaagggcgcattcaactgcatcaaacatgtctcccgccagatgttaaagcagagaggcggacggatcatcaacatctcctccgtttccggagtgatgggaaatgcaggccaggcaaactactgcgcatctaaggccggcatcatcggactcacaaaatccgttgcaagagagcttggaagccgcggaatcacatcgaacgcagtcgcaccgggatttatccgtacagagatgacggatgtgctgccggaggacgtaaagaaagccatgggcgagcagattccgttaaagcatttcggtgagacaaaagatattgcggaggcagtcgcatttctcgcttccgatgaggcagcttatattaccggccaggttcttcatgtggacggcggcatggcgatgtaaaagacagttggaaaaagcgcctgttccggccacacagccggacagcggatgtttcggttatcatctgcgcggggcgtggatgatagcataattagaacaggagaacgaaaagcatgagaagagttgtagtaacaggaatgggcgcgatcaccccgatcggaaacgatgttgagacattttggaacggattaaaagagaagaaactcggatttggaccgatcacctattttgacacgaccgattataaagcaaagctcgcggcagaggtcaaggacttcgagccaaaggactatatggatccgaaggcggcaagaagaatggagcgcttcgcacagtttgcggtagcggcagcccgccaggcgctggaggattcttccctcgacatgacaaaggaagatccgttccgtgtcggtgtctgcgtgagctccggtatcggaagcttacagatcatcgagaaggaatataagaagcttctggaaaaaggaccgaaccgcgtaaacccgcttctggtgccgctcatgatcagcaatatggcagcaggaaacgtgtccatccagtttggcttaaagggaaagaacatcaacgtcgtgacagcgtgcgcgtccggtacgaactccatcggtgaggcgatgcgcgcgatccagcacggcgaggcggaggtcatggtcgcaggcggaactgagagctgcatcacaccgttaggcgttgcgggattctccggacttaccgctctttccacctccgaggatccggagcgcgcctccattccgttcgatcttgagagaaacggtttcgtcatgggcgagggcgcaggtgttgttgtcttagaggaattagagcatgcaaaagcccgtggagcaaagatctatgcagagttagccggatacggcgcgacaggcgatgcttatcacattacttctccggcggaggacggaagcggtgccgcaaaggcaatggaatacgcaattgctgacgcgggaatgaagccggaggacatcgattacattaatgcccacggaacagcgacccaccacaacgatttattcgagacaaaggccatcaagcttgcgcttggcgaccatgcatataaagtaaagatcaactccacaaaatccatgatcggccacctcttaggcgctgccggcggcgttgagttcatcgactgtgtaaaatccatccaggacagcttcgttcatgccacagcgggcttaaaagtagacgatccggaatgcgatcttgattatacaaagggcgacggcgtttccatggaagtaaagacagttttgacgaactctctgggattcggcggacacaatgcgtgcctgcttgtcagaaagtttgaggagtaaggagaacggcgatggaagtaaaagagatcattgagttaatgaaagcaatgtcggacaacggcatgaccggcttcgagctggaagaaggcgactggaagctgacgatgaagagagaaaaaaagatcgttgcggcggctcagactccggtcatcgtgcagggcgcaggccagggaacactgctccagacggctgatgtgacagctgtagagtctgtctccggagacaaggaagagaagaaagtttccgggatctctgagaaagtgatcacctgcccgctcgtcggaaccttctactcttccccggctccggatgctgaggattatgtaaaagtcggagataccgtgaaaaaaggtcaggtcatcgggatcgtggaagccatgaagctgatgaacgagatcgagagtgagtacgacgggatcgtggaggaaatcctcgtgaagaatgaggagaccgtcgagtatggtcagccgttattccggatccggtaggcgctggcattcggcatggctgaacggtaataaatgtttcaggcagatggtctgatccagccggaagaaaacaccggttcagatcatttgcgacaggaggaaaaatgttaggaatcaaggaaattcaggagatcattccgcacagacatccgtttcttctcgtggactgcgtcgaggagctggaaccgggcgtgagagcggtcggatataaatctgtaacatataacgagccgtattttgccggccatttcccgcaggagccggtcatgccgggcgtcctgatcgttgaggcgctggcgcagaccggagcggtcgcgatcctctccgttgaggcaaacaaaggaaagactgcatatttcggcgcgatgaacaatgtcaaattcaagaaaaaggtcgttccgggcgacaaactccgcctggaatgcgagatcatcaagcagaaaggaccggtcggcgttggaaaggcggtcgctaccgttgacggaaaagttgcggtatctgcagaactcacattcatgatcggttaggctggtggagaagatgtttcagaaaattttaatcgcaaaccgcggcgagatcgccgttcggatcatccgggcatgcagagagatggggatcaagacggtcgctgtctactctgaggcagaccgggatgctctccacacacttctcgcggacgaggcgatctgtatcggaccggctccgtccacagagagctatctcgatatggagcgtatcctgactgcatgcgtggtcatgaaggcggatgccatccacccgggattcggatttttatctgagaacgcccgcttcgcagaactctgcgaaaagtgcaatatccgctttatcggcccatctgccgagatcatcaacaagatgggaaataaatctgaggcgagaaagaccatgatggcggccggcgttccggtcgttccgggaagcaaagagccggtctacaccgtggaagaaggtcttaagaccgcaaaagaagtcggtttcccggtcatgatcaaggcgtccagcggcggcggcggaaaaggaatgcgcgtctcaagatcagaggaagatttcgagtccaatttcttaaacgcccagatggagtcagtcaaaggattttccgacaataccatgtacatcgagcggtttgtggagaatccgcgccatatcgaattccagatcctgggtgaccgatacggaaatgtcgtccatctcggcgagcgcgactgctcgatccagagaagacaccagaaagtccttgaagagtccccgtccgcggcgatctccgatgaactccgccaaaagatgggggagacggcggtccgggcggcgaaagcagtcggatatgagaatgcgggaaccatcgagttccttttggataaacagaaaaatttctatttcatggaaatgaacacgaggatccaggtggaacacccggtaacggagtctgtcaccgatatggatctcatcaaggagcagatcaggatcgcctccggtgagccgctctctgtgcgtcaggaagatatcaggatctccgggcatgcgatcgagtgcaggatcaacgcggagaatccggagaagaactttatgccgtgcccgggcatgatcacagacattcatcttccgggcggacgcggagtccgtgtcgatacggctgtttacaataattaccggatcccgccgaactatgactccatgatcttaaagctgatcgtccgcgacaaggaccgcgcgtctgcgatcgcgaagatgcgcagcgcactcggagagcttgtcatcgaggggatcaacacaaatctggatttccagtatgacatcatcagtgatccggattttcaggcgggcgaggtggatacaaactttatcccgtcccattttccggagtattgtaaagaataaaattgttactcttcacgggtaggaattttctgaactgaaaattccgtatgataccgttgggggcgcggattttgccgattcggaatgcggagcatcggcaaaatcctgttatagtgcgcgggcatggagtgcccgtgtactgtaacataaaattgtgtttccatagactggaaaggagcttttttgtatgttaagggatatgtttaagaaaacatatacaaagatcgatatgagataccgcgcggaagaaaaggaatctgcgaaagcggagcaggaagacgcaccggtaattcctgccggtctgtggaaaaaatgtaataagtgcggaaaaccgatctatacggatgatgtccgcgcgaacttttatatctgtccgaaatgcggcggatatttccgtgtccatgcgtaccgcaggatcgagatgatcgctgacgagggaagctttgaggagtgggacaaggagatggaagtctccaacccgttaaatttcccgggatacgagaagaaacttgcggcggcaagagaaaaatcgagactcaacgaggcgatcgtaaccggaaaatgccggatccacggggaagagacggttgtcggcgtctgcgatgcgagatttttaatgagcagcatgggccacaatgtaggagaaaagatcacacgggcggtcgagcgcgccacagcggaaaaacttccggtgatcctcttcgcctgctccggcggcgcgagaatgcaggaaggcatggtctccctgatgcagatggcaaagacgtccgctgcgttaaagagacatcatgaggccggacagctctatgtgagtgttctgactgatccgacgacgggcggcgtgacggcaagtttcgcgatgctcggagatatcatccttgcggagccgggggcactcatcggatttgccggaccgcgtgtcatcgagcagacgatcgggcagaagctcccggaaggtttccagagagccgagttcctcgtagagcacggttttgtcgataagatcgtaaagcgtgaggaattaaaggaaacgctggcgatgatcttaaagcttcataaaaagccggagagcggatgtctggcggcctgggagagagaacattccggggaaggtgcttctgaggagaaccggtcccgtggaaagaaagtccgccatgcatcggaaaaagccgccggaatgatccgcagcgcgtgggattccgtcctgctttccagaaagtcggatcgcccggtagcgaccgactatatccatgcgatctttgatgactttatggagtttcacggagaccgctactgcaaggacgacggtgccattgtcggcgggatcgcggccttccacggaatgcctgtgacagtgattggccaggaaaaaggaaagaatacaaaagaaaacattaagcgcaatttcggcatgccgtccccggacggataccggaaagcgctccgtctcatgaaacaggcggagaccttcggacgtccggtggtatgctttgtggatacaccaggggcgttctgcggtctggaagccgaggagcgcggacagggcgaggcgatcgcgagaaacctctttgagatgtccgatctcaccgttccggtcctctcgatcgtgatcggggaaggcggaagcggcggagcactcgccatggcggttgccaatgaggtctggatgatggaaaatgcagtctattccgtcctttccccggaaggtttcgcttcgatcctctggaaagacagcaaacgcgccgatgaggcggcacgagtcatgaagatgactgcaaaagaattaaaagaacttggaatcattgaacgggtgatcccggagccggaaccggcagacccggaaacacttccggagatcgcaaagactatggaagatgccatggaggaattctttgagacatggacaccgctcggcgggaagacattagcagaacgccgttacgagagattccggaagttctaggaggcagaatggagaaaacaaacatcctgaaaccattaaaaataggaaaccttgtggcgaagcgcccggtgatccagggaggaatgggagtcggcatcagtctttcttccctcgccggagccgttgcaaaagcgggcggcatcgggatcatttccacagcgcagatcggatttaaggatcatgacttcggaaaaaatccgatggcagcgaacttaagagcgatccattcagagctaaaaaaagccagagagaaagcgccgcagggcgttctcggctttaatatcatggtcgcgacaaaagagtacgcatcctatgtaaaagaggccgtaaaggccggagcggacgtgatcatctcaggagccggtctcccgatcgacatgccgaaatttgtcgcggaggcggagagcgaagcggacggcgaagaaaaaaaagagcgccgcacgatgatcgcgccgatcgtttcttctgtgaaatcggcacttgtcatctgccggatgtgggacagaaagtaccatacggcgccggatttcgtcgtggtggaaggtccctgcgcgggcggtcaccttggattttccagggaacagcttacggagcttggagccgatacggatcatgtggcggagacatatgatgagccggcatacgacaaggaggtccgcgggatcatcgagacggtgaaaagctttgccgagaagtataaaaagcatatcccggtcatcacggcgggcggaattttcgaccataaggacgttctgcatcagtttgaacttggagcagaaggagtccaggcggcgacgagatttgtgaccaccgaggaatgtgacgcggatatcgcttacaaagaggcatacattaacgcgaaagaggaagacatcgtgatcgtgaagagtccggtcggaatgccggggcgtgcgatcaaaaacaagttcttagagcgtgtcgcgaaaggcccggtcaaggtcgagcactgtttcaggtgcctggagcactgtgatccggcgacaacgccgtactgcatcacgaaggcgcttatcaatgccgcggaaggaaagatcgatgacgcgctgctgttctgcgggagcaacgcgtaccgctgcgagaagatcgagacggtgccggaagtcatggcggcgctgtgcggagaatagctcataatccacaaagtattgtaaagttgcggagattcatagatcctgcatttctgtcatagaatgaagaaactcaggtgataacccgatggacccggtcttttaccggattttcggggatttcacctcttcagacagaaatgcgggatctttttatgttaaatgcgctgtgggctgggatgatggccgccgggatcttctgggcggcatttcatggaaatatgggggaagtgacgaacgggctgctggattcggcgaaagaggcggtgactctgggagtcaccatgctcgggatcatgtcattctggtgcgggatcttaaagatcggggagcgagccggtctcattgaggcgctcacgaaaaaaatgcgcccggtgatcagattcctcttcccaaatctccccgacggacatccggcagggcagtatatcgcgacaaatatgatcgcaaatatgctgggactcggctgggcggcaaccccggcgggattgaaggcgatggaggagctgggaaagctggaggatgagagaagaggcgggctttgccggagagaggatcgggaagaagattgcggaatatccggggagcggagaaggtcatacggggagactccggataagccgaagtcaaaagaaaaactgtacagatggaagcgcccggccgggaccgccagcaacgagatgtgtacatttctgatcataaatatctcgtccctgcagctgatccccatcaacatgatcgcctaccgcagccagtacggcagcgtcgatccggcagcgatcgcgggaccggcgctgctcgcgacgatcgcgagtacggcggcgggggtagtgttctgcaaagtcatggacaggaaaaacattgatttttgaaaaaaagtttactataatattactattatgcggctgaagcccatactcggaaaagagtccgcccaaggcggtttgcaaacagaacacgataatcgtgtctgtacgtcatcagagcgagatgacatacagatcataaaaagaatcgataaaacaataccaggaaggttgacgcatacagaatgtatgcttctttctggtatttttttgcactcgtgcctggagtaaaagtgtgtcattgcacatggtttcaggacagaaaaggggataaattcatgaaaaaacgaacaataaaaacaatactggcaactctgacggcagccgccatggtatgttccatggccggctgttccggaaaggacgcggggacagcggaaagctccgcatccggctcctccgctgctgcggagaacacaggcgcggcagcagaaaacgggaaagactccgtcatcgttgtcatgggaccatcctccgagccggaggcaggatttgatccggcttacggctggggagctggagaacatgtccatgagccgctgatccagagcacgctgaccgtcacaaaggcggatatgacgatcggttatgatctggcgaccgatatgaatgtcagtgatgacgggatgacatggaccgtgacgatccgcgatgacgtaaagtttaccgatggggagagactcacggcggaggacgtggcgttcacttacaatacactgcgggacaacagctcggtcaatgactttacgatgttaaaagaggcgaaagcgctggatgataccacggtcgagtttgatatgaaccgtccgtattcgatctggccgtacacgatggcgatcacggggattgtcccggaacacgcttatggtccggactatggaacgaacccgatcggttccggccgctatatcatgaaacagtgggacaaagggcagcaggtgatctttgaggcaaacccggattattatggggatgcgccgaaaatgaagaccgtgacggtcttatttatggatgaggacgcagcgtatgcggcggctctttccggacaggtggatctcgcttacacatcggcggcatactctgaccagacggtcgatggattttccctttttgactgcaagacggtcgataaccgcggtttcaatcttccggtaatcccggcgggggagaccgatgagaacggcgtggcgctcggaaacgattttacaagtgatgtgagtgtgcgccgggcgatcaaccttgcgatcaaccgggaagagatgatcgaccacgtattaaacgggtacgggacagtggcatacagcgtctgcgaccagatgccgtggtacaacccggcggcggagacggattatgatccggatatggcgaaggcgatactgaaagaggatggctgggaagccggagaagacgggatcctcacaaaagacggagtccgcgccgagttcaccctgatgtatccgaccggtgattctgtccgccaggcacttgcggaggacacggcaaaccagttaaaagcattcgggatcaacgtgacgaccgagggagtcggctgggataccgcctacgaccgcgcacagtccactccgctcatgtggggatggggcgcgcacacgccgatggagctctacaacatttaccatacggctccgggaaagaaatatgcggaatattccccgtatgcaaatgtgaaagtggacgagtacatggatgccgctctggcggagagcgaccttgaaaagtcctatgaactctggaaagatgcccagtgggacgggacgacagggatcacccaggatggggatcttccgtggatctggcttgtgaatattgatcatttatactgggtgaaggacggactgcaggttgcggagcagaaacttcatccgcacggacatggctggtcgatcgtaaacaacgttgaccagtggacatggaaataaagagaacgggtctgtggatcggcagacaggcagcgcggatgtgtctgatggtactccttgtgagtattctggcgtttgggctcctggcggcctcgcctatagatccgctccagacaaacgtcggtcagaccgcgctcggctccatgagtccggaacagatcgcaagactcagaagctactggggaacggatcttccgccggtggagcggtatcttaactggctgaaagacttccttcatggaaacatgggaacctcgcttctgtaccggagaccggtggcggaagtcatcggtgagaaggtcttaagctccgtatggcttttatttacggcatggctgttatccggcattctcggctttttccttggcgttctcgcaggaaaaaagcgcggcggagtcatggaccggatcgtgacgggatattcgctgtttgtggcgagtacgccgtcgttctgggtggccatggtgttgctcatggtatttgcggtgaagcttcactggttcccgatcggattcagcgttccgatcggaatggatgcaggggcaatctccattgcggacaggatccggcatgcggttcttccggctgcggctttaagcatcacgggaatcgcatccatcgcccttcatacgagggaaaaactcatcgaggtcatggaaagtgattacgttttgtttgcgagagcaaggggagaggcggactgggcgatcttaagacgtcatggactccggaacattcttctcccggccatgacacttcagttctcgtcggtgagtgagatcatcggcggctctgtccttgtggaacaggtattttcctacccgggactgggacaggcggcagtgacggcgggactcggaagtgatgttccgttacttttagggatcacagtcgtgacggcggtcatcgtcgccgcgggaaatcttgcggcaaacattttgtacggtgtgatcgatccgaggatccgggagggggcgaagcagagatgatgaaaaatcgcagaagaaaaagcttcgcactgctgatcctggcagctggacttctggtgctcattgcggttctcgggagcttctggaaggaagctgcgatccagaccgattttacgcgaaaaaatcttgcgccttgtatccagtatccattcggaacagactggatgggccgggacatgtttgttcggacgatcgcaggactttctttaagcatccggatcggactcctgacggcggcggtcagcgcagctgcggcatttcttatgggactctgcgcggctgtgtgcggaaaagcggcggacagcattgtgcagatgctcatcgatatcgtgatgggaattccacatatgctgcttctgatcctgatctccttcgcctgcgggcggggattctggggtgttgtctgggggatcgcgttcacgcactgggcatcgctcgcgagactcatccgcggggaggtcctgcagctaaaacagagccagtacgtgaagatcgcggagaagctcggaaaaggaaagttttatatcgcattctgccatatggcgccgaacctgatcccgcagtttattacgggacttgtcctcctgtttccgcatgcgatccttcatgaagccagcatcacatttttgggctttgggctttcctcggaaagtccggcgatcggggtgatcctgtcggagagcatgaagtaccttgcgatgggaaaatggtggctggcgctgtttccgggacttttcctcgtgggaacggtcctgctgttccattatatcggtcaggcgctgtgcaggcttctggatccgggcagtgttcatgaataggaggcggagaagatgaaggatacgattttggaagtgaaggatctctccgtcacctttacacagtatgaccgcggtttttcgagacggacgctccatgcggtggagaagatggacctctcggtacgtgcgggcgagatcgtggcggtcgtgggatcaagcggatctggcaagagtctgttagcccatgcgatcatgggaatcctgccctacaacagcgcgatggacggggagatccggtttcttggaacaccgctgacggcggaacgggtaaaaaagctccgtggacatgagatcgtttttgtgccccagagtgtgtcatatcttgatccgctcatgaagatcggggatcagatccggaacgggaaaaaggatcattctgtcaaggaaaaatgtctggcggtgttaaagcgctatggcctggctccggatatccgggaaaaatatccgtttcagctatccggcggcatgacgcggcgcgttctgatctccacagcggtgatggaaataccgaaacttgtcattgcggacgagccgacgccgggacttcacatggaggcggcaacgcgtgtcatggggcatttccgggagatggcggatgacggggcaggagttcttctcatcacccacgatctggagctggcgcttttgacagcagaccgggtcgtcgtgctctatggaggcagagtcatcgaggagacggacgcggctgcgtttcagaatgaggagaacctgaaacatccgtacacaaaggcgctgttccgatccatgccgaagaactggaaaaaggacggagaaaacctctgcgacacaggagagatcctggagatcatgcgaaaggaatacggaagatgaagctggaagcgatcgacatttcttttaaatacgggaaagggagcagacagatcctggaccatgtaaatctttcggtggaaccaggcgaaaaggtggggatcatggcaccgagcggatatggaaagacaacgctttgtaagatccttgccgggtatgagagaccggatcaggggaaagtcctggtcgatggaatgccgatcctgaagatccgcggttactgcccggtgcagatggtctggcagcatccggagctctcagtgaatccgaaaaggcgcctgagtacggttcttgcggaaggggactggacgtttgaggatccgggcgaacgggcgcggatcgaggaaggcctcgggatccgggatgaatggaaagaacggtttccggtggaggtttccggcggggagcttcagagattctgtatcgcgagagcattggggcgaaagacgaaacttctgatcgcggatgagatgacgacaatgctggatctgattacgcagggacagatctgggatttcgttttgaaggaactgaaacggcgggagatgggaatgatcgcggtcagccactcgccggagcttcttgagaaggtgtgtgaccgtgtggtgcggtatccgcaggctgatcttcgcgggtgatatttatagcccatatgtgggcaatgaattgacaagttttatgagattccgtaaaatggggacataaaatatggttttttgatgcggtgcagtggaaaactgcgccgttttgctttttgacagaaaatttcaaagaatatttttacaaacgatggaggaaaagatgagattttgtaaggatctgtgccttgcggtggtcctgatccggatcgcatggaccgatatccgcacgatgatgataccggaccgggtgctggttccgctgatgatcctggcgggactttcggtatttacggagccggaaattccatttactgcccggctcatcgggatcttctgcacagcacttcccatgtaccttgcaaatctttttgtggacggggcatttggtggcggtgatatcaggctgctggcagccgcaggattctgtctcggatggaaaacatgcctgatcgggacgatcacgggactttttcttggaggacttcagtcagtggtcctgctggcacttggaaaggtgagattcggagagcgggcgaggatcccgtttgctccggcgctctgtctgggactatttgccgcaagactttttgaggatcagatcgtctccctgttcttctggggaacatggtaggggatccagagtaataaaaggtgggatatgtcatgaaaaagcaaaagaaacttgggacggcaggattagctgatttttttcgacagttttcggtcctggtaagctcgggacttccggttgccggggcacttgagatcatggaaacggatgaaacagatcagagattttcccgggcatgccggcttttcaagcagcggatgaccgatggaatggcgatcggggatgccatggaggagacaggggcatttccggagctggcagtccagatgatccggtcggcggagatcggaggtcatctcgggaaaacgactatgaagctctcggagcattatgaaaaagaacatcgcgcggaaggaaagatccgcagtgctatgctgtacccgaagatccttatctttatgatgatcttcctggtcctgtttgtctttctagcgatccttccgacgctggaaccactccttaaaggtgtgaagcttccgtttcttacgagaactctgatggagatcagccattttctgtatcgataccgatattttcttccggcagcagcactgatccttttcacggtctggaaatttctgatcacgagacctgtggtcaggcttttgtacgacaggatgctgtgtgcactgccggtcctgggaagacaggtgagaacgatctgcacggcgagattctgtgaaaatatgtcgagtctctattccagcggactgccgatcccatcctgtttaatgtatacaatcgggaccatcggaaaccgctatctggatgggaaactccggttgatcatggaagacgtgaaaaacggaatgctgctcagcgaggcaatccgggcgagcggcagtttcgataagaaactggcggcggtgatcgtcaccggtgaggaagcgggatgcctggaagatatgttaaaaaggctggcggaaaattatgaacatgaggcggatctggcactcacgaaactgatgaatctcctggaaccggcgatgatcctggtcatcggctcactcaccggtcttctgatccttgggatcatggaaccgatgtggaacatgtatgggagtattggcagttgagaggaggaaaccgattgaaaaagaacggacatgaaggctttgttatggcagaagttctgatcacagtcatgatcgtcatggtctttgggactttactgttttcttcagcatcgagaagatatgcgcgggcagagcggaatatcgcgaaaacggaggcgagactggctgcggaatcggtcgtgcaggtactggcagggaagatcctgaaagaagagtcatcggaggtgatcgaaaaacttgtctccagacatggtcttccggtgaccgagggcgtgatctgggcggatacggagaatggagagtcagaaaagatcaggactgtcgtgacatctttctggcgagaggatggctctgaactggtgctgcatgcggagtgtacggtgcgggagcagacagaaagtgcatcgatcgttctcgggcgggaacgcctatccgtgtatacaccatccacagcggatcggaaggaggagaacgcgccatgaaaaagagaaagaaaatactttcagatcacagcggaatgacgctcgtggagatattgacagcgttctttattctgatgctggcgtcaaaggctgtcgtttcctgtatttcagggtattcccgcgtgatcgaaaagagccgggaactttccgcggcaggcacagaagtggaacgcctgacaggagatgcggaatatgcagcagccgcagagatccatctggagatcggcggggaggagtttgtggaatccggatcctatgtggaagagacggtgaaagacagtgatcgtccggtaaccggtttttgggcggatcaggcggtcatggaggagatttttgcagatggagaataaaagaggcggttttaccttggtggaagtcatgacggtgatcctgctgtttggaatgctgatgctccttatttttccgatgaggcggatgatggttcgcgttctggagcggacaggggatcaggaacatgcggaaatgatcggtgatgccgttttccggcatgtggcggacgggctgcagacaggtgcgatccggggcggggatctggacgagctttcactggatgcgttttgtgaggatgatctcgtgccggaaatttcagtggaggattcgagtggatcccgcgtatttatcaggatcacggtgtctgaggaggcacgggtcctttatgagagatctggaaatatttttgtgggagccccggacagcggccttaaataagggatgccgatgacaaagaattggtttttatgaggtggcggtaccgcagtccagacagtgaaattttgagatagggggaagtgaaaatgctgcttgcattaggtggagacggaagaaatggaaacagggaagagagcgcggaaaaaacggaacgggttggaagagagacagaatcggcggtgaagatcctggaagaacttctgatcttcggataccggaaaaatgccagcgatattcacatggaaccgtgggaggaccggtttgtgatccggatgaggatcgatggaatgatgacgatggtccgggagtttgacaaatccatgtaccagccgctcgtgacgagagcgaaggtcatcagcgggatggatatcgcaaaaaagagagttccgcaggacggacatttccgggagacgatcgaagggatccggctggatatgagaacgagcgtgatcccgacgatcttcggggaaaagatggtgctgagatttctggatagaaagacggagatcgatcattgcgggacatttggcatgaatgaagaaaattataagaagatgatacagatcctgaggagtccgggcggaatcctgtatcttaccggaccgacaggatgcggaaagaccacgacattgtacctgatcctggaatatctgttgagacagccggtaaatatcgtgacgatcgaggatcccgtggagcgatatcttccggggatcagccagattcaggtgaatgaacaggcgggacttacctttgaatcgggactccgcgcggttttgagacaggatcctgatatcatcatggtcggcgagacgagagatccggagactgcgaagatcagtgtccgcgcggcgatcaccggtcatctggtgctctcgactctgcacacgaaaagtgcagtgggcgggatcacaagaatggcggatatgggcgtggagccatacctcacggcggacagtctgtgcggcatggcagcacagagactggtgagaaaggtgtgtccgcactgcgcggaggcggtggaactcacggaggaggaacaacgtctgcttggaagaacggtgaaaagtgcaaaacgcgggcgcggatgtgaacactgcctgaatacaggatacaaagggagaactgcggtccatgagatctttgtgatggaccgggaattaaagcggatgacagcggagaaccggcctgcctgggagatcgaggaatatatagtgaagacacagggaatgcggaccatgcgggaagagctggcagacctggtgtgtgacggtgtgatcccgatggaggagttcctgcggatggtggaagttcggtaaatacaatatggagaagaaaacgggatgcgcgcggcgtgtcccgttttttcttaaaaggaacttcctgtgaaatccaaaggcactccgtgccaatggtgcacactcttttttacattatcaaatgcctgtaaacactgactttgcagggatttttatgaaaacggattggcaaaaatgacgaaaatagaaaaatattttcgtgaaactgaccaaataacaggggcatggttttacggatccgatatggattccggaaaggtcctgtgatatagttatggacaaacagaggaatgaaccgtccgggacattccagtcaaatcatgacagatctttttaaagtcttaaaaatctccggaagcagatggtgtctgcttcatcgaaaagccgccggcggctttagccggaatatccaggaggaaaaatgaatcgaaggaaaatggtaaagtggcttgctgctgcaggttcttttggcgcactcgcaggctgcagcggggaacttgtcccctatgcggcggagagaccgatagagatctcggcagcggagcaggtgatcctgcaggaccgggaagcaggcagaagattctttatggaatccgtgtctgctgcagaccgggaaggaagacaggagatcacggtaacaggaagagaaagcacatttgatacgctggtgatcgcgcagatgtttccggatgtgatcaatatttcaaagacagatctgggaacgagaagtgtgaacggtgagctgtttacggactgccggatcggttttgagtggcgggggcgggcgccggataccggagaagaggaagtgtccggaacagaagatcagttcggggatgaaaaagaccgggcgtcctggaagatcggcgatgtgatcctgcggaatgtcgcaggaaaagtctgcagattccgctgcattgatgatgattatcaggatggaagcggaaattacggaaaacgcgcgctgtttctggcggagtgtgtgatccggtctgacgtggagagcacatctgaggaacgggtcctgctttcgtttggggaggataataattataagaaatcccgggtaagaaagtggctgggagaacaggaggagaatgcggttccggatgcgtcttttgtatacacgggaacggtaaccgcatttacgggaaggacggaaatcggagattttgcacagacccggatggatgggcttcggagctgccggctttcgtatcaggactgccgggaccgcttctttctgctttctcttgaggaggcgtaccggtaccgggaggagatctggaacctggaaggaaagggaagtccttacagcaggggattctggctccgcacaccggcttatgagacagacgagtatggaaattttgtatacggaaacagggaatatgttgtagatctggaaaacggatgcctcagacaggcggatgtgtcggatagcgggatcggaatctgtccggcattctgtctgccgcaggcatagaggggaaaaaatatgaaaaagagcagaaaaaacagaggaagaaagagccggatgatgttagcgggattaggagtctgcatggcgctcggaacaccggtaaagggaatggcaattttaagaagcgtggagacggcggaggggaaaatcgcgactgcgtcggatgcgtccgggaagatcgctgtattcgcggcggacgatgagatctggggtgcggatgtaggtgatatgagcttcctgagtggaagatccggagacggaagcaaagaaaaaccttaccagctcacgacaaaagagcatctgatcggacttgcggttctcgcgtccatgggaatggaaattggaagcggggagggaacgtacccgggtaattatagaggtgcctggtttgaactggggaaaaatatcgatctcagcggcatgaactggatcccgatcggtttttaccgaaccggtgcggatatgcgggcgggaaaagtgagtccgtttgaaggtcattttgacggaaatgggaagactgtctcgaattttcgcatgtaccagccgtcctgggactttggaggactgttcggaatggtggagaatgcggagatcacggatcttaaagtaaagccgggacatgtgatcacagtgaaggaaaatggaggaattcttgcgggtcgggcaaagcattcggtgatccggaatgtgacggtaaatgggacactgaggactaccggcaccgttggcggagtgaccgcggatgttctggaagattctgtggtggaaaactgtgtttccgaccatgtggcgatcgacgcgggaagcggaaaggagattttcattggcggaattgccgggcgggcctccgagtcactgatcgcggattgtgaagtgaataccggggacagcctgagcgccaggatccagggcggtggttatgttggcggaattgcgggttttcagaattctgcagatatctttaattcgcatgtgatggggaccatcggcggaagcggttctcagtctatcggcggaattaccggaaaatatgcctccggaaagatcaaagtggcgagatttgagggaacgatcgcgtcctccgggctcggaagtgcggcgcgggagggaaccttcatcggaacgcacgatactgggttccatttccgctatggtgcggaggctggcgcggacgcagcgtatctgttcgcagacacggaggaaaagatcgcggccggagtctgtggttccggagtttcggatgataaccggttttcatatgatgcccatattggattctggaacaagggcgataatttctacacattagtccagggacagaatacaaagaaagaggatgagctctatttctacgaggaactcgaaaacggagtcctccatgttgtggatacggaggatgcagtgagacagggcctctatactccggaccatttcgcgccaaattccgtgggccggccggtgcggggatatctgctttcggtccttcaggtggatacggcagcaaattcagagaatttctacgatgtcgcagttcttacagcaaaaggtccgtccgcgtacagtaaagaatttcataaagcgtaccggggtgcagtggcggccggggacacggtgacagtcctcacagcgcccaggaatacggagacggaaaaattccagatggacggtgtgccgacttatacggactctctggggcgaagaaggaagacgagctatcagactggcggttcctaccagtttgtgatgccggagcatgacacagaagtatctgctgtctataagaaggtggctgcaggcgtgcgggtggagcctcaggaatttgccttcagggtcacagaggagcgcaccggcgaccggatgaacccgtcgatcacgacggaagtgcgggacagcgcgggaaaacttttggcgagatatctgaacggaaagccggaagccgggacaaaggtccaggatgtgaagatccaggcggtagtcgataagaataatgatgtcgccgatgaggcggtgagatggagcgtggacgatgatgaactgatccttttaaagaaaaatgatgatgaggatgagtccggatatacgaaaaagagcgcttcaatcgagctgaatctgaatgccggattttttaaggacatcgtcgggaaggctgaggcagagcaggcaaagaaacagtaccggtatccgatcgaggatacggtctacggaaacgggattcagggtggacttgctgtcctgacggcaaaaacgaggccggcatccagtttcgaggagaagtctgtgacggcaaactgcaggatcccggtaaccttccagatcaaagaccggacgaagattgcggcggaaggagcatctctcgataagacagctttaaattttacggtcacgagaaaactgaccggtgaccggaaaaagccacaggagacactcacggtatcagcaccgcagatcctttcggggacttttgcaccggattactttgacaaaaaagatatcagctggacagtcggtgatcatgcgatcatccaggtggatgccggttttgtggaagaagggatcgcggacggcgattaccggaatgcgaaggtaagcgccaaaaaggatacaagatggatcctggatctcatggaagcagatgacgcggctcatgcggaacatatttatgaaaaacgcaccggatatgggacccgaagcaccgatgtgatcatggcggcgagggatgcgcttggaaatatccagtcggcagcctgcagtgtgaaagtggattttgtgacggatgaccagacggtggtgatgcctgaggagatcagggcggatcaggatgcgctgacctttgcgctgacacttacgaaaagcggatcaagatacaacccggtacttagctgggagggtgcggatgctcagaagatcacggcagaacttgttcccgcagcggcgctcaaagggaatggagacggaaattttgtacttgaatggagatctcgatccggagctgtgaaagcggaaaacggagtgatatcggcagatacaggcgcatcctggatcacggaggcgatgaagaaatacccgtatacggcggaaaccacggatgagatcacggtgaaggcaggaactattgaaaaaaagatcccggtaaaattgacgtttaaacttgtagaccggacatggtccggaagttccggaggacattcttctggcagtggaagtacgggaagtgtattgaaaaagctgcagaatataggagaacagccgaaaggaagtattgccggtgaatggagaaaagaagcagacggaagctggcggtttgtttccggcggaaaaacttatgccggtgaatgggcctggatctacaatccatacgcaaaagaaggtcaggaaaaaacttcctggtttcatttcgcaagtgacggcaggatgcagaccggctggtttttcgacgaaaaggatggcagttggtattacctccggaagacgagcgacggaaatcagggaaaaatgcagaccggatggctgaaagagggagaaaaatggtattaccttggaccgacgggacgaatgacaaagggatggaactggatcgacggaaaatgttactatatggaccagaaaaacggacatatgctggcgggctgtatgacaccggacggatatactgtggataacacaggtgcatggtgtgttcacggaattgtgcagacacttggaaagaaataatggcgggggatcaggatggaaaagaagaaaagaaggcgatggatagccggttttctggcggttatcatgacgatcacgggagtggggattccactcccgttcccgtccgaggcatcggatatatggccccagaaatcgacggcaccgttctactgccttgatggaggaaaaggatggaaaaaagtcgaccggtatgacatgtataaatttgatacgatgccgtctccccttacggagacgcaggcgaaacggttattctgggcgtatccggataactggtcagcgttaaaggacgcggcaaaaaaatttgatccgggcctttatgcggaaattgcctccacaacatcgagtgccaatatcgtaaaatatgtgaaagacgatgccggaacaaaatttgcctgggtggctgacaatccggaaatcgaagatcgcgcgatcgctgcaatggagcaggcgtcatcggtcggactggcggcggggaaagaagcaccggacgcgatccggggagcgacttcagaagatacggcagtgccattccaggtactgcctttttccgacggaccgggggcactggatacagaatttgtgctcggaaaggagtttatccgcgatattgcaaagatcgaacctcagagtgtctgggacaatggatcgaccgggggaaatgtgggctggctggatgcctcccaggataaaaatattgcaaaatctgtgatgggtacaaatctgtatgaggtgacctggagcggagacgcgatccgcatccataataacggctcggcgactgcaaatgaaaatgcggtcggcggcagtatgacggatgaagaaaaatataataagactacggttcgttataagatcacgatgcgaggtaattccggctggtacacggaaggcagctggaatccggaatatctccgggaatggatggattttaaggtctgtatcaatgcaccggaacaccagagactctacaaagcggatatgaggatcattccggcggatatggtattttatcttgtgatcagccaggatggaggagaaaaagacgaaaggcaggaatacggagcagagacgccgacactggaatttcagatctatcgccataaagagactttttcggcggattacaatgtcagactcgtaaaacatgatgatgagacgggaatgccgttaaagggaagccagttctatctgtatgaaagatttgaggatcaggataagatctcaaaggcggatggagagggaaaactttcggaaaaaaatttaagttttcgtccatggagagacttccaggtgttttctgaaggaaccacgaatgaaaagggtgaaattacttatcgcgataccagaaaatatgcctatgaaaagacatattgcgacggacatgccgctccatcctgggcaaatatgcctgaagaacagggaaaaggtgatgggaaaagcgatgcctatgaggaggctgcagaacagacgcgggacaataaccgggcggcggcaaaacagtggctggagttagcagaggcctgcgaggcagaggcggacggcggatgccacttccactggcttgcagatgagagtgtctatgacgaagtgaaggaggtattggagagcggagaagcagacggaagaagccgggaaggcgccgggatgatgcgaaagaaccgtgccgcgtctcaggatgcatttgaaggatccggctgtaaagcagattgtgaagagacttaccggaaatttatcggactgcgttttacttatacctggaaagaaatccaggcgagaagtgggtatatactccatgatctgcatcaggatgatattccggtggagatgatcatgacggattcttccgaggcaggagcgaatgcggagaaggtgtccggaagcagccgtgagatcgcggaaaacatctggtattcgggaaatggaagtatgggtgagaacagtgtttcagaaagaaaaatatcgatggtgaaaagcacgatgggaaatgttctgaggagaactgcttccgactcagaagctgcggctgtcagggcgacggagtccaatgcggaaaagaaaagtattttccggatgctttatgacttgttccggggaaaagatcaggatgaggaagaggaaaatggaggatcagacggttggggtgagtttgaaggtgttggagattttgcggatatcctggcagatgcagaggaagatgggatccggcatctgaataccggggatcccggaaaatattcgcattgtaacggagcggaaaactgtggggatgcatggcatgtctatgaccaccggacggaaggacggatccatattacaaaaaaagatctggaccttttccggggagaatctgataagtattcatcctacggggatacagaaggggacggaacacttcagggggctgtttacggtcttttcgcggcggaagacattatccatccggacgcagaagtagcgggaaacgggaccctgacaaatacagggatcgtctacaggaagaatgatcttgtggctgcggcatcgacagatcaggacggaaatgcagatttcctgtgttataccgtaaaaccggggatggaatacgattacggggaagggaagatcagcaaaagaaatgatatttcctggaacggaccggaaaatctttatcagaagaatacagaaaagaacggaaactgctggatcggacgtccgctgatccttggaaaatattatataaaggagctctcaagaagcgagggatatgaactctctgtaaatggaatggagcagcagattacaaaccggggaagcggatatgatgtgccggattctgtgacagatgccaatggaactgcggtggttacgatgccggagcttgcggctgcgatggaaggcgatgatggaagcggaaaaggatacgatgaacttgcatttacggtgagttcctcgggaactgccggggaaaacggagatggaggatatgagatcctcgcctgcggcttcccggaagggacaaagttttatcgtgtcgatacaggagaagagctggtcacaggacctcatgtgacgggaacagagaccgtgatcgtgaaagatgcggcaggaagaacgatatggaagcaggcggaaagcgattccagtgaccttctctatcagccggagcgtaacgcagcgggaaagatcaccgggcaggaaccggtgagccgaacggaaccgcagattttaaaggcggagcagatcccggagaaaataccgatgcgccttgaaaatctgtctgtcgatgaggacgatgaacgttttcaggcaaaactggaggaatgtgatctttcagacgaaacagcagacgcgtttctctttttgaaagcgcagacggaggaaatcctcggaaagaacggatatgatgtcccggttactgcaggagggatccgttctatggaaactgcaccgatttacaaccggggagtgaaaaaaggtcagacagatgtctggggtatgatgacggaaccaggagaaacagcgaaaaaaacagtatatggggcagcagtacaggaaatctctgtcacatgcaaaaagaatgacagtatcctggatctcatgcagaatattttcacctggtatcaggaacatccccagtgggattttggtgggatcgatatgatcagaagagaaggagaccactatcagatcaccctgtacgccggggcatcctcgatcgggaatcgaagatttttcacatcgaaaacggaaaatggaaggaaaacggtggactgcgtgtatgccgtatacgaggatccggtaaatcttcgctgggtctaccaggaatataaaaacagtggaaagtatcggtttcaggtggacagacagtacatgctcgggaacggcagaggcagaagatattatcttgatgcgacattgaccccggtcatgatgccgggaacggatggaaaactgacggagatcatgcatcaggtcatggtttaccataaaaaaggggaagacgtgatcgattacctgtctggagatccggcacatggataccgcgttccacttacaaagacggaagataagatcgagatcacgacagaaaaagaagtcgtggaaaaagacgtggaacttccggatgtggtgagagaggaaaaaaacggtgtatacaggattcatataaagaccgcgggaaaggatttttttggaaaagaattcaatgataaaaagacgagtcttactttaaactttactgcaaaacttccggaaaaaagccatgttctgacggaaaaagagatccggatgcttggaaatgcgaatgtccggggatatcgggcgggggaccggatcggctatgcagaataccttgtaaggtttgcaggtgcagctcttgcagcgtctgtttcgaagaaccgggatctttccgatacctatattatcgcaaagcggctgatctatcgcgggcaggataagatcagcgaggacggggatacgggactgacaccggcaattgttcttgagcggcctgtgaaacagaaaatacgcgtggaaaaaaagacggacgacggagaaaatatcgggaatttccgctttaagatctacctaaagtccaatctggaacgaattttctgtacaaaagacggagagatttcctgggaagataaaaacggaaatccggtgcagatcgaagaataccgggaacattttccagagctggtgcagaagatctatacgagaaaggaaatccgacaggtactggagacggtggagcggaggaaagattctgaccagggtgaaggaacgattcacgagtataactatgaaaagttcttcgcggctatccgaacagcggatacagatcgctggaagagaaagggaaaactgtggaatacgtcatttaaaccatttgcgtccagccttatcagcggaaagaaaaatgagatcaatacttcagaatatgcgaaagaaaacgcaaagcgctcggatgcggtccggcagttcgccatcgactggtatctgaaagaggagatggaaaatctgcagtatggggcgagcggatatccggatgagcagtatgaccatgcccttttttttgcgatccaaaaggcggaggagtatctgcagccatttttccgatatgatcttggaaagatctacgcgatcgcatgggacagcgaggaggacggtggtcctgacggagatcagacaactctgaccgttcaaaagaaaaatggggagacaaaggaagaggcagctgcggcagtttctgaatatctcccatacggagagtatgtgatcgcagaggaacagccatatgcatctgaattactggactttaagaacaggcattatgagatcgatgcgccgaaggagatcttccttccggaggcagcaggacagtccggggatgatcagagagaaaactatatttataagagagcgaattccccatgggatcttgcgagaaagtacctgatccgcttcaatgaggagtgggacaaaaatcagcagcaggagctgcgggagtatgtgattagtgcccacagcaacgacggggattttgaagtttatccatatggcctctcagaaaaagcaacgaccggccattatgaaccttatggaaacgggaaggtggggcgatattatcactatcggtcagacagcgaatacggagcgaaaacggatggaaaggagacgatgacaggggtaaaaacagctcgtgacggagaatatgcgccgatgctggttccatggagcattgtagatccgaatgagcagaaagatgacaagagctggacaggatatggagaaaaatcatttctggaccggaaatattatgctgatgtgagaattgaaaagcttgatgcggaaacaggggaaccgatccttcacgatgacgcagtattcgggatctaccgtgcagagagaaatgaggcagagaatggtgatggagctgtaacgtgttacacggctgatacgatgatcctgggaagcagatattttctggaggcgatgggagcgaaggagatccggccgtttgcgcggaaagcgcctggagccggagaactcttttacggaacggttcctgcgggaacgccggtttgtcatgaggaagatcttgtaagctttacggacagagatggactgcagacgggaacgctcttggcgatcccaacaatccgggatattgcggaaaaggggattcttcaggcagcaggttacgcgaaaacgccaaatcctcttccggcaggagtctatgtgctggcagagataaaggcgccgtctggatatgtacgttcaggacctgtggcggtggaaatctacagtgacaggatcctgtattccggtggctggacggaagagaaaacggcagcatccgtttatggatatgagcaggatccgaaggggatccatccgaagaatgtcacggatacagccagaatctacgcggaaaataccgcaacaattctggaagtttcaaaaacaaagacaatagatacaactcgtggaatgaaggtatcaggccgtgtggaaggtacggtctctgaacttcgcgcacagtatggactggagaatctcgaccttgcctatgatcatgcagggatataccagggatttggctggaagaaagggacactggagatactggaagagcggaaacatgccggagagagggtggagctcgtttatgagaacggtgtctttcagggatacggctatgtgacaaaaaggcttgaaacggcagatcatgagaatccatatgtaaccggagcgaaacttgcgctttatgacgcgatccgggtagaaacgaccggagattccgaggactacgcatttgaaggtgtggaggtcacaagggacagaaacggaaatgtgacagatattgtcgtaaaggagggatatgcaggagaaaaacaggaattctctcgtgaaccaggatcggaagatgatacccggggcgaaggaatctggaaactcaggaccgtgaagagaccggataccccggtcctgctctacgatctcgggaatcttgatgtgataacgaaaggaaaagatggaactctttacggctatgaccgggaagggcggcggcagaagatcacctttgatacgagatcgatctacgcgctgaaaaatggaaaacctgtatttgaagtatctggaggcgatttctcaaaacttgtatatgatcggaagtcgaaggcgtttacctcgatggatccggagactacgctgtttcatcttgacccattcctgtgcagggacgcggaaacagatccctatacgggactggcatatgtgaggaagatggagattggaaggtatggaagggaacgaccggtcttttacgtgtggccggtggtaaaagagacggattcatcggggaatctgatcggaagacggaaaatattgaccggaagaccggcagaaatcgcagaagaaactgagaatgcctatattactgggacatggaacccgaaaacaggccgtttcgaaaaaaagatggaaccagttctcgatgagtttggactggtaaaatattatccggaaagcggcgcagtatacaagaaaggagaatcggtctatgaccgggatggggattatgtgacataccggtatgaagatcttctggaaatggagaaccgtgcggcataccacttgaacaggagagaggatcttcttgatgtaggggatccggaggatgaggcggatgatgtacctttaaaacacagaaagggagaggtatggatcattccgaatgtatgggtcagcggtgagaaaacgatccaggacggcagcacggatgaggagacggatggacagccggatcttttaagacgtgtgatcccgggaagctacattcttgaggaactggaggcgccggatgggtatgtgcgtgcgcttccggcagccgtggaggtgaatgagacaaaagaaatccagagagtcgtcctgtcagatgagaagacgaaggtggagattgcaaagacagacgggacagaaagctatgttcagaatatcgaaaaccggacggacagccagaataaagaaaacgggacggagatccgcggatcatacggtcagaagtttgtcaaaggagcaaaacttgcgctctttaaagcgaagcgtgtgaattctgcggatcatgagaaataccccaaaggatactaccttgtgaaggcagaagagacgcctgctgtgtggagctcagaagacccgttggacaatcacaaagttccggtgacggcgctgtggattacggatggaaaaccaaagtattttgagggaattccggtgggaaactatatcctggaggagctggagactccgcccggttatcttcctgcttcgatggagatcacagtggaagagacaaaagagctgcagagctttgtcctgaaggatgaccatacaaaactggagatccttaagtttgagagaaatacgtccggcgagaaagaagcgctgtcctggccggcgtctcccgaatttgttctctgtgaagcggatcttgatgaaaacggggaggtgaagatggagaacggtacttatgggtaccggaaagaccggatcgcagacagttggaaggcagataacctgtcagagtaccttccggcggtcccggaggcgtatgaaaagatgtttggcgagtatggaaatggatttgaacagttttcatggagaaaagaaatcacgggacgagtgatttccggagaggccagacttctggagaataaagaaacagaggatcaggggatcatcctgcagctctgggagctatcggatggaagcagaatgcaggtttctgtatccgcaaatggaaatccggaaaaattaacgcagaatggtcagccgtcaccggcatttgagtatcagttccgttaccgttccggattttccggcagcttcccggaagtgaccagctacgatacaagaggcggtctgcaccggatcgaccggcttccggaaggaaaatatgtgcttctggagagtaaggttccggatggatatcagggagcagatccgatgctgatcacagtggatcagtccggaaccgttatccgttatgaagtggaaaataaacggaaaccggaggaacgggcagcatttgggcgcatcaggatcaggaagacggatgcggatgataaagatctgcggctttccggtgcctggtttgaagctgtctgtgtacagacaggggagaaaactgtgtttgcgactggtgaagatgggatcgcgttatcgccggaactttcaatcggatatctggatcatggagcctggatcatgtatgaatatacagttcgggagctcatgccgcctccgggatacggacgctgtgaagaacccttttcggctgtgtttgacagggaaaaagaggatctgatccagctgtatgaactttctgtcgaaaataaaaagacaagagccggattcagtaaactggatctcgcgaccggtgaagaacttccgggagcttccctggagttaaaaacttctgatggaaggcttgttgattcctggatatccgggaagactccgcatcttgtagaaggaaagctgacggcaggtgagaactatattctgacagaaatatccgctcctgacgggtacgagcttgcggaatccatttcctttacagtgccggagaacggaaatttcgtgaagatcgagatgacggatcgaagaaagccgccggaggaaccggaaacaccgacggagccggaacagccgacagaacccgatatcccgactcttccggaaacaccgacggaaccggaaataccggagacgccggaaacaccaacggagccggaacgtccgacgccatcggttcctggtgagaagccaaagaaaccggtggaagcggagtggacagagtctgagacagaatcggagccggaacggaaaaaaacatatgggacgatcacggtacgctatgaacgagaattttcaggcagcggaaagggacgcgtccaccaaaaagacaggacagacctcagaaccccggaaacgggagatacgggaagcccagagcttgcagtaaccggtctgtttgtcggattccttggactctggtatcttcacataaaaaaggagagagaagaaaggaacaatgaacatgaggatgaaaaatgatggaagccggaaaatccggcttccggtcagaaaaatattcggatttttagggatggaggcagttctcttatgtgtatcttttttcatgcttgcattcgcggaaaaattgccgtcagaggaaagaaagctgcaggtggaagaaactctgtccggagaagagacatcgtctgtggagaaaaaaagagaagaaaaagagactctgacgtatgaaagccccatatttacgggtgggggagaggaatttctaccggaacagacaaggagcgaaggcgaaaaagaataccgtctggtatcaacgcggatccgaaacgcaaagaaaacaggagaaatgacgtatgcccaggtgacgatcccatatgatctggaaggagatgatacagtgccggagacagcggatattcccttgatcgatgaggagtccggcacagagtttgagcgggagatttctcttgtggatgtggaagaaatatcgagagaatggtcagataccttttctttttcggtcacgatttccgggtatggagcagactcattttatctgggagatatggagatccccgggaatgcggatcttgctgactacggagaaaaacttctggatctcgccggactgtcccgggagtattaccgggtagaccgcgtggagtgggacggagaaccttatgaagatggggaggtgatatgcagaaacgcagctgcagttggaagcaaactggtccgaaacgtaaaagcgaagtacggcggtcagatccggacaccggatctggaaggaaagcagtatattggaatttatgaggaagttctcccggaaacggaagatgagacagggatcgaaccagagccggagatcatgagccagccggaaacgatcccggatacttccgaagaaactgtacaggcaagtctcgcagagcggatcattgaatggctggagagccatatcacgacgataacggtgagttttgtaagtgtacttttactggcagcgggaatctggctgtttgtgaaaagcggaaaaaagccagggcgtcagtcaccctagcttttcctgccagtctttttccttaaatccggtgagaacaaaggagtcaccgatcactaacggacgttttacgagcatgccgtcagttgccagaagggcaatctgttcttcctcgctcatagtcgggagtttatctttcagtcccatggatttatagagaagtccgctggtgttaaagaatttttttaacggaagtccgctcattttgtaccattctgtcagttctgccacactgggattattttccttgatatggcggctggtataagatacctggtgctcatcgagccagcgctttgccttttgacaggtagaacacggcggatattcgagaaaaagaatattcatagtgaaaacacctccatgtgcttagtataatggatttttccggagaatacaatgaaaaggagaagatgttgatcgggcggaaagaaatatggatattctgatctttctttcagagtttatggtaccgctcacggtattttatatcgtcggttccggaatccttacaaaacgaccggtgttcgatgattttctggatggcgcaaaggaaggaatgcacactgtggcggatgtacttccgactctgatcggactgatgacagcggtgggagttttaagagcttcggggattcttgaagcagtatcggaacttctgaagattcccgccgcactctgccatatccctgttccggtaatcccgatcattctggtgaggatcgtatccagctctgcagccgttggtctgatccttgacatctttaaagaatatgggccggattctctggtcggaaatatggtttctatcatgatggggtgtacggagacagtgttttataccatgagtgtgtattttatgtctgcacatatccgaaagacacgctggacattgcctggagctcttgctgcaacagcggctgggatcgctgcaagtatctttttgacggggcaattattccatacctgatacagccgggccggaatgcgaagcataggcataatcttgttacagcccggcggtggggcgtccgtgtactgtaatgtattttcacagaaaaagcggaaaaccggagaaaatcggttgtgtcgtgaattggaatcgtttataataaaagccgtaaaaaacaaaagatccggggcgtcaggaagatcggatattgcggttggacagcccagagaggaagaggattccacggttggacgattataaagtattgaacgagatcctggtgagactgttccgcagtatcatggacgttgaggagaaggcgatcatcacccaggagttccaggatataacaaacaatgatatgcatgtgatcgaggccatcggtatgggaacaccgaaaaacatgtcatcgatcgcaaaagaactctctgtcacggtgggcaccctgacgatcgcgatgaacagcctggtaaaaaaagggtatgtgaagagggaacgcggggaggaagaccgcagggtcgtatatatctcgctttcggataagggaaagaaagcgtttatccaccatgcgagattccataaagaaatgatcacctcgatcctggatgaatttgacgaggatgagaaaaagatcctgatccgtggactcacgaagttggacaactggtttcgagataaggaagaggagaacaaaacaggacgggaataaaatgcgcactgcacgatcgctgtttcagcgagaagtcaggtgcgtatttttaatttacgcgaacaacgagccaaagtccgcgcttgcgcgagaccttggcgactgtcgtgatagcagagagaaagcaataaaaagttgaattaaaaaagtaaagtatatataaatataacttaaaaatattaagcaaagttgataaaaccaatatttaattacaagacagatcatggat

SEQ ID NO: 2059 - DNA, 977 bp, Unknown
  gut microbiota DNA sequence
tgattgcgttctttcaaacagtttgaaggcttctacctttccgtttgccttcgttccactgatattcaaggttgacgctgccagtgtgctcatattcattcccaataccatcatcatggccagtgcgaatgccataactcttgagatccactttttcattttcatgttgcatcctcttttccgctttcgcttttcaattatgattactttttcatcctgcacgctttcctgtatccggtggccgtgcctgccgccggaaatacccgtccccctttctcatgattcgtcatcctcctcccgtttcctgccggatctgcctgtcctgtgcacgatgaccaggattgccataccaaacatgaaatttatataaggtccgtatccgcctgtatccggcagtacacggagatgactgttcgtgatcgtgacggtaaattcatcgccgtcaccatatgcgatctttgtgaggtaatcggatatttctgcctctgtaatatagtaagtgtagtaataagtgtttgttgtttctgttccgtcttccgccgtaatggtttctgacttatatgccggaagatcattccataccgtctgccatgtgctgtcggaagaatcatccggtgtccagacaagcggatcgtatccctgtacggcttccgtctgttcgactccatttccatccgtccactttctccaaagtgtcagggtaatggaattcggtctcagattctcgatattatacagatcctgccataccttattgactgtgatatgcaaaaactcatcacacggatcctgcatctgggacggaggcggagtgatgccggccgatgatgtttctgtcgggacatcatccatcagcaccgcttttgcattggatacgtaggcgtccagactgccacttgcggaattacccgcttctttcaggcttgcattttccagatcatcatacgcttccaccgtgttcatatgtaggatggtat

SEQ ID NO: 2060 - DNA, 1590 bp, Unknown
  gut microbiota DNA sequence
gaaatggtcttttataaagaaatgacaatttgagagttcgtctaattcatagtaatgtagcttttttgggatatttaaacaatctatttttctttttatttcatttgtaaaaggtttagtttttacacgttgagtaaataattcttcatattctttatattcatcttcagttaaacaatccttgataatatctaaaaccgaaacacctttaggtaatttacgatccggatcaccatacaatagtgtgatatgttggatttcttcttcactagtaatagagagatgtatattactatttattttatcttttttcataattcctccgttaacagatattcaaaaacactaaagttaacctgctatcaaaataacctaaaaagtatttacaaagttaactataatcaatataatgcatttgttaacaaaagtcaatattaaattacaaaaaaataggaggtgatattatggaactacaaaaagtacaaaggacaacattaacaatgaaagaggcatctgagtatttaggaatatcatactggttgataaatcaattagtaagaagaaaacaaataccatgttcaaaagttggtgggaaatatttatttagagtacaagctttagatgaatatttaataaaaatggaacaagaatcgatagattagcttctagagaaagtgaggaaaggaggatatggcagatttacaatggctaaaattatctacaaatttttttgataataataaaataaaattgctagaaagtgaaaaggatggagatacaataattagagtatggatacaacttttaataacagcaatgaaatgcaattatcaaggtagattatctataacagaagataagccaatgacggctgatgatatttcaaagattatgggaaagtctgagaaaaaaattataaaatatttggaaaaatttgaagaattaaaaatgattattatagaagataatttttataaaattaaaaattggtctaagtatcaaagtgctgataaacttgaagaaatcagattacaaaattgtttaagacagcaaaaatatcgtgaaaaaatgaaaagtgaaaaagaaaaaagtaacgttacagtaacgcaacgtaacactaaagaagagaaaaagattagaaataaaatagaaaaagaaggcgatgagaatagaagtggatttaaagaattcaaattataaaattatcaccaatgaaggtgcaaaatgtggattctgtaataaagatttaaagccaattggattcgattatttatatgtaaattatgacaaaagcatgattgaatatgaaagatgtaattgtgaaaaagcagttcaattttggaaagaattcgatttagaacaagaagaaaaacaaagacaagaagagtataaaaaaattataaatagtatttataaagacaactatatgaaaaaaagattacaaaaatataattttgaaaatgttagtgatacatatgaagatacatttattataaatcaattaataaaatttacagatttatgtattgaatcagagataaaaaatggactaattatttatggaaatataggttatgaaaaaacatattt

SEQ ID NO: 2061 - DNA, 1566 bp, Unknown
  gut microbiota DNA sequence
ccagagcacaggccgggaaaagatactttttctggctgttttcatccccgtttcccatattctggaacatggtaaaaaacggcttgtgtataagatccactttggaaagatcctcaccgtcccagcttccctttccggtcttgctgttataaaagttgtcggaaaccatatttccgacgataaattccagagtcgccgcattcttatccggaagctttccctccgccagcggaatctgttccaactcctcccttggcattcccacaatgttcgaatatccctgataaactccctgcttcagattcacatctgtctccaggatcggggacacactcttcacatgtgggatcttcgcaagcttcgtcaccgtggcgtccacgaggtaatcgtcctcggactggttcccgtatccggaactgatctggatccttgtgagacttccgaaggaagcataggattccacggtattttccttcaatccgattcccagagagaccatgactacgatggaggccgtgccgatgacaacacccagaacggtaagtcccgtcctgagtttccgtctgcgcaggttattgatgctcatgatgagcagatcaaagaatctcatcgtccattcccgctttcttctttttgcgtctgatgaccacaaggatcacagctgcaaggaccactcccacgattcccaccggaattgcgagatgtttcagtttatccgtcgtggacggttccggctgtatatcgtcactgctccaggtatcatcaacattgctttcatccatgctctgatcctcatttaccataagctggatctctttctcgaccgtagagacttttccgttctcatcctcatatgtaatggagagttttacctttccgtcatccatggtcggggcgatcccgttgatcatcgtatccacgtttccgctttttccgggttcgatatttccaacataagcctcattcttctggatagaatcagcctcaaagaccgcgttcacgttatagagcatgacttttccggtgttgttgatggaaaacatcacgtttgactcttcgcctacggaaatagcatccggcatgacctcgatggtgccggtatttaaccgtgcctcctgctttaatccaaccgcgatctttacggcttccttcgcgttcttgaattccgggctgtcatactgctcattgatcgtgatcgtgtaggaacgctgttccgctgtgggacttgaggaaaattttatcgtcagcgtgtcggatgctcccggtgccagagaattgacgaccacagagtttgaaccgttcaccgtcgtaaataccggactgtcgctcactgtttccgactcgaaggtaaacaggatgttgcttgctacgatactgttggaagcgtttttcatgcgcaccttcagcgtaaaatcctgtccggcatagatctccgcaggatccgtctcaaagctgtcgacgatgatacgcgcctttgttctttcgttctcgcctgcttcagaatccagagaatcatcctcgtcttttccatagacccgcacataaaaggtgtcctcaacaggagcc

SEQ ID NO: 2062 - DNA, 8732 bp, Unknown
  gut microbiota DNA sequence
tatcgagtggggacttgcctaccacccgtacccgcatccaatgacggagccggagttctgggatgatgatcagacgggagctgtcaacaataccgaagattcaccggtcgtaaacttcaaaaacctcaacgtcctgacggattacttccagaaggacatcatgcgcgatgcaggcggaaatgtccgccatatcattctctctgaggaaggcttcacatcaaagagcgcgacccggggagatgtctatgatatccaggcagccgctttcgcgtatgcatattatcttgtagataataacccgtatatcgacgcgtttatcttaaaccgtcaggtcgatgcagtgatcgaggtagagcagtcctgctcattcggcctctggacggtggatatgtcaagtccggatcgggtcatcgccgttatgccgaagaatatttacaatgtatttaagtatattgatacaaataaatcgctgaagtatacggaatttgcgaagaagatcatcgggatcaacaagtggagtgatgtgatccctggatttaagttacaggaataattcatttacggtatatctgcggccggaagaacacaggaagatatgtgtttttccggtccttttttaacatgaaatgatgaaatttcctgtaaaaaaaaggcgctgcatgcctaagatgaaggttggcgcaagcgactgcgcccggcgtgagagtgtgctgaggcacattctttttccggatcgaaaaatctgtgatcgctgatgcagaacatggaatttcaggtcatgaaaagtaacggagaatgccggttttcccggattttattgacaaaatcctgacaaaggcttataattcgctatgacaatgactaagcgtgacaactcaggaaatgacaggaaaacagttttgtgtgttaacatttttcaggaggatatcaatatggcaaagaagaatccaatcgcagcagctgcaaagaagatggcagcagcaccggttagcaatagcgttgtaacagaagtaaaggcagcagaagtaaaagcagagacaaagacagaggctccgaaagcagaagaaaagaaggcagaagagccgaagaaagagacaaagaaagctccggcaaagagagcagctgcaaaagatatcaagacatctgtagtggtacagttcgctggtaaggaagttacagagaaagagctgatcgcagctgtcaagaaggcctacacaaagaaaggcaataaagtcggcgatatcaagacgatcgagatctatgtaaagccggaagagaacgctgcttactatgttgtaaacggtgtcggcgcagacgactacaagatcgagctgtaatcagctgagtcttttcaatcgtactcatttttgtgcccggcgggcaggagaatgggaacgggagacgaacgtgctgatgcggaatggataccgtttgtaaaagaacagagatcagaacagagcgtccgtcgggattccggcggacgcttttgaaatcaggagattatggaaaaagagacgaagagagaactgccgggcgagtttgtggagaagatggagaagctgctgggcagtgatgcggagacattttttaagagttatgacgccgagcgaaagtttggcctgcgggtaaatccgcttaagctggaaaatggggaaatcctggatccggaaagcccactgggagtttaccttcagggacttccgaaggttccctgggcgaaagaaggattctattatgaggcagagatgcgcccgggacgccatccgttccatgaggccggtgcctattatatccaggaaccgagtgccatgtctgtcgcggaggcacttgcaccgagacccggagagcggatcctggatctctgcgcggctcccgggggaaaatcaacccacctcgcaggaaaaatgggcgggaaaggccttctagtctgcaatgagatccatccggcccgcgcgaagatcctgtcccagaatatcgagcggctcggagtgggaaatgcggtcgtgacaaatatggacccgtttcagcttgccccggcgttcccggaattctttgacgggatcgtggtggatgcgccgtgttccggagagggaatgttccgaaaggatgagaatgccagaaacgagtggagtccggaccatgtaaaacagtgcgccggtcttcaggacgggatcctggactgtgctgcgaagatgttaaaggacggcgggcggattgcttattccacctgtaccttttctcctgaggagaatgagcagagtgtggcgagatttctttcccgccatccggaattttcggtgatccggccggcgatcgcagaatatttctctgcaggtcatccggaatgggcagacggaaatccggaactggaaaaaacagtgcggatctggccgcatctggcagacggggaaggtcattttctggcattgctcgtgaaaggggaaaacggctgggatcctgtcccggaagagatcggaagtctgtgtgagaaaacaggtgcagaatgcgcagagacagtcgcggatgagatcatcgtttctggaaaacgcaaaaagagcggaaagaaagacagcagacgggacggacaaaagaacgggcgcggaagagaggatgctgcgctttcggaggcagtttccgcattccgtatgtttgaaaaggaaaatctgaaagattcagagagtctggagtccggaaaaagatttcttctgtttggggaaaatctgtatcttgtaccggaacagatgccggatctgaaaggattaaaagttttaagaccgggtctgcatcttggaacttcgaaaaaagacaggtttgagccgtcccacgcactggcgctcttcctgaaaagagagaatgtaaaacaggcagtggaagtggggacagaagatctcgcactgcggtatctccgcggggagacgctgcgagcggaagattttgaagataaagagattcctgcgaaaggctgggtgctcgtgacgaccggaggcatgtcgctgggatttgcgaaggcagccggcggaatgctgaaaaaccattatccgaagggactgcggatccagggcggctgagttttgcagatgcatgttcggctgacagagcagatctgagcgacccaccggagcggttcagaaaaagaccggctccggtggatttttaatatcaggaaaaagtctttgcatatcctcagggagcggcgcggaaagatttacggcctcaccggtcaccggatggaaaaaactcaaaaatgtggaatgaagcggctggcggtcgataaaacgataatccgggtgatagagaaaatctcccggaagtgagtgaccgatagctttcatatggacgcggatctggtgcgttcttccggtctctaaaaggagacggatgaacgagagatccgcgtctttgttatacgcaagtgtccggtagtgtgtcacagccgtctctccgtgctccgggtcacagatccgctcgatggtggagccgtcttttcttgcgatcgggatgtcgatggtgccggactcgtcggtcttaccggagacgatggccgcgtactccctgtggatcgtgtggtctttcacggcatcggagaggatgcaggagctgtatggattttttgccaggagcacaagcccggaggtatcccgatcgagccggttcacagcacgaaacacaaagggcgtcgtttcatttctgtagtaccaggcaatcccgttcgccagagtgttctcataatgtccctgggatggatggaccggcattccggcaggtttgtcgatcacgaggacatgttcatcctcaaagacaaccgagagatccatggggaccggaagaatctgatcggaactctttttctctgtgacgtggaccgttaaaaggtcgcctggctgaaggatcgtgttggaaaagacggtttttccgtttaaaagaaagctaccgtcggtgttccggagatggacgaccaggcgggaagaatatccggaatccaggagaaacgccgcgatggaacgtcctccggaggatccggtgatcgtataggttaaagttgtattcatgaaaaatcctttttggaatatttttgcctgttatcgtgaaagcgcggagccgtcaggcgcgatgtcctgacaaagtcggaatacagcattggaaaatcctgctttgtgtatgaaaaggctgcctgcgcacgtcgattcctattgtagcataggagaaattgtccggcaagtctcaggatccatccgcatatgctgttacaaagatccggcggaagttcttaaaaaatgtggaaaaatagagagtgtggaaagcagattctgcgggcctgtgaaggaaccggacgggcggaaaaagcgggggagagcggtaaaaaatacggactgctgcagctgtacatgggaattctattgcttctcgtggtctcggtatcgggaaacgtcccgtattccggagtaaactgggagaaaatttcgctgtatggatctcgggcggagcagggagataaaaaggaggatccggccgcagtccagtcagctgtgaagccggagcctctgaacctgaattcccgctccgcagttctgatggatgccgataccgggcgtgttctgtatggaaaaaatgagacagaagaccttccgatggccagcaccacaaagatcatgacctgtattcttgcgctggaaaatgcggggccggagacggaggtccttgtctcagaccgggctgcatcgatgccggaggtaaagcttcacataaaaaagggagagaaataccggatggaagatctcctgtattcgctgatgctggaatcccataatgattctgccgtggctatcgccgaggcagttgcgggaagtgtggagaagtttgcggatatgatgaaccggaaggctgtggagctcggctgcggagatacctgttttgtgacgccgaacggactggatgcggaggatccggagagcggaaaaatacattccacaacagcggaagacctggcgaggatcctcagatactgcatcctgttctcaccggacaagaacgagttcctcgccatcacaagggcgccgtcccatgcgttctcagatctttcggggatgagaacgttctcctgcgtgaaccataacgcgctcctgacgtctatggaaggcgcagtcagcggaaagacgggatttaccgggaaagccgggtactgctatgtgggcgcggtgaaaaaaggggaaaagttctttatcatggcactcttgggctgtggatggcctcctcataagacttacaaatggcaggatgtgagaaaactcgtgcagtacggggaaacgaattttgagtaccgggtgatcgaaaagacggggctggacggagaaccggtgatcgcggtaaaagatggtgtggagccggaggtgaaagtgagggctgagaacggagatgagacatcgatccgcatccttctagggaaagatgaggatgtccgggtcaggacaaagatcgcagggaccattcaggcaccggtgcgggaaggaacgcctgtggggcagagagattatatgatcggtgatgtgatcgtcgccagtgatccggtcctgacgacagaaaatgtggaggtgtgggatttcggatgtgcggaaaggatcgtgatgaaaaaattctggcagttataacggcatcatccggaattacagttcagaaactatctgcctgcagaatggggaaatgctggcagaaaaatccggaaaatcctatgatcgtacttggaattacaggaaaatcctgctatactgttgggaaaggctgagttttcagtggaaaatagtagcgttacgaaaaatacgcaagtacggaggcacaaaatgcagacaaaactgacgagagaggatgccatcgcgctcctcagcaagtacaacaaagagccgtttcacatccttcacggacttaccgtgggcggtgtcttaaaatggtacgcaaatgaacttggatacggggatgaagcaggtttctgggagatctgcggcattctccatgatatcgactttgaggagtatccggaggaacactgcctgatcgcaccgcgtctcttaaaagaaggcggagcggaagacgaggtgatccatgcggtctgcagccatggatacgggatccatgagtggatcgatgcgaagccggagcatgagatggagaaagttctttttgcggcagatgagctgaccggactgatctgggcggcagcgaagatgcgcccttcaaagagcgcgaaggatatggaagtatccagcttaaagaaaaaatttaaggataagaagtttgcggccggatgctccagagacgtcatcacaaaaggggcggaaaatctcggctgggaactgccgaagctgatggagatgacgatcctcgccatgagatcctgcgaggactctgttgcggaagagatgaaagagatgggactggcggaataaaagcggaaagcctgtgagatggagtacggacaggaaacgttttcctcccggtcctgtcatttcacgctcttgatctgtgcggtcattttgttcggcaggcagacgatgatctcgccgtccatatggatcttcccctggtgaacgcagatcttatcggggcaggtcgcttcggagacccagacttccccgtctttgatgatcagatggtttgtgccgccggatgcaccatcgatcgtgagttcctgatcttttgcgagatcgagtgtctcgacgacgtttccgtcgacagagatctcgacgacttctgccgggctcttatgcatcagctttgtcccgagaaacagaagagcggcagccgcaaggaccacggcgatcaggatcaggtcctgtttcttaaaaagtgtgtgtttcatgtctttattttctgtcataaaaatctcctgaaaactcaataaccaatgaggctgcagtgcctgcggatcccggatgcgctgagccggggatcattgtttaatgataaagtcttccatcccgtccgaataataaacgtgataatcctcatcgataaagcatgcatagatcccgtcgagggaatttgcaagctccagtcctttttcaagtccgagagaaaagcaggtggtggagagaccgtcaccgtccacggattcttcggaaaggatcgtcacggagatcagcccgttatcgtaaggataccccgttgccggatttaaaatatgatggtaattttttccgtcaacctcaaaatggcgttcatagacgccggaagtgacaacggagagatcatcgatgccaagcacctcaaaagtctcatcgcggtccgcaaacggtttctgaagtccgatgtggaacttgctcccatccggcttttctccgacgcagagaacgtttccgccgagattaatgattgcgctcttcacgccggcatccagaagctgatccttgatccggtcggcgatatatcccttcgcgatagatccgagatcgatcgtggtgtcaggggaaaggaacgtcagggtgtttccggagaggaccaggttgtgataatccactttcggaatgtccgcttcaatgtccgccgcatccgggatcacagcctcgccgctcgtgaagttccagagggagctcagcggttcgatcgtaatgtcgaaagcgccgccggacttttcgcagtattccagacctttcgataagagcgccgccatatcgtcggaaaccgtgacggtgtccgtagtccggtggttgatctgatagagttcactggtctctaacgtcttgctgaaaatgttttcatactctttacaaagtgccatcgaatcgtctaagatagaggagtcgtcagaatcgtagagggtgatggtgacgaaggtgttgagcagaaaatcggaacggctcaaaggagtctcaggagtgagaagacccggaccgtcactattttggcatccactcagtgccatgccggaaacgaggatgagaccggcggcacagatgctgaagattgtttttttgttcatatttgtacttcctgtaatttgatggatgatcgtaactttccgatcaatgaggagccgttacgccggatcctcataatatctgattttttattctaacaaacagacttttgaaagtcaagaaagacgagggatcgatcctatgtatcgagaaaaaaaggcgataaatatcgcattgtacggacttctcatcgcactcgccatggtgctcagctttgttgagacgctgatccccattccgatcccggtcccgggcgtaaagcttggactcgcgaaccttgtgacggtggtgggactttacctgatcgggatccctggaacgatcgcggtgaccctgatccgcatcgttcttgtgggcttatcttttggaaatccatacagtatgatctacgggctgtcaggaagctttctcagcctgtttgtgatggcaatcttaaagaaaacgggaaaactctcccagatcggtatcagcgtcctcggcggtatcgcccacaacatcggccagatcacattcgcagctgtcattgtccagacagcaggcgtattttactatctcccgttcctcctcgccgccggctgcatcgcaggaaccctgatcggagttgtcggcgggatcattacagaacgcctgatgcacgcaatgcgcggtataaaaaaataaaataccgattgtattgaggggatatttttactataatgaatggtaacaggttgcaggtgcgccaatttatttcgaaacagccacgttgcaagtttacttgcataa

SEQ ID NO: 2063 - DNA, 10800 bp, Unknown
  gut microbiota DNA sequence
tttttccaccggaaaaacaagaagagcgcacaaaaaccagccaatcaactatcatgcaagctaacatataaccgaaaaatcggagggatccatcatgattgaaatgtcagtaaaaaaactggtacagtatggaaaagaaacaggcctgatcgaaaaagaagacgagatctacgccagaaaccagatcctggaagtcctcggcatggatgaatatgaagagcctggcgagatcgtggggacgatcagcctggaagataccttaaatgagctgaccgattacgcggcagaacacgggattcttgaaaacaacagtgttgtgtaccgggatctctttgatacgcggctcatgaactgcctgatgccgcgcccgagtgaggtcgtaaaaaagttccacagtgaatatgaaaagtccccggaggatgcgaccggttatttctataaactgagccaggattccaactatatccgccgttaccgcgtctgtaaagatctgaaatggatcacaaagacagagtatggggatctcgatatcacggtaaacctctccaaaccggagaaagatccgaaagcgatcgcagctgcaaagaacatgaagcagagcggatatccgaaatgcctgctttgcatggagaacgtcggctatgcgggccgcgtcaatcatccggcgagaaacaaccacaggatcatcccgctgactttaaacggggagaactggggattccagtattctccgtatgtctattataatgagcactgcatcgtcttcaacggaaaacatacgccgatgaagatcgaccggaacacatttaagaaattatttgatttcgtcacaatgttcccgaactatttcctgggatccaatgcggatctcccgatcgtcggcggttccatcctgacccacgatcatttccagggcggaagatatacctttgcaatggcgaaggcgccggtggaaaagagttttacagtcaatggattcgaggatgtggaagccgggatcgtaaaatggccgatgtccgtgatccggatccgtggggagaagaaagagcggctgatcgatcttgcagacaagatcctgactgcatggcgcggatacacagatgcggatgcggatatttatgcggagacaaacggagaaccgcacaacacgatcaccccgatcgcgagattccgcgatgggaagtttgagctggacctggtgctcagaaataaccgcaccaccgaggaccgcccgctcggcttgttccatccgaacccgaagctgcatcacattaaaaaagagaacatcggactgatcgaagtcatgggtcttgcggtccttccgtcaagactgaaagaagagcttgccctgctcgcagattatattgtagaaggaaaagacatccgcagcgaagagtcgatcgcgaaacatgcggactgggtggaggaattccttccgaaatacgagaagatcacaaaagacaatgtgatggagatcctgcaggatgaggtcggtcatgtatttgcgaatgttctggaggatgccggtgtctataaacgcacagaggcaggccgggaggcattcggaagatttatcgcgtccctgaactgaagatcctacggacgcatatgcagaatgggagtgaatcactgcgatcacgttacattttccttaatattttcataaatgtaaggacggtgtctcgccaagcgcaggaaaatatgttatacttgataactgtttaacgagaatcagcagaaattctcctgtcgctgccggtggtgaggagagtggaagatgagaaactcaacggcagcggcggcagagaaaaatcaaaaggaacggtcttttgtatctgatgccggaacgtgaaaaggagactgacatgttaaatgaggagaagatccgtctgatgacggggatcaccatgtttgaaaagaaaatgatgaaggaatccattcctgcgaaccggtattttaagagcgattatgtgggaagccacctgatccggtcgtttatcgcgtattcactgaccgtctgcctgtgcctgatgctatgggtcctttaccgttttgatgatctgatcaatgcgatggcagtcgacgatctgctttcacttggtgcacgccttgtattttactatgtggcaggacttctcgcatatcttgccgtgacttggaagatctattcgagacgctatgatgaggcggcgggaaaactgaagatctaccaggcaaaactccggcggctggataaaaagtacaaccagcagggagtgaaggaaaacggggaggaaaagagtaagtgatcggacttttagtatttaaggaaaaactgaaacaattttatgggaaatataatatttacatcgtaccggtcgtaaaatttctggtgggatttctcaccttctggctgatcaatgcgaatgtgggatttatgacaaagctgaaaaatccactgatctcggtgctaatgggactgatcgcctcctttatcccgtacggagtgactgcgtttttagccgggatctttatcctgatccatgtttcccaggtgtctctggagatcgccctgatcatctttgtattcatgctcgcggttactgtcctttactatggtttccgcccgggggacggatatcttctgctcctgactccgctgctgtttttcctgcggatcccgtatgtggtcccgctcgtcgtaggcctttccggaagtctggtctcgatcgttccggtgtgctgcggtgtctgcatctactatatcctgatgtatttaaagcagaatgcggggacactgaccggaagctccatgacggagatggcggaccgttttatccagatcgtaaaaaatgtgtttggaaatgaactcatgtgggtcatggtggctgcgtttgccgctgcgatccttgtcgtgttcattatcaaaaatctctcggtggattattcttggtccatcgccatcgttgccggagtgatcacccagcttgctgtgatctttgtaggagatttcaacttcaatcttccggtatccgccggttccatgatctttgggatcgttgtctcggtggtgatcgccctgatctaccagttctttgtattcgcagtggattatacgagaacagagtatctgcagtatgaagatgatgattactattattatgtaaaagctgtcccgaagctcacggtgtccgcaccggacgtaaaggtacagcggatctattcaagaaaaaacgtgagacgcgagaaaactgaaacgcgtgaataattgtacggaggtaacaaaatgacagaatttcttgggaatatgtattcctggtttacatttattccgaagatcacattgtcgaatctttttgaaattctgatcctcacagtcctgatctatgaagtccttttgtgggtaaagtcgacgagagcaggagtgctgctgcggggtggtatgatcattgtcggattctatctgctggcggcgatgctccatctgaatacgatcacctggatcatcaaccatatgggccagctcgtattgacggctctcatcattatcttccagccggaactccggaaagcgctggagcagctcggaagcaaaaacatcatcacagatctttttatttccgagaattccagactccaggaggggtatacggaaaagaccgtaaacgagatcacacgcgctgccttcgagatgggaaaagtaaagacaggagcgctgatcgtgatcgagcgtgacactccgcttccggagatcgagcgaacagggatcccggtggacgggatcgtgacgagccagcttctgatcaatatttttgagcataatacgccgcttcacgatggagcgatcattatccgcggaaaccgtgtgacctctgcgacctgttacctgccgctttctgataacctcagcatcagtaaggatctcggaacgagacaccgcgcagctctggggatcagtgagagcacggacagcctgacggtggtcgtatcggaggagaccggacgggtatcgctggcagaacgcggaagtttaagaaggatcaacagtccggaagagctgaaatttgcgatcgctgcgaagccgcaggaggagatagtatccggtccgttcaaacttctgaagggatggcataaaaatgaaagaaaagcagaataaaagatggggacttttgctgatttccttcctgtgtgcttttttagtctggctgggagttgtcaatgtggcagatccggtcatgacggatacggtcgaggtgccggtggagatcgtaaacagtgatgtcctcacaaagaataatctgacttacgaggttgtcggaaagtcgacgacgacagtgcagtatgaagtaaagacgacgaatgcgtatcggatccgttcttcagatttccgtgcctatgcggatatgacggatatgtggtctgtgacaggagcgatcccgatcaagatcgaggtcttaaatcactcggagtatctggtatctaccccgataagccggaacgggaccatcaagatcgagacggaacctcttcagagaaagacattctcgatcggcgtcacgacgacgggaatgctcgaggatggttaccagaccggtaaagtgacactctcaccggaaacacttacggtggaaggtccggaatccctgatcgggcagatcagcagtgtcgggatcgagatcaatttagacggaaagaatgcagactggagcgattcggaggagccgaagttctatgatgcaaataacaacagcattacgatcagcgaccgtctgatcagcaactgcaagagcgtggattataccatggagatcctgaaggtgaagaatctgagcctggacttcgatgtcaccggtgaggtggcgagcggttaccgttattcaggtgtggaatgcgcgcttaagagtgtgccggtagttggattaaagagcgccctggcgtccttaaataccatcacgatcccgaaagaagagctggatgttaccggagcaaaggcgaatatcgtaaagacgatcgatctgaatgattacctgccggagggagtttcccttgccggaatggacagctccgagatcacggtgactctgactgtggagccgttaaaagagaaggaatacacggtgcgcatcagttctgactgttatgttggcgctaacagttcctacagctatcaggcggaaccggcaaccgttacgatccggatccgggcgcttcaggaggaacttgacagcctgcagttcacatccgatgatctgagtctgaatgtctcaggaatgggagagggaagtcatcaggttcagcctacactgaacagagaactggattcggcgtatgatttgctgggaatctccagttgtacggtaactgttgcagaggaacaggagcctgcgacggagacagcgcctgagacaactgaggaagagacaacaaaagcatcggaaactgccgctgaaagcagcagggaggcggagacagagaaggagaccactgcgtctgcgacaagacatgcggtgatcgtcccgccggagacgacagaagcccgtcaggcgacaggtcttcagaccatatttcgaaattaggagttaaaaatacttatggtaaagcaaaaagttacgattggaaacccaaccggtcttcatctgagaccggcagggcttctgtgcaaggcggcattgcggtttcagagttcgatcaaatttgaatatggaaacacgacagcaaatgcaaaaagtgtactgagcgtgctgggggcatgcgtaaagtgcggagatgagatcgaattgatctgtgagggagcggacgagcaggaagccctggaggcgatcacggaactgatcaatggcggtctcggagagtaggctgatatgctggtttatgtgatttgttacggcgctgccatgctttttgcattcagcgcccattttaccttatcggggatgtcgctgctcctggcagcggtctatctttatctgagagaatacggaaagagtggaaacccgctccatttgcgcgggctgttttccttgttctatgtaggcggagaggggatttcctgtctgaaactttccagactccagacagagtggagcctcgaaacctgggcatgtttttttgtcgcatttgcggcattctggaatgtgtacgaacttgcggaaaagcggttcagcagaaagaaaacggaatccgcaaaggatggtaatgttcagaaagaatgtctgcagagcggatttacgcaggcagctgccgcaaaatacggggatcatatttttatagcgattgccggacttacagcattgtcgtttgcggcgtttctgtttgaagcagtccgcctgggatatgttccgttcctgcttcgcggggtgccccatgcatattcctatttccatatctcaggagttcattatctgacggtttcctgtgtgctggtcccgtcgatggaggttcttctctggttctacaagagagagatgaaaaaaacggaaaagatcctttcgcttattctgacaggagtcgctcttctgatcccggtgctctgcgtatcgagatttcagctgatctttgcggtgatccttgcggtgctgacctttatgatcgtcagcggacacagaaaactccggtatcttttctttgctgcggcaggacttgttccgctctatgtgatcctgacgatcgcgagaagtcacgatgtgacgtatctcaacgggattttcgagatgaagaatgcagctacgccgatctttatcacgcagccgtacatgtacattgcaaacaattacgacaattttgactgtcttgtaaagcagcttcccgcccattcgatgggattaaagggaatgttcccgctctgggctctctccgggcttaaatttttaaagccggtgctcgtggactggccgatctacgtgacgaaggaggagctgacgacggttactttgttctacgatgcctattatgattttggtatcgccggtgtatttttcttttcatcggtactcggagtcctgtctgcgtggctttcttcgaggatctatccgggaagaaatccggcctggtatctgttttattcccaggcggctctctatcttatgctctcgttctttacaacctggtattccaatccgacgacctggttttactttgcggtgaccggtgcctttggaattatcttagagataaaaaataaacggaggaaacagttatgatatcagaaaaaatgaaaccatttatggcaaacaattccgcgatccgtgcaatgttcgaggaaggaaagcgcatggcggccatttacggaaaagagaatgtctatgacttcagccttggaaatccgaatgtgccggtcccgcaggtgactgaggcgatccttgatgttgtgaaaaatgaggatttcatgacactccatggatatatgagcaatgccgggtttgaggatgtccgccagacgatcgcggattctttaaataagcgttttggaacgaatttctcattcaaaaacctgatcatgacggtcggcgcggccagcggtttaaatatcatcttaaagagtattttgaatccgggcgatgaagtgatcgtatttgcaccgtattttgtggaatataatgcgtatgtgagaaactatgacggaaatgtagtgatcatttctccggatacggagacatttatgccgaagcttgatgagtttgaggcgaagatcactgccagaacgaaggctgtcatcatcaacaatccgaacaacccgacaggtgttgtctatgatgaggcgacgatcaaagcactggctgcgatcatggagaagaaagagaaggagtttggcacatcgatcgtgctgatctctgatgagccgtaccgcgagctggcttacggcggagttgaggttccgtttgtgacgaagtattatcacaatgcggttgtgggatactcttacagtaagtctctttctgttccgggcgagcgtattggatatgtggtgattccggatgaggtggatgattctgcggcgctgatcggggcggcgacgatcgcaaacagggtgatcgggtgtgtgaatgcgccgtccctgatccagaaggcactccagtactgcatccagcatgatgtggcggtggatcttgcaacttatgagaagaacagaaatctgatctacggggcattgacggagtacgggtttacttgtgcgaagccggatggagcgttctatctgtttgtgaagtcaccggttgaggacgagaaggagttctgcgaggtggcaaagaagcatcatgtgctggtggttccgggcagttcgtttgcttgtccggggtacgtgagactggcttactgtgtgtcttatgagcagatcgagaggtctctgccggcatttaagaagattgcagaggagtacgggctttgtaagtagttttggcggggaaaaacggtgaaaagagtacagatcattagctgaaatttatctcagtcgagaagactcccacctctttaggtgtgagtaacagcaaatttgtctcagtgggagttaggtctctgactgagataaacgctccgcgaggatgcgcagtgattctgtatggaatatgtcagctttgctgaccagaatcacgcgccaagtctcacggacgttcgacttgaattgaaagcatgttaaaccgtatgatatcatgtggagtactaaaaaagggggatcgactgagtaaaatactgtggatggaatacagcaggatttttacagaattaggaggtccatggaatgaatttcagaaagtatgcagggattattttaaatattctggttcctttgctcacagtttatctggtctgtgtctggggactgaggctggtggtgttttttcttccgtttgtgattggatggatcgtggcagcgatcgcaaatccgctggtgcgcttttttgaaaaacggctgaagatcgtccgcaggcacggctcgatggttctgatcgcaggtgtgctggctctggtgatctttggcatctatgcgctgttttcctgggtgttccgggaaatgacggagtttgggcaggcactgcccggaatttatgcatcgatccgggaggaagtcgatctggcctgcgagcggatcgggggacttttgaagtatcttcctgcagatacggagacgacgatcgtttccgagttggagaatgtgggtggatatatcggcgattttgttcagaagatcgcagcttccgcaggcagccgcgtagtgcggacgctgccggaggtctttgtgaatacgatcatcgtattcctttcttcttatctgtttctggcagatcatgataagcttgtggagacggtggggaaggttatgccggaacctgtgatcaagtatggacggatgatgaagagcgatatccggacattgatcggggggtattttctggcgcagtttaagatcatgttcgtggtcgcagtggtgttagtgatcggaatgttattcctcagagtaccatatggaatttttcttggaatcgcgatcgcgatcctggatttcctgccgatgttcggtacaggaacggcattgattccctgggcagtggtgagactctttaccggggagtacggttatgcgctcagccttatcgttctctatgttttaacacagggcatccgtcaggtgatccagccgaagatcgtcggtgacagcatgggacttccgccacttgcaacactattcttcctctatctcggtttcaagttccgcggcattgcgggaatgatcatcgctgtaccggtcggcatcctgtttatccggttttacgggtatggggcctttgatggcttgatcaggaatgtgaagcttcttgcggaggagatcaggaagctgatggaagaatagaaagtaagaaaaagagacaggcattcgaaagcttatctgagtttccggatgcctgtttttgtataagaaatcaaaatttattcagcagatggaccatcggtcgggacaataacgatattgatgtccgggatattacaggacgccgtgatgctggcattggatatccggtaactgatattgtctatccggaggactgcctgagagagaaggtcagagatatcttctcttgcgtggcggttgtagcggaacaaaagagtttctgtggtgtaatggaagttatcaaattccattattttgtcgggatcgtcccggatctctttgagaatgatcccatcgattttcagggatgtcataaaagggacaacatcctgaaatgcgtcgagagtgactttgatatcgaaaactcctgcggagatcttttcggttgagacggcgcggatcgtgaaccatggatctccgttatagttcgcggtatttccggtagtgcaggagatctctgcggagtatggctgcgagagaagatagagatcagggggagttatgtaaataactttgggaattgtatcgatctgatatgcgtattcttctgttccgcggtccagatcagagcggcttgacatctggcggagccgttttgaaaaatttttatcgatcgcacattccatctcgggaagaggggtaatggtattgaagttgtaatttgtataggtgatggcgacagtaagcctgtctgtatctggctccggctgtcttaaatagcgccagagccagaaggcaaagagaaaagcgcataaaaatgggacgatagctacaaagagctgggagcattcttgctttttcattaggacacctccttaaaagacggaatctaataaaaaacgccggaaagacagatataaacaaatgaaatccagtattgtatttatattatagcaagatgagcgccgtgaagtcaaacgatatgttttctttgt

SEQ ID NO: 2064 - DNA, 7706 bp, Unknown
  gut microbiota DNA sequence
aaacaccttttgtaaagggaatcgcggacggcagtctggatcatgaaaaattcaaatattatatgatacaggattatctgtatcttcttgactatacaaaggtattttccatcggaacggcgaaggcgaaaaacctcgacgctatgcgcctgttcgcgggttatacccattcgatcctggacggtgagatggatatccaccgcgcgtacatgacgagactcggaatcgcgaaggaggaggcggagcagacaccggtcgctcttgataatctgtcctatacctcttatatgcttcgtgtcgcttacgaggaaggagaggcggaggtcatggcggcgatcctttcctgcgcgttgagctatgagtttatcgcgaagaagatccttgcggagtatccggccgcagataaacatgagttctacggggaatgggtcagcggatatgcgtccgattcctaccacgaggacaatgaggtgctggcagacctgatgaactgcctgacggaggactattccgaaatgcggaaacagcatctcgtggacatctttacagcatgctcccgctacgaggcggcattctgggatatggcatgggaaatgaggcagtaggatgctgaaatttgacaatgtaagctttcaatatgatgtggaagatttctccatcattgaccacctttccttcgatgtacaggacggggaattcgtgtccgtcatcggcgcttccggctgtggtaagagtacgatcttccggcttgtgaacaagcttcttctgccggcttccggcgagatcctggtggacggagagtccattgagaagaagagaaactactgtggatacatgccgcagcaggatcttttatttccatggcggaccgtgagggagaatctcctgctgccgatggagatccggagcggatattcgaaaatggagatgagagagaaagcggacgcggcgctcgaatctgttggtcttaaggactggggtgacaagatgccgaaggagctttccggcggcatgcgccagagagcggcgtttgcgagaacggtgctcacgggttccgatcttctgctcctcgatgagccattttcagccctcgattatctgacgaggatctccatgcgggaatggcttttagagcagtgggagagggagaaaaagacagtcctttttatcacgcacgatgtggaggaagcggtctttttgtccagccggatcctggttgtagaggaatcaccgatcacccatctacggtccattgatgttccggcagaatatccgagatccagggacgagcttcggaaaccggagatactgtccctgaaggaggagctgatcggtatgctgaggaaggagacgtcatgagtaagaagatgaagaaggatcatgcgcgggttccttccggggcttcgcgcggacagacccataattttctgagtacaaaccttccggcggcgattctggtggcagctctactgatcttctggcaggcggcggctatgggaatcgacgcggcgtatatcctgccgtcaccgacccaggtggtggtacggctctgggagcttagaggtccgttatttaaggcacaccttccggcaacgatgtcggtggtggggatcggacttctgctctccattattcttggccttggtctggccgttctgatggatgccagcgagacagcggaaaaggcactttatccgcttatcatcgcgtctcagacgatcccgacgacagctctggcaccgctttttgtactctggttcggatatacgatctggagcaaggtgcttgtgacggtgctgatcacatttttcccgatcacgatcacggtattcgacggatttaagtcggtgaagacggagatggaagagctcttgtttacctttggcgcggataaacgccagatttttatgaagttaaaggttccggctgtcctgccctgctttttctcagcgatcaagatggcagtcccgttatcgatcatcggagcggccatcggtgaatggctgggagctcaaagcggacttggatacttcagcaggaggatgatgacacagcttgatggagccggagtgttcgcaccgatcttattgttatcggtggcagcgatggcggctgtctgggtggtcacactgcttgaaaaacggatcattcactggagaaatgagtagaaaacacaacatgaaattctggctgaccagtgaaagagcaggacaaattattttgataacgaaaggaaatgacatgaaaaaaggaatgagaatcgctgcagcggtgatggctgcggctttcagtatgacagtacttgcaggatgcggtaagagtgagacaaagacagcggagacgacggcagcggcttcagcggacaacagcagcgcggcagaaacaacagcagcttccggtgaaaaaaaggatctccgtgaggtcaacgtggtattggactggtatccgaacgcgatccacacctttatttacaccgccatcgagcgcggatattatgcggaagagggacttgatgtgaaggtccgcttccctgcgaacgcgaatgacgcgctggcacttgtcgctgccggcaaggcggagatcggaatgtattatcagcaggatgtgatccaggcggttgcaaatcagggaacgaagatcaagtccatcggcgcgatcgtgcagtctccgttgagcattgtactttctttaaaggataagaatattacaagcccgtccgatcttgtcggaaagacagttggatacggcggaacagctctcagtgagtctattgtgaagaccatgatggagtatgtgggcgcggacgcgtcagatgtaaatctgatcgacgttggatttgacctgatgagctccatgactaccggcaacgtggatgccaccatcggctgtcttgtgaaccatgaggttccgcagctggaggaagagggctttgacgtcaattatttcatggcaaatggatatggcattccgaattattatgaggaagtgttcctcgcaaataatgagatgatcgagagtgagccggaggtcttaaagggctttttacgtgcatctgcaaagggctttgaggactttaagaaggatccggacggctgcctcgcgatcctcatgaacaaccagaatgaggagaatttcccgctgacacagagcgttgaggagaaatcctgtgagactctgctgccgcttatggagacggaggatgctccgttcctgacacagacggaggagtgctggcaggagaacatcgactggatgcttgagagtggactgatcgatcagaaggttgaggtttctgatgtgatggtggacctcggggagtaggttccttggggaaatcttataggaattgagaaataccgggatggcggggagactgctgttccggtatttttgttggtttgagtcaggaaaagagaggttgagtcaacttggcggaagtacgagcaggtcagcttccggctcctggtgctgtcgatttccaggcggttcctctatgcttgcagaaaaatgctaagggcggagaaaatgggacgcaactcgcttcgctcagacaagcgcctcatttcctccaacgcattttcctgcgagccaagaggaagccaggcctgtaaatcatgcacccagttccggaggctgacctgcgctggggattgaaggcgtaaggatagacctggaggatgtatgatctggttgttactgtgggaaagaacgcttgttcatatgaaagatatgtattataattgggattagataacgttttacgaggaagaaagagatacctggatggaggaaactgtactgtttctgtttttgaaaatcaggcatccgcgtccagcggcagtcttgtgctggatattgacgagattgaatgggaggaagggtatgacagaacagatgaagaaggaaagggcaaggcggctgtttttgatcgctttcgtgttatttacatttgcaaacggatttggcggcagcattatctcgaactattttaagggcgtgtatcaggtggactcggtgcagagggggcttttggagatcccgagggagctgccgggagttgtgggagtgtttgtgatcacggtgctgtcgggatgtggaaatctgacgttagcgatgatcagtttctgcctgtacgcggtgggaatgtttgtccttggacttttatctccgggatatctcttaatgcagctgtttgtatttacctattctctcggggatcatattgtcatgccggtccgggacgcgatcgcgatggatctcgcggatgagggaaagacagggacctttctcggaaaataccggggatatgcgacgatggggtctatggcggcatcactgcttgtatttatcggattccggtacggggcgttctggttccgggcggacagatcggtcgttccgtcgttttgtgtgtctcttgtggtcgttgcggcggcgttatttttcctgtggagactgagaagagaggttccggcccttgatgtgcggaagcatgatgagaagaaaaagggactgccgcttaagaagaaatacattccttattatatcgttacaggggtttatggtttccagaaacggatgcgtctggtgtttgcaccttggatcattatcgagctccttgcgatgggggcagatacggtggcgcttcttggaatcgcggcgcattttggcagcagtatgtttgctccgcagatcggaaaatttctcgaccggtatggtgtgaaaaagggacttgttctggagagtgtgacgatcggggcgatctttctgtatgcggcctgggcagtccatgggatcacgtccggtgtgtttacaggaagagtggagcagatctttgcgttcacggcatatatttttattatgattgcggatcattttaacgcggtccatgtgatgttaatgaaaaaactcagtgactctccggcggacgtgatggagaacctgtcgtttggactcagtgtggatcatgtgctggccgtgacggtctccgggcttttaggcgctgtctggaagtttgtcggtccggagtgggtgtttgtactgggagctgcggtctgtctggtgcatttcggggtggctgtatggcttggaaagagagcatgataaagaagatgcagcatgactggcgaatacgataaatgaaggaggcacagaatatgatctttatatcgcactatgattcaccgcttggaatgatctatatggcagcagataaagatggattaaagggagtctggtttgaggggcagaagtattttgcttccgggttaaaagagaacgagacagaggagaaggaaacacctgttttgaagcagacgagagagtggctggatctttatttcgcaggaaaagatccgaagtttcttccgtcgctggcaccggaaggatcagaattccggaaagaggtctggaagatcctgcttacgatcccgtacgggaagacgatgacttacggagaaatcggcagaaaagttgctgagatgacaggaaaaaagcacatgtcagcccaggccgtcggaggcgcagtcggccacaatccgatctcgatcttgatcccatgccaccgggtggtcggaacgaacgggagtctcacggggtatgcgggcggaattgagaagaagattgggcttttgaaactggaacagacggacatgtccgggatgtttgtgccgaggaaaggaacagcgctgtagttgagaagtgctggatgttcacgtgtatggtttcgtcttctgagctgtgagcaaaatatacagttactgtttgcgcaaggcgcgaacagtaacatacgaaatgacgggtgtagtgtagaaatgtgaaaattttgcattacacctgttttttatgatattatggtagcggaagaatttagatttcgttgaggtgcgacatgaagatacagaaaaaatggctctatatactgctggctgcagcaggtgtgttcggtgtggtcacaattctctttttttcaggtgaaaaatggctgcgtgatggctggtattatatccctgacagggcgatcgccattgcacttgggctctgcgtgttctggcagatcgtgctgacagcggggacattttttttgctggcgtggaacagaaagaaattcgacggctggatgagaatgattatcagggtaccggtgatcgtggcggcggtatttctgttcctgtttttggcatggaactggtttctttacagtcttggatctgagcagaaagtggagcagtatgatgaacacattgccctgtatgtaacgaatacatttgtgagaacgagattccggtatccgcattatatgtatgaggaaaactggctgtttatgaggagcctgagtgatgaggagcagcaggaagctgttttacagtacggagatccggatgattattacagggaatatcattaacggaagacgcagatatgcgacggaagaaaagctgcagttggagaattatgtgattcagaaaggaaaataaacgatgcgatatttaaaaccacatttttacgataaatttgtctgtacggccggagattgcccggatacctgctgcgcgggatggcagatcatgatcgatgaggattctcttgagaagtataaaagcgtgcaaggagagtttggaaaacgtctgcataattcaatcaactgggaagaggagtgcttctgtcagaatgacaggcggtgcgcgtttttgaatgatgggaatctgtgtgatctctataaggcactgggaccggacgcgctctgcgatacctgccgcctttatccgagacacacggaggaatttgagggacttagggaattatccctgtccctttcctgcccggaggcggcgaagatcattctttcctgcaaggagccggtccggtttcttgaggaggagacggacgaggaggatgattttgacgagtttgattttatgatgttttcgaggctggaagacaccagagatgttcttttctctgttttgcaggatcgaaatctgccgctgacactgcgtatggcagcgtgcgagcagctggcggagagataccagatctgtatggaggaaggaagagagtttgagatcgatgatctgcttcaggaatgcgaacgccatcacagggagggaaccttgcgggagtttatatcggaaagtctctcagaaaagggcgtggatgcggcatcttttcatcagtgggagtggcagaaggaagaacttcaggtgctttatggcctggaacgtctgcgcccggagtgggatcaggtgcttgacggggcggaaaggtggctgtatcagggaagcaaagaggaatattttaagatctgtaaggaatttcaccggatgtatggggcgctgagcagccataaagaagagtgggaaaatctgggcgaacagcttttgatgttctttgtctatacatatttctgcggagccgtctatgacgatatggtctgttccaagatggagttggcgctgttttctgtccgatggatccaggaatttttgatcgtccggtggctggaaaacgggaagaagctgtccatgcaggatgtggaggaactctcctggcggtacgcgagggagatcgagcattccgatgataacctgaatgcgttggaggactggctgtttgggatgtatgcgccggaaggatgcctgctggaggaagagaggaagctttttgcaaaagaggaccgggtgggagattgaaaagaaaggcttttg

SEQ ID NO: 2065 - DNA, 459 bp, Unknown
  gut microbiota DNA sequence
ctgcggacggaaagattcaattccggatggtttgcaacgatctggtaaggagactggccctgatcgatcagaggagtgatgatcttatcctttttgtggagttcctgtctggtcatagcgattccggacctggaatccttgagacactcccggtatttccgatcagcgaacctggcattgtaggtatatttgtgggcaatcgtacaatgattgatctttttactgcatccattgcagacgtagggagcccgatcaagtttgctgcagcgttctttttgaaaatccggacaggtctggttacaggtgggacaggaagcacatttaacgccgcaaagaaggatcttattgcaggcattcgttttcttacaacggaaacgcttggtacaaaagttcttcgcattaagaaaagtccctttgtgaaaccaatcggaggatcttctggccttcacttcttttgaa

SEQ ID NO: 2066 - DNA, 49194 bp, Unknown
  gut microbiota DNA sequence
ggtttcaaaaacaatgagccagaaacgcgcagaagatctggaacggatcacaagtgagtatggaacgatgctccgtatgaatcgcagtattcaggccgaaggttcatttgctgatgtaaaggaagacatgaattttcgaagatatctgtaccgaggaaaagcaaatgcactggcagagagcatccttttggcgatgggacgaaatatcaataagcttcattgcaagattcagaccggaagaacggggagtcatcttttttcattaaagacagcatagattttaatggttgaaaacaaaacagtttgaaatcagacatgccaaaagggatgtctgggaatgaactgtgtttataagggatgggggcgaaatcacaaccgatttcgcccccatttgggcataaagcagggctgccgcccagcaaaaaatatttgttagtgcgacagccccctcttacgcttggacacaaatatctcacggagatactatatattaaatttcgaattaattactcgatgattgtagcaactctaccggaaccaacagttctgccgccctcacggatagcgaaacgaagaccctgctccatagctaccggatggataagctcgattgtcatctcaacgttgtcgcccggcatgcacatctctgtaccttccggaagctcgcaaacgcctgtaacgtctgttgttctgaagtagaactgcggacgatagttgttgaagaacggtgtatgacggccgccctcgtctttagtaagaacgtaaacctgagctgtgaatttcttgtggcaggttacggaacccggtttaacaagacactgacctctctggatctctgttctctgaacaccacgaagaagagcaccgatgttatcaccagcctgagcctggtcaaggagcttacggaacatctcgataccagttacaactgtcttacgagtctcctcgtgaataccaacgatctcaacctcatcgttgagtttaagagtaccacgctctacacggcctgtagcaactgtaccacgacctgtgattgtgaatacgtcctcgatcggcataaggaacggcttatctgtatcacgaaccggatccggaatgtagctatctacagcatccataagctccatgatcttgtcgccccacggtcccatcggatcctcaagagccttaagagcagaaccctggatgatcggtgtgtcatcgcccgggaactcgtactcgttaagaaggtctctgatctccatctctacgagctcaagaagctccggatcgtcaaccatatcgcacttgttcatgaatactacgatgtacggtacgcctacctgacgggaaagcaggatgtgctctcttgtctgagccataacaccatcagtagcagctacaacgaggatagcaccatccatctgagcagcaccagtgatcatgttctttacatagtcagcatggcctgggcagtcaacgtgtgcatagtgtctcttctctgtctgatactcaacgtgagctgtagagattgtgataccacgctctctctcttccggagctttatcgatatcttcgaagttctcagctgtgttaccttcaactcttgctgcaagaacttttgtgattgctgctgttaatgttgttttaccatggtcaacgtgtccaatggtaccaatgttacaatgcggtttggttctttcaaacttagcttttgccattttaaaacgtcctccttaatttgcgcccattgggctattatatataacttaggctgaatactattatattctattcgaaaaagtttttcaagcctattcttgcctaatacaaagggaaactgcgattatttgttacagtacacaggcaatcctgcccgtgaactgtaacaacaaaatttataaattatttcgcagcgccctttctctcagcgatgatcttctcctgaacgctcttcggtacctgctcgtacttctcgaagaacatggagtagttaccacgaccctgtgttctggaacgaaggtctgtggagtagccgaacatctcagcaagcggaacatatgctttaaccatcttgccgccgccgatatcttccataccctcgatacgtccacgacgtgcgttaacgtcaccgataacgtcgcccatgtactcctcaggcattgtaacctctaccttcatgatcggctcaagaagtaccgggttacctttcgccatagcatccttgaatgccatggaaccagcgatgtggaatgccatctcggaagagtcgacctcatggtaagatccatcatatacatctgcagctacgccgagtaccgggaatccgccaaggataccagcctttgtagcctcttcgataccttcgccgacagccggaatgtattccttcggaatagcaccgccgacaacggaagaagtgaacttgaatgtctcttcgccgttcggatccatcggtgtgaagtgtactttacagtgaccgtactgtccacgaccaccagactgcttagcgtacttgctgtctacgtcaacagccttagtcattgtctctttataagcaacctgcggagcaccaacgttagcctctaccttgaattcacgaaggagacggtcaacgatgatttccagatgcagctcacccataccggagatgatggtctggcctgtttctgtatcagtatgaacacggaatgtcgggtcctcttcagcaagctttgcaagagcctcgcccatcttatcctgtccggcttttgtcttcggctcgattgcgatatcgataaccggctccgggaataccatggactcaaggattaccggatgctgctcatcacagattgtatcaccagttgttgtggacttgaatccaactgcagcggcgatatcaccggagtaaaccttgtcaagctcgtgtctcttgttcgcatgcatctgaaggatacggccaacacgctcttttttgtcttttgttgcgtttaatacgtaggaaccggaattcattgtaccggagtaaacacggaagaatgcaagtttacctacgaacgggtctgtcatgatcttgaatgcaagtgcggagaacggctcatcatcggaagaatgacgaacaacctcgttgccctcaaggtcaacgcctttgatcggcgggatgtcaagcggagacggcatgtactcgatgatcgcatcaaggagtttctgtacgcccttgtttctgtatgctgtaccgcagcataccggaactgcatcacactcacatgtagctttacgaagaaccttcttcatctcgtcaacggacggctcttcaccctcaagatactgcatcatgaggtcatcatcaagctcgcagatcttctcaacgagctcgctgtggtaaagctctgcatcatccttcatatcttccggaatgtctgttacggagatatcatcacccttttcatcgttgtagatgtaagcctgcatttcgaacaggtcgatgattcccttgaactcgtcttccttaccgatcgggagctgaatgcagattgcattcttaccaagtctgttacggatctgatctacacaagcgtagaagtttgcaccaaggatatccatcttgttgacgaatgccattctcggtacattgtaggtatcagcctgacgccatacgttctcagactgcggctctacaccaccctttgcacagaaaacgccgacagcgccatcaagtacacggagggaacgctcaacctcaacagtgaagtctacgtgacctggggtatcgatgatgttgatacggtgctcaagtgcgccagccttcggctttgtatgctcctggagtgtccagtggcaagtcgtagccgcggatgtgattgtgatacctctctcctgctcctgctccatccagtccatggtagctgtaccttcgtgagtatcaccgatcttatagttaataccagtataataaaggatacgctctgtcgttgttgtcttaccagcatcgatatgagccatgattccgatatttctggttctctctaacggatattctcttccagccaaggatttttcctcctattagaatctgtagtgagcaaatgccttgttagcctcagccatcttatgcatttcctctttcttctttacagatgcgcctgtgttgtttgcagcatccataatctcgtttgcaagtctctctacctgggtcttctcgcttctcttacgggaatagagagtgatccagcgaaggcctaatgcctgtcttctctccggcttaacctcgatcggtacctggtatgttgcaccaccgatacgttttgccttaacctcgagaaccggcatgatgttgttcatagcctcttcaaatacttctacagcgtccttaccagtcttttcagcgacctcttcgaaagcgccgtaaacaatcttctgagcaacgcccctcttaccatcaagcatgatgttgttgatcagcttggttacaactttgttgctgtaaagcgggtctgctaatacgtctcttttctgagtatgtcctttacgtggcacgttacttccctccttaattataaaaattatatcatcggtactcacatgtttccataaaatgtgttcgcgcgcggttttctatctatttcctgcaaccacaggtcaaataccaccggcactaatatgcgttatctgcattcactttattcctgttagtgatccctcttgcggttgttcaagttattggccgttctgcttaagacgggaaacctgaactccgctgcgctacgtttgagtagcggttattacttcgtaataaccttattttttatctttcggtctctttgcgccgtacttggagcgagcctgtcttctgttggcaacgcctgcagtatcaagagtacctctgatgatgtggtatctggtacccggaaggtctttaacacgaccaccacggatcagaacaacggagtgctcctgaaggttatgtccctcacccgggatatagcttgttacttcaataccgttggaaagacgtactctggcaatctttctaagagcggagttcggcttcttaggagttgcagtcttaacagctgtgcatacacctctcttctgcggagcagatgtatctgtggctttcttatgaagggaattgtatcctttctggagtgccggagctgtggatttctttacagcagtctctctaccttttcttactaactggttaaatgttggcattcttttcacctcctgtgatattgactgttggttgctgctttcagcctttatgcgcacaaaaaacgggacgtacccgatgcacgccccattattatatacagagtttttccgcatgtcaaggtgaaaccttaaattttctttgaaaatacggcattttccgaccatgacacgcctggatgagttgtctcatttttaacctttgtgatttttgctgtttttgtctgttttccaagcggattttccatcatttttatctctcgggatcatccgtttcctgccccattccacagccgcacatcccgggcatgcgcctgtgttgtcaggtaccgcatccatggtccagtaccatgctgccgttcacagtattttcttactattatttttctcccaggcagaacatatccaccgtcacatctgcaaggagatttcctttctcatctgtcacctcactccgcacgatcgtgatcgtacggccacggcggaccaggatccccttcgcatggacagtcccctccgatacgttccggataaaattcacatgtgcgctctgagtcacatacttctttccatctgctctcgccgtcagtcccgtgaccacatctgcgagtgcatagagcattccgccatgtaccattcccatcaggtttgtgacgccatgtgtgatcttcatgctgatctcgctgcactccggtgagatcttttcgatcttcatattcgtatattccataaagggattattttttacatattcgtccggatcgatcccgtactgtatcttttcactcatttctgcctcctgaaattctgtcataacgtgctgcgcagttttctgctgtcatgaaacacgcatgttcacctgctgtctccgactgcattttatcatatgtagttcttccatgcaagaaccggagaggagatccggctgtggatctcctctccgggcattctcaagcatcgactgccagaagacctgcagtccgaaggcttgccatcagggcattcagctgagctaccacatcttccgtgctcgtcgcgtctgcgaccggagctgccgctgtcacagttccggctgggcctgttggaccggttgggccggttggtcccgtcggacctactgctccggttgcccctgttggaccggtcgctcccgccggaccctgcgctcctgtcgctcctaccggacctgccgggcctactgctccagttgctcctgttgctcccaccgggccctgcgctcctgcctctccagccgggcctgctgctccggttgcccctgtcggtcccgtcggacctactgctccggtcgctcctgttgctcccaccgggccctgtgttcccgtctctccggccgggcctgtcggacccgtcgctcccaccgggccctgcgctcctgtcgctccggccggacctgccggacctgctgctccggttgctcctgttggaccagtcgctcctaccggaccttgcgctcctgtcgctcccaccgggccctgcacccctgtcggaccaatcggcccctgcgcaccgtcatatccaggaaatccctgcggaccggtcggtccctgtggccctactggccccatcggccctactggccccatcggccctgctggtcccattggccccgggcatccctgcggacctctcggccccatcggacctctgcagcagcagtttccacccggccgtccgcagtttccgccgcatcccacgccctggcctccattttcacagcgatttcgctcccctatacagccggcatcacgataaggatcataatccatatttctcatatctgaatctccttctccttatttttcacgaatattccgtaaccggatatccgtttactatactttatgctgcccgtccatattcgttcctgctctctttatcgctccatccgcggtcttgatcctgccgcagcatttttattttctcattccgatccgcgcaaaatattcccggttctttctgcacgcctccgttcccggatggcatcgttccgccagctcgttataccagcacgctttttttctctctcccatccggtcatggcatacacaaagctggagatacggaatataatcgcggtattccggcatgataaatccttcctccccggccaatcttcctgttttcagtgcctggcgataccagaattccgcatccgcataccgctttccggaaaagaaccaccatccaagatcacagcagagttccggtcccggaattccttcccgcagacccatgagcagaaaagaaagtgcctcatcccgtttccccagctgatacatgcaaaatgccccgtgcctgcacgcgtctatccggtcgatgtgccagccgtcagacctttccaggtaagtcaaaaacacaccggccgcctctttatatcgtttatggtaatacagttcctttccataataatagtgttcacgcgcagtcaggcccgcgatttttcccttctcacgtatcatcttttcaaagatcctgagattgcggtccggatctcccgtcccgattttccgatgctcgatcagaatatcttcccgcactgtttttccaaacggttcgatcacctcatggatccgccctttccataccgctctttcgcatcttctcagaagacgttcccgataaaagaaaaatgacggacttccgcttccgtcatatccaaccgcatatttcatcatcaccacatccggtttctcctgatccagacgcatttttagtttcatcagtttcttttgctcttcttccgtgatcacatcatccgcatccagccagaaaagatagtctcccgctcctttctgaaacgcaaaattcctcgccgccgcgaaatcatcgatccaggggaaatcatagatctgattcgtaaacaatgacgcgatttcctttgttttgtcggttgaaccggtatcgacaatgataatcttatccgcaaaatctttcacacaggaaagacatcttccaaggacctgttcttcattgcggacgatcatgcacaagctgacagaagccatacattccctctgttgtccctttttatcaatatatgagatcctgtaaaatctgtccgaatatttcatattttataccggcagctctcttaaagttctctcatgttgtatgaatccattgtgtgaatccatctgcccccggcgcaccgtatataaacaggcgctgcctggatccataaggattcaaaggcagcgcccgttttctccggcattatttccggcattcactcttcatttgtatttattgcaggtttgtcccgtctgccgtctatccgcagagcccagactgatgtaccgtttttactcctgctcctcacctgtcagatccagcagattcagctcctcaaatccgtctgtggacgggagttcaaagagaacttccttccccggattcttgcagtccatgttcatgtcgatcttgtagttcatcacatcgacctcagctgtctccatatctgtaatgttcattacaacatccatgaagatcgtcatgttctcgtagtagccatctttgttgatcgtcatctcgccgtttgcctcgttgaccttcatgtccatgccaacaccgagagtcgcatatgtctctgctgtcgcaccggtgatcgcctggatcacttcattgatcttatcttcgttgatgctgtaggcaagtttctttgtatcgccgttctgatacattctgagacctttgatcacatctgtacccaggttcatatcgagctgggtcgcctgctttgcagcatcttccaaagacatcggctgcttatatttaattcccattgtgtccacatacatgttgccgcccgtatagaacatctcgatcggcacctctgttcccagtgtattggatgttccgtcgcagaggaattcgatgtttccgtcttccgtctccctcatcttgatgttcatggccatagtcatatccagagtttcatcaaaataagatgttgtaatccggtagttcacatcgatattttcgctcttgagcgtttcatttaactgctgcgcttcctcgtaaacttccagggcctccggatcattctcttccacatcagtcggaaccgacttcacctgggttacaccgtttacgctccatgcgccattcttgtcgatctcataaccgtccgcacgaccgtaatcagtcatcgcatatccggtatttccgaaataatagcactgtgcccagccgtcatgatcaccatccagccagtaccagccgtttctacagtaggaaccgtcatcattctggtatttccagccgttcatgtcttcctgccactcacccgcaaatgcagggaacgagagtgccattgcaagcggcatcgcagctgtcaggaccattttccactttttcataagagagacctccttgtttttatcgtccggacgcctttccggcgcaggacttttttcgcctgtatcttcaggcagcatctattatcaatataacaggttccgctctcttccgcaattcatttgtctgtcggatttatttttttccgtaattcttcaggattctgttatcatttctttcctattccgtatacgactgctccgcctggatcaccgcataatagttgctccacttctctgtgatcagcttcgcgatccctttctttacttcctcgtttgtctttccatattggaacggaacgactgcgtcgaagatcaggttcgtgtgggttggtccctgcaccatccggaaatcgtggatcgtgacgcccgggaagttttcccggatcatctccacgatctctttttttgtctcgttgatcttctcgtcattgacaacgatcgggtccatatggatcacagcttcacagccgagttttctctttaattctttctcgatcctgtcgatcacatcgtggatctcaaaaatatcgctgtcaccggatacttctccgtgtagggagatcatgcgtcttcccgggccgtagtcatgtaccacaagatcatggatcccaaggatctccggatgtgcgagcacgatggactcaatctcatcgacaaattcttttgacggtgcctctccgaggagtggatttaaagtatccttcgcagcgccatatcccgcgtagagaacaaagcatgcaaccagacatccgcaccatccgtccacgttgactcccgtcgcatacgcgatccccatcgagaccaggactgccgttgtcgcgatggagtcactcatactgtccatcgctgtcgccttcatcgtctccgactggatcttcgttcccacggaacggttatagaagaacatatatgccttcacgcagatagaaacaatgaggattccgaccgccagagcgcttgtctcgaccggttccggatgaaagatcttcccgactgatgtctttaagagttcaaatcccatcaggatgatgatcatagaaacgccgaagccggacacatactcgatcctaccgtgtccgaacggatggtccgcatctgccttcatgccggaaaatttgaaccccaccagggagataaatgatgatcctgcatccgacaggttgttgaatgcatccgccgtgatggcgatcgatccgctgatcactcccgccaggtacttgccggcaaacaggcagacgttgagtgcgatcccgacgatgctgcagagcattccgtaggcgcggcgcacattgccgtctccgacctgatctctgttttttataaataagctcgataatattgtaatcatataaaacactccaatcagtctgcactttgcatacagactataaaacataagcctgaaattcaggtcgaacaatcataagatccacaaatgaaagaaatccttccagatatcccctggtaaaagttgcctgtctctaaccttccgtatactcaaacagcgaggaaaaacatgatctctcatgttctcctcgctgtttgagtatgcatcagcctatgggaaagttcctgtttccacgaacttccccacaatataaacttgtctgttctgaaaacctgcacgattgcctgttttcataaaggtttacacattatgatcgattattcatcaacttcctgtgtgtcatcctcgttgagaatgatcttctcagcctcttcgatcggagcttctgtctcctcctgcggctcagcagcagtctgaacttccggctccggcttcttctcctcgatctcgccggtgctgagcttgatgttgcggtaacgcttcataccggtaccagccgggatgagcttaccgatgataacattctctttcagaccgatcaggtgatcgactttaccgttgatcgcagcctcagtaagaacctttgtggtctcctggaaggatgcagcggataagaaggaatcggttgcaagggatgcctttgtgataccgagcatgacctgtttaccctctgccggctgtttgcctgcagcgatgagctcctcgttcatctcgttgaaatcaagaacatccatggatacgcccggaagaacgtcggaatcgccgctctcctcgatacggatcttctttaacatctgacgcacgatcatctcgatatgcttatcgttgatctctacaccctgtaaacggtaaacacgctgtacctcacggatcatgtaatcctgtacggcacgaacgcccttaacctttaacaggtcgtgcgggttgatgctaccttctgtgagaacgtcaccggcctcgagaacctgtccgtccgtaactttgattctggaaccatacgggatcagataagtcttggagtttcctgtctccggatcagtaacgatgatctcacgtttcttcttggtatctttaattgtgacaacaccaccaaattcagcaatgatcgcaagtcccttcgggcgtcttgcctcgaaaagctcctcgacacgcggaagaccctgtgtgatatcgccgccggcaacaccgccggagtggaatgtacgcatggttaactgtgtacccggctcaccgatggactgtgcggcaatgataccaacagcctcgccgacctgtaccggctgacctgtcgccatgttcgcaccataacacttggagcaaacaccgatatggcatttacatgtcaggactgtacggatcttaacggtatttctgccgagcttctcaagaaccttgataacggctgcggcacgtttcggtgtacacatatggtttgccttgacaacaacttctccggtatccggatctgtgatcgtctcagcgatatatctgcctgttaatctctcctggagagtctcgatcgtctctttcccgtctgtaaagccttcgatctccatgtacgggatcgttccttttccttcgcagcagtctgtctcacggatgatgagatcctgggatacatcgacaagacgtcttgtcaggtaaccagagtcggctgtacgaagagcggtatcggacataccttttctcgcaccatgtgcggagatgaagtactcaagtacgtcaagaccttcacggaagttggacttgatcgggagttcgatcgtgtgaccggttgtatccgccataagtcctcgcataccagcaagctgcttgatctgcttatcagaaccacgggctccggagtccgccatcatgaagatgttgttgtatttatcaagacctgtcagaaggtcatgtgttaactggtcatcggttgctttccatacatcgataacttctttgtaacgttcttcctctgtgataagaccacggcggaagttcttagcgatacggtcaacggtagcttccgcgtctgcgaggagctgcttctttgttgccgggacagtcatatcggaaatggatacggtcatagcggctcttgtggagtacttgtaaccgatcgccttgatatcgtccagagtgatcgctgtctggatcgctccgtgtgtattgatgactttctcgaggatctgctttaactgtttcttctttacgaggaaatcgatctccggctttaactcgttgcccgggatcgttctgtcgacaaatccaagatcctgcgggatgatctcattgaagaggatacgtcctacagttgtatcaacgatacctgtcatcgttcttccgtccggaagtgtctttgtcacacggactttgattctcgcatgaagagtaacggctccgttctcatatgcaagaagtgcttcgttcgggctcttgaagaacatgccttcgccctttgcgcccggtctctcctgtgtcagatagtagataccgaggaccatatcctgggaaggaactgctaccggaccaccatcggacggttttaacaggttgttcggggagagaagaaggaagcggcactctgcctgtgcttccatcgtcagcggaaggtgaaccgccatctggtctccatcgaagtccgcgttgaatgcggtacaaacgagcgggtgaagcttgattgccttaccttctacaaggatcggctcgaacgcctgaataccaagacggtgaagagtaggggcacggtttaacataaccggatgctctttgattacatcctcgagaacatcccagacctctgtctgaagacgctcgaccatctttttcgcgttcttgatgttgtgtgcagttccgtttgcaacgagttccttcataacgaacggtttgaagagctcaatcgccatctctttcggaagaccgcactggtagatcttaagttccggtccaacgacgataacggaacgtccggaatagtcaactcgtttaccgagaagattctgacggaaacgtccctgcttaccttttaacatgtcagaaagggactttaacgcacggttgcccggtcctgtaaccggtcttccgcgtctgccgttatcgatcagggcatcaacagcctcctggagcattctcttctcgttgcggacgatgatgtccggagcgccgagttcgagaagtcttgcgagacggttgttacggttgatgattcttctgtataagtcgtttaagtcggatgtcgcgaaacgtccgccgtcgagctgtaccatcgggcggatatccggcgggatgaccgggatcacgttcatgatcatccactccggtctgtttccggagttgcggaatgcatcaacaacctcaaggcgcttgatgattctcgctctcttctggccggaagcctcctgaagagcttttctcagctcttcggagtctctatccagatcgatattctttaaaagttcctggactgcctcagcacccattcctacgcggaatgtgccgtagccgtacttttcaacagcatcgcggtactctttctcggaaaggacctgctttaactgaagtccggtatttcctgcatccagaacgatataggaagcaaagtacagaactttctcgaggactctcggggagatgtccaggatcagacccatacggctcgggatacctttaaaataccagatatgggataccggagcggcaagcgcgatatgtccgatacgctcacggcgcacgctggacttcgttacctcaacgccgcagcggtcacagataacacctttgtatctgattttcttgtatttaccacaatggcactcccagtccttggtcggtccaaagattctttcgcagtacagaccgtccttctccggttttaaggttctgtagttgatggtctccggttttttaacctcaccatgggaccattccagaatcttttccgaagaggcaagtccgatacggatcgcgtcgaatgtcatcggctgataagtttcatttgtctcaggcatgaacggtactcccttctaattatttgtcgtcatcctcggtataatcgtcatcgacatagtcgtctttggcaccgtcgtttgtatagtcatcgtcttccacattgacaagctcgtcgcccttgaattcctgcttctggaatccgtagtcggataagtcttccttatcgttgtagcggcggtctccctcgatgatggaacgaagatcgtagtttgtatcagagtagtcgatgttctcagacatatcgacttcctcaccattgtcacgcagcactcttacatccagtccgagagactgtaactcttttaagagtaccttgaaggactccggaatacccggctccggaatgttctcgcccttgatgatcgcctcgtaggtctttacacgtccaacaacgtcatcagacttcactgtcaggatctcctgaagtgtgtaagccgcgccataagcctcaagagcccaaacctccatctcaccgaaacgctgtccgccgaactgtgctttaccaccgagcggctgctgtgtaacgagtgcgtatgggcctgtggaacgtgcatggatcttatcgtcaaccaggtgatgcagtttcaggtagtgcatgtgtccgatcgtagtcgggccatcgaagtattcgcctgtacgtccgtcacggagctgtaccttaccggtacggctgatcggaacgcccttccagagagcacggtgatcaaggtgctcaccgagatattccataacctccggacgaaggatctctttatacttctcctggaatgcatcccattccatgtttacataatcgtttgcaagctccagtgtatcctggatatcattctcgtctgcgccatcgaataccggtgtggaaacattgaatccaagtgcctttgctgcaaggcttaagtggatctcaaggacctgtccgatgttcattcgggacggcacgcctaacgggtttaatacgatatcgagcggacgtccgttcggaaggaacggcatatcctctaccggaagtacacgggagacaacacccttgttaccatgacggccggccatcttatcaccaacagaaatcttacgtttctgagcgatgtagatgcggactgtctcatttacgccaggagcaagctcgtcgccgttctctcttgtgaagagttttgcgtcgatgatggttccgtatgcgccatgcggtacttttaaggatgtgtcgcggacttctcttgccttctcgccgaagatcgcacgaagaagtctctcttcagctgtcagctcggtctctcccttaggagttacctttccgactaagatatcaccggcacggacctcagcgccgatgcggatgattccgcgctcatccaggtctttcaatgcgtcatcgccgacacccggaacatctcttgtgatctcttccggtcctaacttggtatcacgggattcgcattcatattcttcaatatgaacagatgtgtagacatcgttcataacaagtttttcacttaacaggaccgcatcctcgtagttgtaaccttcccaggtcatgaatccgatcagcgggttcttaccaagagcgatctcgccatcctttgtggacggtccgtctgcgataacctcgcctttctctacatggtcgcccttgtaaacgatcggcttctggttgtagctgttggactggttgcttcgtgagaatttgatcaggcggtaaacgtcgcggtttccgtcggaatctctcttgatgatgatctcgttggaagcggagcgttcaacaacgccggcattcttagcgactacgcagacaccggagtcaacggcagccttgccttcgataccggtaccaacaaccggagcttctgtggaaagcagcggtacagcctgacgctgcatgttggatcccatcagggcacggttcgcgtcatcgttctgtaagaacgggatcatggaagtagcaacggagaataccattctcggggatacgtccatgaggtcgatctgtttcttctggaaggaggaagtctcctcacggaaacgaccagatacgttgttgtggatgaagtggccttcctcatcgagcggctcgttcgcctgtgctacgatgtagttatcctcttcgtcagctgtcatgtagacaacatcgtcggtaacacgcgggttagccggatcgctcttgtctacgacacggtacggagcctcaacgaagccgtactggtttaccttcgcatagcttgcgagggagttgataagaccgatgttcggtccctcaggagtctcgaccggacacatacgaccgtagtgggtgtagtgtacatctcgaacctcgaatcctgcacgttctctggacagaccgcccggtcctaacgcggagagacgtctcttatgcgtaagctcggataacgggttgttctggtccatgaactgggacagctgggagcttccgaagaactccttcactgctgcagtgaccggtttgatattgatcagggactgcggagtgattccgtcgatgtcctgtgttgtcattctctcacgtacaacgcgctccattctggagagaccgatacggtactggttctgaaggagctctccgactgcacggatacgacggtttccaaggtggtcgatatcatcctttacgccgatgccgtactcaaggtgcatgttgtagttgatggaagcaaggatatcttcctttgtgatgcatttcggaacaagctcgtggacgttgcggcggagttcagcttttaactcttcctcgtcatcccctgctttttccagaatgtcttttaataccgggtaatatactaactctgtgatacctacttcttccggatcgaaggacacatatgcggaaaggtcaaccataaggttggaaagaaccttctccacgcgctcttctgtctggatccatacatacgggatcgcagcgttctggatcgcgatcgcctgatcttttgtgatcgcttttcctgcttccgcaaggatctcgcctgtttctgtatcaacaatatcctcggacggaatctgtccgacgatacggttcttcatatgaagcttcttgttgaatttatatctgccgacctttgcgagatcatatcttctcgggtcgaagaacatgccgtttaacagactctcagcactgtcgacagacagcggctcgcccggacggatcttcttatataactcaaggagaccatcctgatagttgtcggatgtatcctttgtgaagcttgcgagaagcttcggctcctcaccgaagagatcgatgatctcagcgtttgtaccatatccgagcgcacggatcaggacagttaccgggacctttctggtacggtctacacgtacatagaacacgtcgttggaatctgtctcatactctaaccatgctccacgattcgggattacggtacaggaatataattctttaccgatcttatcgtgatcgataccataatagataccaggggaacgtaccaactggctgacgataacacgctctgcaccgttaataacgaaggagccggtatctgtcattaatggcagatcgcccatgaaaatctcgtgttcattgatctcatctttatctttgttgcagagtctcaccttgactttcaaaggtgcggcgtaagttgcatcacgctctttgcactcttcgatcatgtatttgatgtcatctttgcaaagcgtgaagtctacaaactccaggctaagatgtccagcaaagtcagcgatcggagagatatcgtcaaagacctctttcaggccctcgtcgaggaaccactgataagaatccttctggatctcgatcaggttcggcatctcaagaacttctttctgtcttgagaagctcattcttacgctcttgccggacggcaccggacgcattctgcttttctccatttgacgtttcacccctgttttctttctctataatcaataactaattttgggcatactggtaccatatgcacatgataccacaatagtgcacatttcatactaccatggggttgtcaatctgtcaagcacttttttacaaagttttcctactctacgcttgtataataccccggcgcatacatctgaatcgagtagaaatcatcccctgacgggctctctttacttgcaaaaatctccggtccataagctgtggtaaatccattgacactgtcatctgtcttactaacgatcatatcctcggtattgatcagttcctgatatacctccttcccgcttagatccgtatccagatagccgaattcctgaaatgcggcttccagcacgtccacgatctggtagaaggcctcctcattactgctgtaggcaccgattccatgaagatcatctgttgccgtgtcagcgtagatggtaatgcttcccacatactccccgtcacggctcagataataggcctgatctgtattgtaccagctcatatcgtccgaagcatagttgtagctgtatgtgtcctccatcgaccactcagaaaatccgtactgcggcaggagtcggtccagggcggccgtcacatccgcaagctgggcgtcatagtgaccgtagtttgtacagtttgttccgatggcccgcacctcctcgtcggagagctcgccctccccaaggacctccacggcgttggaatcggcagaggaccagagatcgccgctggacgagtcgaagatgttctcgatcccgtagatcgattccctgatcgcatgagtgataaggaacagcaggtttccgccgacggaaaataccagccagatgatcacgacgatcagaatgccggtaaacggcttcttccgtccccgctcggagtttacacggtccatgatgttctttgaagactggctgctgtaggacctgttctgacaggtgtctgcctgaccgcggtactgttcaagctggctcttcatatgttcgaacgcattccgctgtcccgtcatccggtttcccatattctggaatggatccgctgtcttcttctcccgatttgtctttttctttccgccctgtattctggttgatgtcccattccctttaaatatgcccgcgtacgaatctgtaccggacgtgctgtttccagggtattcgcttccgccatcatggtacaggcagtctgactcatggcgaggatgcctctcatttaagtagtaatccacatcctgcacatatggatgccacacgatccttttgcatccgctgcagtatagacccgatgtcattttctggtcgcagtatggacaatatctctgtttcatccgttgttcctcctgtcggtattcctcttttcaggtcattttaattttgtattttaagcccaacagctaaatttctactctcattttaacataggtttccggtgcacacaatcgagatttcacatcgtcagcccgatgcctgattcttgttacagtacacgggcactccttgcccgcgcactgtaacaggattttgccgatgcttcgcattccgaatcggcaaaatccactaccaccactgtattgtacggaattttcagttcagaaaattcctacccatgaaaagtaactgattcttttcccaaaacggaaaaagactcagagcagccactttgcatggtctctgagtcttctcacattgatatactgcttttacctgttcaggatctccataaattcctccccggtgatcgtctccttctcgagaagatatccggcgagttcgtttaattttgctgcatggtctcttaagattcccatcgccttttcgtactgtgccttcacggtagcgatcacctcatcatcgatcgctttcgcagtctccggtgcacatgcaagagaagcatctccgccgagatactggtttgtcaccgtctcaagagccaccataccaaactggtcactcataccatagcgggtcaccatagcgcgggcaagctttgtggcctgctcaatatcgttggaggcgccggtcgtgatggagtggaacataaattcctcagccgcacgtccgccggtcagagtcgcgatcttgttgagtgcttcctccttactcataagaagacgctctccgtcctccacctgcatcgtgtatccaagcgcacccgaagtacgcggaatgatcgtgatcttgtggaccggagcagaattgctctgacacgcagccacaagcgcatgtccgatctcatggtaagcaacgatccgtctctcatgttccgatacggacgcattcttcttctgataacctgcgataaccgtctcaacgctctcttccaagtcagcctgggatacaacacggcgtcccatgcggaccgcacggagtgcaccttcattgatgatattcgcaagctccgcaccgctggcaccgacagttgctctcgcgatcgcattaaagtcaacggactcatccatcttgacgtctcttccatggacgcggaggatcgcctcacgtcctttaagatccggaagttctaccgggattctccggtcgaaacggcccggtcttaaaagtgccttatcaagtgtctccggacggtttgtcgctgcgagaataacaacaccctttcgtccgtcaaatccatccatctccgttaacagctggtttaacgtctgctcgcgctcatcgtttccgcccatgccgcttccgtcacgctttttaccgatcgtatcgatctcatcgataaaaacgatacacggagccttctcatttgcctgtttgaatagatcacggaccttcgcagcacccatgccgacgaacatctccacgaactcagaaccggagatcgagaagaacgggacatgcgcctcaccggcaactgcttttgcgagcaacgtcttaccggttccaggagggcccacgagaagagctcccttcggaagcgtcgcaccgatatcggcatacttcttcggatcatgaaggaaatcgacgatctcttttaatgcgtctttcgcctcttcctctccggcaacatccgcaaatgtcacgccggtctcactctccgcatagatcttcgcattcgattttccgaacgtcatcgcgtttccgcctatccgctttgccatactgcggcttaagatctgtccaatcgcgatcatgatcacaaacggaaggatccagctggtgaagaatgacatgattgcagattccttctgcgggatcaccttatcaaaggtcactcccttactgtacagacgctgcgtaagatccgggtcgtcccagagaccagtcttgtagatctgctcttttccgctgctgtcctttgtgacaaatacgatctcaccgtttgcgtcatccttctcaacctgttttacctgtccattatcgaccatagtcaggaactcattgtagccaacttcctttacctgctgcttcagcgcagacgggaatacgattccgttcaggagaactgtcatcacaaggatcacgatcatataatagaagaatcccttgaacgtattcaggttgttcgggtccggcttttttccgccgtcttttgtacccatatgttttcctccttaaatagtctgtcctgcatccgttcttatcgccaaaaaatatatcggaccgcggacaggaatttctgccttttcacatgctgttatcaacggatcatgtgtccaaaatgacaccctgtcatcttatgtgttttttatcctatctcaggcagccctgaaagtcaatggaatttatggaagtttctgaaatattatattttttttagaaattcttttgtcattttttcatggagcggaattcaaaaaattagcttgacaaacactcttttccgtactatgatacccataaccaaacaagaaaaaccgttgagaaagaggagtacattttcgatcgtgttttcacagagagctgcaggcggtgggattgcagtatggcactggaaatggaatggactttcgagggcagtcctgaatttttagtatggactgacggctaccgcagtcgttaaacgagcggcgtatatgttggtatacgaaaaaagcggaccgaaaggtcaaattgagtggcaccgcggatatgaaattcgtctcaaggatcagattttaaatcgatatctgatccttgggattttttttatacctaaaggacctgccgacggcagctccctacagatgtatggcagcaaaaatacatgctctgtacaagatatcccacaccacggcaccttcgctccacacctccaacaactactggaccgcatgaccggatcggaaagacccggaatgcagttacgaatcatctcaattaaaaagtagaagaggagaacaaaattatgaaaaaatcgatcaaagcaatcatcgcagcaacattcaccgcagcacttctcgcaggctgctcctcaggaacaggtttctccgcaacaacggcggctgagacaaccgcagctgagacaagtgtcgaggctacaaccgcagcagaatccgcagacgcagcggataccgctctcgcagacggttcctacacgatcggcatcaaccagttcgcagttcacggctctctcgacaactgccgggaaggtttcatcgaaggtctcgccgagaacggattcgtggaaggcaaaaatcttaccgtattagaagaaaacgcacaggctgacccagggttagcagcacagatcagcacaaacttcgccggacagaaggtggatctcatctgcgcgatcgcaacaccgagcgcccagagcgcatacagcgtcggcagaaagaatgatattccggtcatctatacagcagttaccgatccggtcgcagctgaacttgcaaacgcagacggaacaccggtcggcgaagtgacaggaacaagtgataagcttccggttgaacagcagctcgaaatgatccgcgcgatccttccggatgcgaaaaagatcggtatcatgtatacaacaagcgaagtaaactccgcttccacactcgcagagtataaggaaaaagctgctgattacggttttgagatcgttgaatccggcgtttcctccacggcagacatcccgctggcagctgacagcctcttagaacaggttgactgcttaaacaacttaacggacaacaccgtcgttgcttctcttccgctgatcctttccaaagcaaacgcaaagaacatcccggtattcggaagtgagatcgaacaggtcaagatcggctgcctcgctgcaatgggtctcgattatgttgatcttggaaagcagacaggacgcatggctgccgaagtcttaaagggcgagaaaaaagcaagcgaactgaactttgaagtcatcgaggaagcagctttctacggaaactccaaagtcgctgaggatctcgggatcacattcccggaggacctctccaagaatgcaaaagaattattcactgagatcacccagtaataattcaaacagacacaatgtcaggaagtccggcaaagcatttcatccgctttgccggactttgcaccagaatgtaactgtaaaagtaactgttcagcagagctgaacacccactgcaataaccgcgataaaatataggttattgattttcggaggataacatggcaatcttattaggaatctttgaggaagggctgatctacgcgatcatggccctgggcgtatacatcacctacaagatcctggactttccggatctttcggtcgatggaacattccccctgggcgcagcgctgaccgcagggctgatcgtgaaagacatttccccggtgtgggcattaccgctctctttcttcgcaggcgtgctcgccggatgcgtgaccggctttattcatgtaaaatgcaaggtccgcgatctgttttccggtatcattgtcatgaccgctctctactccgtaaatcttcggatcgccggaatgaaagccaatctcccgttcctgtcccaggatacgatcttcgacaatgaatggacgcgaaacagcctgccggcatccgtgagaccgtacatcgttgtgatcatccttgcagtgatcgccctgatctgcaaattcgtcctcgactggtacttaaacacgagatccggatatctgctccgggcagccggagacaatgacactctcgtaacctctcttgcggaggacaaaggccgcgtgaagatcatcggtcttgcgatcgcgaacggcttcgcagctctcgccggaggagttcttgctcagaagcaggccttcttcgatatctccatcggtaccgggaccatggtattcggtctcgcaagcgtcatcctcggaacccagctgttccatcgctttggaaaattaaaagcgaccaccgcggtcatcgcaggcgcgatcctctacaaggcatgcgtcgctttcgtcatttccatgcgcatcgtaaaagcaactgacctgaaactgatcactgcagcgatccttcttctgatcctgatcatcagtgattccatgaagagaaagggggcacattatgcttgaattaaagaacatcaataaatattacaatgcaggcaccgtgaacgaaatgtgcctctttaaggatttcaacctgagcatcgccgacggcgagttcgtctccgtaatcggcagcaatggatccggaaagacttccatgttaaacctgatctgcggcagcattccggtcgactccggaacgatcacaatgggcggggtcgatatcacaaagatgccagagtacaaacgccaacgccgcatcggccgcgtctaccagcacccggcaatgggaacctgcccgaacatgacgatcctggagaatatggcactcgccgataataaaggaaaaccgtttaacctgctccccggaacaaacaagtcccgcatcgatttctaccgcgaccagttaaagatcttaggactcggtcttgaggataagatgggcgtgaaggtcggcgttctctccggcggccaacgccaggcgatggcacttttgatgtccacgatgaccccgatcgaatttctgatcctcgatgagcacactgcagccctcgacccgaagaccgccgacatcatcatggaactcacaggaaagatcgttgcggagaaacacctgacaacgatcatggtcacccacaatctccgcttcgcagtcgagtacggcgaccgtctcctgatgatgcaccagggacatgcggtcatggacaaaaagggcgaggaaaaggcgaacacggaagtagatgatatcctcgacatgttcaacgcgatcagtatcgagtgcggaaactaatcgggaaatatcaaaaatccattccaaatcggcttcaccgatgggatttttgccttcaagcctgtgttttattacggtcagcgcagcaaatgcgcagacttactgaccagttacaaagtatcagtaaaatccagttacaatacacacactgaaaatccccacacacggtaacgaaaaagagcgatgaactccgggatccgacatcagattccagaactcatcgctctttttactttataactgttcctgtgctttcctcagcttctcgagaatcccagcgtcttctccagttctttcttaaatgccagcacatccacggcaagttccgcgatccgggcatccgtcatccggctcaccggtgcggagatgctcagggcgtagaccggttctttatggtaatccggaatgctgaccgcgatgcagcggacgccttcctcattttcctcatcatccatcgcatatccgaccttccgcactgtcccgatccgttccatgagatcctgaaactttgttacagtgtacggtgtcagggacacgatctctgagctgttccagatctctctgatctccggatccggcagctccgcgagcagcgctttgccgacgccggagcagtacagggggatccggcttccgactctcgataccatccggatcgagctgacgttggattccactttatcgatatacacggcctccgttccctctctgcggacgagatggaccgtctctccggtctgctccgacagtttcttcagtgacggatgaaccagagaagccatgttcgtctgttccaggatcttgcctccgatctccaggaacttcagagacagcgcgtatttcagggattcctcgtcctgccggatatagcccatatactggagggaagtcacgagccggtgcgtcgtgctcttgtggaatccgagctgcgcgctcagatccatgatccccatcggaccattctccgccagacactcgatcacctggaacaggcgctctgcgacctggatcggattttttcctgtttcttccattctttctgttctcctatctaccccgacagttcagttttctgtcaggtatttacacgcttccccgtaactgttcagtagttacagtacacgggcactccatgcccacgcactgtaacgggattttgccgatgcttcgcattccgaatcagcaaaatccgtgaccacaacggtatcatacggaattttcagttcagaaaattcctatccgtgaaaagtaacgttcagtaccctcacagttacgatttttcttaataagactctgtgtccggaacccggtctgaaaaatgaccgacggatcccgatcaccggtccgtcatttatatgaatcgtgttttctttgtcatttccacgaactctctgttcgttcttgttcgcgcgaacatgtccaggatcttctccacggactcctccgctttcatggagtttgtcgccttgcggacgatatccacagcttccgcctcctcgcttgtgagcaggagatcgtcgcggcgtgtaccggactttaagatatcgattgccgggaagatccgcttctcggagagcttgcggtcgagtacaagctccatattgccggtgcctttaaattcctcgtagataacgtcatccatacggcttccggtatcgacaagtgcggttgcaaggatcgtcaggcttccgccctctctcatatttctcgctgctccgaagaaacgcttcggcatgtggagtgccgccggatcaagaccacccgaaagagtacgtccgctcggcggaacgaccaggttgtaggctcttgcaagtcttgtgatactgtctaagaggatcatgacatcacgtccatgctctaccagacgtctcgcgcgctcgatgaccatctcagagacacgtttgtggcgctccgggagctcatcaaacgtagagtagatgacttccacgttcggtcccacaacggattccttaatgtctgtaacctcctccgggcgctcatcgatcagaagaatgatcatatgcatatccggatagttggtcgtaactgcttttgcaacctgttttaataaggttgtcttacctgctttcggcggggatacgatcagacctcgctgacctttaccgatcggagcaaggaggtccatgactctcatcgctgtcgtattttttccacctctgacttccagattcagtctctggttcgggaagatcggggtcagatcctcaaagttcgggcggtgctccacaacactcgtcggatagccgttgatcgtctttacatagagaagtgccgcaaatttctctgtcgcggatttcactctccggcttcctcggatgatatctccggtcttcatgttaaagcggcggatctgggaaggtgccacatagacatcgttatctcccggaaggaagttctcacagcggataaatccgaagccatccggcatgacctctaaaattccgtttgcctcgatcccgctgtcgagatcctgaagatctgccttcggttccgcggtataactctgagcaccctggtttcttgtctggtaaccagtctgataggttcttgagctctcctgaattccctgggcatccggcatgccgccctgagtctggcggtcctgatagcttccctgagtctgggaatcctgcgcagatgactgtccctggtaagcattctgacggtcctggtagctgctctggcggtcctggtaactgatctggcgatcctgatgaccactctgacggtcctgatagctgctctgacggtcctggtaattactctggcgatctttgtaattgttctgacggctctggtagctgccctgacggtcatttctcatctggcgctccccacgctcctgacggtcatttctctcatatcgttccgcacgctcggttctctccggacgccccgtgcggtcctggaagaccgccggtctctccgatgccattttctcctgtcccgcacctccggaaacatttccagcagccggcgctttctctttctgcgctgccgcctgcatcggtgctgccgtattctctctattttcattattttctgccggtacttttgcgccgccggcactttccgccgcctcacaaaggcgatcgatcaattctgcttttctcaagccgctgatattcctgattccctggctctttgccagctcttttaactgggtcagcggtaatgttgctaatttttcacgcataataatactccttcatccttattccggttttatcatctcgttgggaatcaaaaaaagatcataacagcctccccgtctccggatccgctgccttggaaccattagatttgaaacttttctccgatcggatcaccgcatttcagcgatatcggaggactttttcgaaactgcccgggagcaaagaagcaagtatcgtttccaatactttcctcccaggctgttctgatgagtatatctcattataacgcacacataaaaaaatggaaagaggaattttcagttcagaaaattcctacccgtgaaaagcagcttcccgctttataaactccatatgctccctgatcttcttttcatacccattctccgacggctcatagaatctcattccttccatcccgtccggcagatactgctgggtgacataatgattcggatagtcatgtgcatatttatagccgagtccatggcccagcttctccgcgcctttgtagtgcttatcctgaagatgcgccggaaccggcatcgtccgcatattcgctacagccttcatcgcattctggatccccacacaggccgcattgctcttcggagccgtcgcgacataggcggccgcctgggagaggatgatctggctctccggcattccgatccgctccaccgcctgcgccgcgctcaccgcgaccacaagcgcattcggatccgcatttccgacatcctcggaagcgcagatcatgatcctgcgggcaataaacttcacatcctcacctgcatacagcattctggccaggtaatagaccgccgcatccgggtccgatccacgcatgctcttaatgaatgcagagatcgtatcgtagtggttatccccgtcatgatcgtagcgaaccacccgtttctggatacattccgccgcgacatcgatcgtgatatggatctttccgtcctccgacttgtccgtcgtaagaattccgagctcgaccgcatttaacgccgctctcgcgtccccgtttgccacatccgcaaggaaatccgccgcctcatccgtgatatcggctccataagttcccattcctttttccgtatcatagacagcccggattaccagttcccggatatcctgcttttccagcggttttaactcgaagatcctggatctggaaagaagcgcgttgttcacctcaaaatatggattctccgtcgtcgctccgatcagcgtgatcgtcccgtcctccacgaacggcaggagataatcctgctgcgacttattaaagcgatggatctcatccacgaaaaggatcgtcttctgtccgtacatgccgatcgcatccttcgcatttttcacgatctcttccatatctttttttccggcgaccgtggcgttgatctgctcaaaacgcgcactcgtcgtatgcgcgatcacctttgcgagcgtcgtctttcctgttccgggcggtccgtaaaagatcaccgatcccagcttgtccgccttgatcgcacggtaaaggagtttatcctttccgataatatgtttctgaccgaccacctcgtccagagtcgtcgggcgcattctggacgcgaggggcgattccttctccatcgtattttgtctcatataatcaaataaatccatgaaaactgcctttcccgagtgttttaatcgaccatcagttcgtctactgtaacaaaagtataccctttcgccgtaaggttgtcaatgatccggagcgcagcttccacggacgtccggaactcatcatgcatcaggatgatgtccccgtcctccgtatcttttaagacttttgcggtcactttttccgtgttcttcagacgccagtcgatggaatcgacatcccagaataccggtatcatgtccaccgcctcctccagcttcgcattccagcttccgtatggcgggcgaacgtactccggcatgactccggtcactgcccggatcttctccccggtttcacagatttcttttttggcatccgaaagcggttctttcgtgagatccttatgtgtcatacaatggacaccgatcagatggccatcctccgccatctgctttacgagatcttcctttccgtcgatgcactcgccgacaagaaaaaaggatgcacggatcccgcgttccctgagaccgtccaggagcggttttgtgtatctggaattcggaccatcatcgaatgtgagcgccacgtattttctcatatcggtctccttctcccgtaccatgtccgattccctcgacatgacgttcctgtcttttcgatcttcctgctcccctgactcattttcctctttatttctttcatgatacaagtctcccttaaaatccttttccacaccttctcctttccacatccgcaaggtcacaccgcacaggatcagatccacaactacgatcaccagaaacagaacgattttctgtctgaatttcattgatacctcctgcctatttgttttcccatctcattttataaatatatgcgcatgatcgttttcctttcctctcccaaagagaaatacacatgacactcccaaacagacagaacccctgaaacagcgatattggggatcgtctgcctcaggggttctgcgctcaatatgtatcatcttttcccttatggggatcacggccggaaatgcggattttttcgctgtggcgaggcagcgggcccttcggccttccatttctcctgcgggcatccattccgcagaaaaaccggtctttatcacatccaccacgatgtgaatctatcaaagtgggggaatctgcaaattcaagcagacaactttgtagctttcaaaagccggacgtcgttgtccaagtgggtgggctcgggatccctgtgagtggatcccgggtccggaaaaggatgggtacaataactaaaaattagtttgtttatctttctttttgtttttgtgtttttattataggccatacttcatagaatgtcaatcattatttcaaactttttgtgtgaaaaaatgttatataattgacaaacagtttgttatatggtattctgaaaccagttaaacatttcaggggtttgttcgcctctgatttgttaatattttcacgtagtgttccggcaacgcatttcggggggggggggaatgcctgatccggtatctgtctccatggaggtgcatttatggaaatttccaagtatcttgatttcgactttttgatccgttttctggaaggtctccaaaaatttctcggtgaaaacagtgagatcttaattcacgactaccggaaaggttacgatcacacgatcgtctatgccctgaatgccgcgctcagcggacgcgatgtcggcggttctccgaagggtggaatgatcacacagttcggaaaagatatcgaaccgatgaaggaaagtctccagaccttctcaaacggtcagaaagatcagttttacaaatccttcacgaccctgatcccggatgagaacggcaagatcatcggagctgtctgcgtaaatctcgatgtctccgactttttaaatgcccagcgtgcgctccatgcgttcgtccagtatccgatgacccaccatgcaccgatgagcgacaaagacgcgcttgcgaccaagaatgtggacgatatccttcagtattatatgaatcaggcagaactcctcgtcggaaagccgatgggactcatgaacaaagaagaaaagatccgcgccctggattatctcgaccagaagggtgtcttcaagatctccaagacgagcgtactcctctgtgagacgctgaaggtttcaaaatacacgctttacaattatcttgaggaggcgagaagcagccgcggagataaggagagcgaagagtaatctcctgtcaacggatattcgcgatccattctcgctgcctgctcatcactgctgcattgaaaacgcagggtgaactttttcattccagataaatcttttttgtcaaaaggagtacagccatcttatccggggctgtactcctttttttactctttttcatctaagaaccttgaagcactcctatctgccaataccaggacttaagcgcagtatataaacgagtttctctgtttttatccgattacaaaattccagaattaactttttaggtttaattgaatattccatcgggattccgcctctgccctcttattttcagaaatatcagcagcgattctttaataagccgccttaaagatcccgatgatctgctcttttgtcgcctttctcgggttggtcacgctgcagacatccttcatggcattctcagccataaccgggaagtcctcctcctttacaccgagatcacgcaggcgctccgggatgccgacctggctgctgagctgacggatcgcagcgatcgctttccttgccgcatccatggtcgataagttttccgtaatctcacccatggcctttgcgatgtcgcggaagcggttcgcattgccgatcaggttgaactcttccacatgcgggagaaggatcgcgttgcagacaccgtgcgggagattgtacataccgccgagctgatgtgccatcgcatggacatatccgagggatgcgttattgaatgcgatacctgcgagatactgtccgtaagccatcttgtcgcgggccttcatgtaaactccgtttgcaactgctttcgggagatactgggtgatcatcgtgatcgacatcagcgctgccgcatcggtcagaggatttgcgtttgtggagacatacgcctcgatcgcatgggtcagggcgtccattccggttgctgctgtcagggccggcggcattccgaccataaggttcgggtcgttgatcgcgatctgcggagtcacgcgccagtcaacgatcgccatctttacatgccggcttgtatcggtgatgatacagaaacgagtgatctcagaagcagttccggctgttgtgttgactgcgatcatcgggcataacggattgctggagcggtcgacaccttcgtaatctctgatgtttcctccgtttgaggcaaccagggcgatcgccttcgcacagtcgtgggaggaaccaccgccgagggagatgatcgaatcacatccgttctcccggaagacctgtaatccggcttccacattcacatctttcgggttcggctccactccgccgaatacggtgctctcgacaccggcgtcggaaaggatcgtctggatattttctgccataccgttctttgcgagaaaggcgtccgtcacgatcagcgctttctttccgccaaggctctgcattaaggagccggtctcttttacggaatcttcaccaaataagtttcttgtaggtaaaaaataataagttgttgccataatagatacctctctttccaacgattggaggaatactttttgtttgattactaaaagtttgtttgtattcctttttgttttgctctgacgtcatactatcacggacatatgtctttgtcaagaagatttccaaactttttgtttgttattttattgtcgcattacattttgtttggttcttatcaaacaatctgtctcttttgctttcgggatcctgtcgatctgcacacgaaatcccgagattgacgaacccaaaagttgccgctataatagcgttaatttaaaatgtcttatcgcatatccggcttcatttaccgattcgatgaaaggaagggatttcccatgttcagcaaacgcgaatacgaatacgtgatggaaattgccaaagaaggcagcttttcaaaggcggcgcagaatctttatatctcccagccggccctcagcggagcgatcaagaagattgagaaggagctttacggcatcccgctcttcgaccgcacggtgactccggtcgccctgacaccgggcggacagtattatctggaacagaccagaaaaatctatgagctgagcaacgagatcgaccagcatttcgcaaagctcgccggaatccgcagcggcgtcatcaacatcggaagttccggatatttctgcgcttattttctcccggagatcatccgcggctaccggagactcaacccgaaatgccagatcaacgtgaccgagacggatgcttccggaatggatggtgggctgcggtccggcgagttcgacattacgatcgatgtggaggagctcgactccgagatgtttgagagcatggttctcgactatgaatatatgatcatggcgatcccggcttcttttccggtcaatgaggagttgggatcgtatcagatttccagagagtccattttaaaccgcagttttctcgacgaggaggtcccggctgtcgatctttcccttgtcgcgaaggagccgtttctgatgctcaagaaaaatcatgactcctaccggcgcagcatgagtatctgtgagcacgccggatttgaaccaaacgcagtcatgtacttcgaccagctccagaccgcctacaatgtcgcgagaagcggccagaccggcatcatctttttccgcgatacgctgttgaaatatacggaaaaaacagaaaagctctgctactataagatcgatgatcctctcgcaagacgcccgatcctgctctccatgaaacgctatccaggtgtcggaccgaccgtcgatgattttatcaaatatatcatgttgtcgaaaaaatagcccaaaacaagtgaaaacacgcttcgcgagtttccccttgttatcgcggcagtcgccaaggtctcgcgcaagcgcggactttggctcgttgttcgcgtaaattaaacaatacatccggaacagggattttgcctcctgccattgcacccctggtttccggatgtatttttttatctttataagcgttccgtgatcactgataccctataagcatttgcttatacatccatatctgaaagcgagttggaagattttttccacacgtgataaagtaagctcagaaagagaaaagaacatttcaaaccaaagaacacttcaaaaagcaaggaggattccatatgagactagcaaccatcaaaacaaacggaagcgaaaaagccggcatcgtattatcaggcggtgttctcccgatcgaagcactgaatgcagcaaagggaaccgcatgggcggaggacatgatgagcctcatccagaaacagcagatcccgggacttaccaaatggtacaacgaaggcggcaaagatgagcttgcagcaattccgggactcgttccaaacgcagatgtcgtatacggaccgctctaccgcaatccgaaacgcatcttcggaatcggtctcaactatctcgaccatgccggagacatcggctccgcagcaccgaaaggattcccgggaagcttcttcaaaatggccgacacactcatcggacctggcgatgagatccagcttccgaaattaaaagaagcacagaagacaaccgctgaggctgagctcggaatcatcatgggcaaggattgcagagatgtctccgaagagaactggcaggatgccatcgtcggatacacaacgatcctcgacatgactgaggagtcgatcctgaaaggaaatgattatgtaagcggaaacccgagatacttaacgatcgtcaagaacttcccgactttcttctccttcggaccgcagctcgtaacaccggatgaggttccggatgtcctgaaactgaatgtacagagcattcataacggcgaagttcatgcggaaaacgtggtcgcaaatatgacacatcgcccggcgcgcctcgtttccttgcacagcagcatccagggctggtatgcaggtgacattctctccacaggaacaccgagagcattccacatccaggacggcgatatcgcagaatgccgcatcacaggtccggacggattcgagatggagccgcttgtaaatccggtcgttgacctgaaaaagcatccggagaaggaagcttaaaacttccgaaaaccatcagatcatacatagtcattttaagagtctgtaactgttccgtatctttgcagctgcaaggaaaaatccattccagagcggctgagccggtaggatttgatctgcagttttattctttattgcagtctgcacagcaaatgcaaagacctgctgaatagttacattcatatgtaattacgaaaatcacaaacttatcggaggtatttatcatggaattaggtttaaaaggaaaagttgttctttgtatggcatctgctgccggacttggaaagggaatcgcgaccgagatggcaagagaaggtgcaaaagtgatgctctgcaccgcagaaccgtttaaggatcagctcctcgaagcacaggctgagatcgaaaaagagaccggaaaccgtccggagactttcctctgcgatgtcaacaaagcagaagatatcgaagctcttgtaaaacacaccgaagaaacgctcggcgatatctacgctctcgtcaacatgtgtccgggtccaaagccgggtccattcgagaacttcgatgacgcagcatggacaaacgcattcaacatgtgcctgctctcctatgtgagaacgatccgtgcggtacttccgtccatgaaacgtcttggaggcggccgcatcgtaaactccacttcctcttccgtcaaggactgcctcgacaacctgatcctctccaacaccatgagaatgggcgttgtcggcatgacaaagacactcgcaagagaagtcggaaaagacaatatcctgatcaatgtcatcggaccgggccgtatcggaactgcaagaatcgagagcttaaacaagatgcgtgcagataaagccggaatcagcgtatccgactacgagaaggaggatctcaagaaattcccgatgggacgctacggcacgatcgacgagtacggccgtcttgcaacatggctctgctccgaagcgaatacttatgtatccggtcagacaattcttctggacggtgcaatgacaactgcttattgatatcggaggtatgatcctatgaacaaattattcgcaaaaagaatggacgagctcgctccgtccggaatcagaaaagtaaatgagaaagcacttgccatggagcgcgccggtgagactgtcatccacttcgagcttggacgtccagattttgacactccggagtacatcaaaaaggcatgtatcgctgatatcgaaaaaggcgacgtattctacacctccaactttggaaccatggagcttcgtgaggcgatcgcgtggaagttaaagacccagaacaacatcgactacaaaccgtccgagatcatcgtcagcgttggtctttccgaggccgtattcgatgtcatgaccgcgattctcgatgaaggcgatgagatcctcgttccgaatccgggctggttaaactacttaaatgttccgaagcttctcggtgcaactccgatcacctacacgctgaaagaggtgaatgactaccagatcgatctcgacgagatccgcacgaaaataactccgcgcacaaaagccatggtcctcatcactccgagcaacccgaccggcggcgttctggcggaaaatgttttaaaagaactcgctgagatcgccatcaaaaacgatatcatggtcatctccgatgaagtttacgagagacttttatacgatgatgcaaaacacatcagcatcgcttccctgccgggcatgaaggagcgcacgatcaccttaaacggcttctccaaggcatattccatgaccggatggcgtctcggatacgctgcctgcaatgaggacatcgttaaaacagtcaataagctgcaccagcatgtcgttacctgcgcgacctctttcgttcagaaagccggtgttgtcgcactccgcgaggagaaagaggaagtcaacgacatggtaaaagaataccagagacgccgcgattacgcagttaaagccatcaatgagatcaacggtttgagctgccgctgcccgaaaggtgcattctatatcttcatcaacatcgagaaactcggcatgaccggacaggagtttgcaccgctgctgcttgagaacgccaaagttgccatggtcccgggcgatgtgttcggaaccgagggcgatcactatatccggatgtcctttgcaaacagctacgagaatatcgtggagggatgcaaacggctgaaagagtttgttgagaagctgcgcagcaactaggacggaacgaatgcttaaccggtaaacaaaacaggatttctttcttggcaccacaggaaagaaatcctgacaaatcattgataatattctactttcgataccccctactttgcaggacatactgtcggcggcttctgcggatggccgacagcatttcccattctttatcagaatgcatatcacagtcatatctttctcttgcttctgtcttactctcccatacagtaaaacgtaaactctccctctgccagcaccttcccggtctccgactccatcacctgggatttcgtgaagcagacggtctttcctcgcttcgtgatctttgcgactccgcggagctccttcgcgctgctgccgcggaggaaccggaacgaactgtccagtgtcacgtattttcttccgtcatttctcgtcacaagtcccgccgcgatctccgccatcacaaacgtcagcccaccgtggactgtctgcatggcatttaaggaatcctccgtgacctccgcacacacttcggctgcgtcctcggacaaagcgactgcgcggatgttattatggatcataaatggattggtgcggtttacgcgctccatctgttctacgaatgcttcttttggctgtttttctgtctccatcttattcctcctgctgctctcttcgtatttttatgctgaatgacatgatctcatctatttcgtacaattcgccgcatcgatcgcgatcgccagcatgagcgccatgatctcatccttcggatccacgatgtcgatcacataggtatcgccccattgaaacggcttttttgaaatatggaccgccacacagcacgcctcatagacatcatattcccacgccagaaagtctccctcacaccgccatccgttgtaatccaactcatagcgcggcttgaaaaaggaaaattctttctggacacttccggcctcttttcctccgatttcgatatcaaaacacggcaaaaccgcaaacagccgctgtttcaccatgccaacttcctttccactcttatcatacacgtggatctgatgccccagcgcaaaaaattccgcttttacgaaatactttgggctctcatgttcatcatagacgtcgtaagtatcggtccatgagaagactctttgtttgatcagtaactgcatagcggcctcctttccgactatctgtttgcatcccatcttgcaaacacttcctccaccgccgccagatactccggcacatgttgtgatttgcgaatctttttggcgagtttttcgctgtccggcacttctgccagcatgtagctccagagatctttcatccggaacagaagattccggtcgccggacatggtctcgcggtagtgttcaaagagggcgtcatggaactcgcgaatccgcggcaggatatcggcttccggctccgtctcttcctgcaagatcatctccgccaacgccggattccggatcagtccacgcccgatcatgaccgtcccgactgttggaaacttttcccgaaattcttttaccttctccacggtaaacagatccccgttatacacgaccggattcctgctctccttcaaaatgtccgtaaacacatcgagatgcggggttcccttataaaattccttctggatccggggatggaccgtcagttcgtggatcgggtagcggttataaacctgcatgagttccggccattcttccacctcgttcttcccgatccgggtctttatcgaaacaagaaattcaccattccgcaccgcagcatccgaaaacacctcatcaaaaaagcggtccagatcatccgggtagagaagaaatcccgaccctttcttctttgccgtgaccgttccggacggacacccgagattcagattgatctcccggtatcccatctccaaaagtttcttcgatgcaagaagaaaatcccctgccctgtttgtcaggatctgcggaacgaccggtaccccggcattgttttccggcaatacatcccgcatctccttcacactcatcccctgttccggtcccggcgccagaaacggggtaaaatatttctccacaccgccaaaatatttgtggtgcagatttctgtatggataggttgtgatcccctcaagcggggcaaaatagatatgcatgtcttatgttcctcgtatcgttcgtttgatttttcattatcgtaccacattttattgctacaggcaaatttctctccatttctctggaaaacctgtcccatttccactatactataggtacacggaaagatcatctttccgctaccacagcactttccttctgcggacctttcctgagcaacctccgcagaactgttatggcaacatgcgcttggcttgaatatttttggaggtgtttacgatatgacagatttaagtattcatgaattatcccttggattcgctcacgataaacagatgctgaccgattttctcgcaaagcatcatttaaattatgaggatgatatcgaggcggcattcggcgtgttcgatgccgatgagaatctgaccggctgcggatgctgtgccgggaatcttttgaaatgttttgcggtcgatgaaagtctgcgcgggcagaatgcgctcggaagtcttgtctcccgccttgttgaaaaccgctttgcctccggtcattacgatctttttgtcatcacccggccgaaaaataaggtactctttacctcctgcggcttctatccgttagcggagacagagtccgttctgatgctggaaaacaagaaaaatggactcgacaatttctataaaaagtttcttgccggaaccgaagattccgacaacatcggctgcatcgtcatgaactgcaatccgttcacaaaaggccatcttgcactgatcacctacgcggccagagcctgcgacctgctccacatcttcgtggtcgaggaaaaccgctcccagttcccgtttgcggaccgcctgcgccttgtccgtgaaggaaccgaccaccttgcgaacgtcatcgttcatccgtccggcccatatatgatctccaatgcgaccttcccgacctatttcttaaaggaaggcgaagacgccgcaaagatccagagtgagctcgatatcaccctgttcgcctcccggatcgcaccgcttcttcatattaaaaaacgctttgcaggggaagaaccgttcgatccggtgacgagaaattataatgaagccatgatccggatcctgccgcgctatgggatctccttcataaagatcgaccggatcacaacggaaggtccggatggaaagccggaagtcatcagcgcttcccgcgtccgcaagctcctcgccgaacagggtgtgacagacgaagtgctctccctggtgccggaatgtactgcgaagtatctgaaagaaaagttttctgctgaaagtacgcactaaggcaggaatccatgtaaagcggacattcgcaatccgcttcgctacttgctcatgaacgcagtcgcttcgcgatctgtcagtgggagctttcaactcccactgacataagcatcccactcacccaccgcttagtgctccgcgcacttgaagcaggggaatgcttatctgcgttcaaatcggctacgcagacgggatttttaccttcagacctactgaacagttacttcttttacaacatgggaggtatccatgaacctgactgacgtgatcaccggcactccggtgacttccgaagaactccgcgccgcgagagaccggcgtgtactggaaaagtgggagctgctctccgcaggagacggctcctgccttgtggaattttccctgaatattgctggagcggtgaaagtgtttcctttcgccaggaccgcgtttcgcgaggaactccgggaattgcaggaaaagctcggccgcttctccataaaaagtacaaagatctgtgaagagccaaccggcgatcacgccttttttctcctggattccccggaaatcccggtcaaacagtttctcgtctccatcgaggagagtcatccgctcggccgtctcttcaatctcgatgtgtgcgggctgggcggagtttccgtaaaacggcaggatcttcatctccttccccgcacctgtctggtgtgcggagggaatgcgaatatctgccaggcaaaaaaacgacattccatggaactcattcagtggcagacagccagactctttaacgatcatttcagggaccgctcggcagatcttgccgcctccgcagcggtccgcggactgctctacgaagtctccacgaccccgaaaccgggacttgtggaccggaacaactccggttcgcattcggatatggacttttttacatttctggacagcagcgcttccctgatcccatggttccgggaatttttctgtctcgggtgggaccatgcagacgaggcggacgaacagatctttgagcggctccgctatgccgggcagcgcgcggagaccgccatgttctccgccacgcacgggatcaacacccacaaaggtcttgtcttcgcctctgcgatcctctgcggggcgctgggaaaagtccatgcaggaaagagtctgccgcttccggccggtgaagttctcagcgaatgcaggaagcttggaagctgttccctcggtgatctggcaaaactttccaggcatcagaacaagctgtcccacgcttcttccattgatgtgaactcgcaggatagccggggttctatgccgatggacaccaaaaatcatcccacacaagctgaaccatccgccttgtcgaacggcgagcgcatcttctcctcctacggcatccagggtgccagaggtgaggctgctgccggtttcccttccgctgtcctgatcggacttccggcactcaaaaaatggcttgccgccggtttttccttaaacgatgcggccgccatggcactcctcaccctgatctcggaggtcgatgacaccaacatggtgcaccgcggcggtccggagctcgcaaaaaaaagcaaagagcaggcaaaacacctgctctctgctgtcacgaatgattcatttaaagaaatattgtcttcactggacgaacagtacatcgccatgcacttaagtcccggcggatgtgctgatctcctggccgtcagcctgatgttccattttctggaaacatgcgggatgatcagccctgttatttcatcgtcacttccacaccgtcgtcatccgtccatgtgatctcgtaggtgtccgctgtgtaagtgaatccctggatctccaccgatgtagtgtcgatcttctttaaggaaaccgtaaaatccgtgcagtcatccgtgtcctctcccacatattcgtagaggagactgtccggatcattcggtttcttcatcagatctcccgaaatcgctgacagacgatccagactgagtgttccggaaagaccgtactccgcctcgcaaatcttcagtgcctccgcgatccggtgtcccttttcataagctaccgcactctttgcgcgctccacatatccattgtagactccgatgctcacagatgcaaggatcaccatgatgacgatgactaccatcagttccaccagggaatatccgccctgatctttcttctttcgttctctgaagtttctgaaatcccatattttcttcgtcatactctgcccctgctttctctctgcccggagcaatccgatgacgcgcctattctgttgtcacaaaacctgctttttcatgttctcgccccggttgatcttcatcgttacagcttgtttataacatatggtcatgccgcgttctattgtccgaattctgtcaatcatttcgattccagcactgccatcgcaatcttttccggtttgatcggcagctcataaaatcttgtccctgttgcattgtagatcgcgtccgcaactgccgggagcggggtgttgatcacgacttcaccgatcgatttcgcgccgaacggtccctcattctcatagctcgactcaaaatcgacccggatctttccgatatccacacgggtcgggatcttatactgcatcagggaattttccgcgagctttccaagtttattataggtaatattttccgtgagcgccattccgatcccctgcaggatcccgccttccgcctggactctcgcaagattcgggttcaccggcgttccgcagtcgacggcggcggcataatcgatgaccttcgcctcacctgtctcaagatccacctcgacctccgcagctccgaccataaacggcggcggagagatcggggaactgttcgtcacggtcgcctcgagagcgatcccgtttccacacatggaggcggtggcgatatccgcaagggaaacctgctgtttttctgctgagcctaaattctcaacattttccggctgcggatttgaattctctcgttcgtccacgacatggattcctgccgctttttccggatcgaccgcactttttttctctctccgtacaaccttcccgtcaaacacgacctcattctccgggcagttcatcatctgtgcaccgagtttgcagatctgttcccgaacctgcagtgcacacttttcaaccgcttttcccgtgacatacgtcgtactggacgcgtaggaaccggaatcatacggcgaagtatccgtgtccgcgccgaacaccgtgatctcatcgacagagcactcgagaacctccgccgcgatctgcgccaggatcgtatcacagccggttcccatatcggctgcaccgatcgacagcgtgtagaatccgtcgtcgttcaccttgatcgtggcacttcccacatcgacggacgaaataccggatccctgcatcgccattcccatgccgaccgcgcggacctttccgttgcccatatcgcgaaccggatatttttcgtcccagtggatcatctctttcacacgcgcaagacagcgatcaagcgcacagctcgtattgacctgaccgtaataggccggcatcacgtcgccctctttgatgatgttcttctcgcggatctcaaacggatccatgtgaagcttcgcggcaagttcgttcaccgcggactccaccgcgaacagtccctgtgtcgccccgtatccacggtacgccccggcagacatcacgttcgtgtatacaacatcactcacaaaccggaatgccttcgccttcccgtagagcgggatggatttatgcccggaaagcccgaccgttgtgggaccatgttccccgtaagcgcccgtgttggacagcgtgtacatgtcgatgccgttgacgatcccgtccttacttgcaccgagacgcacgtggacttccatctcatggcgcggtgtagaggcggtcatgctctcctcgcgggtaaagatgatctttgacggtttctttgtcatccaggtcacataagccggataaacctcgctgatcgatgtctgcttcgcaccgaatccgcctccgatcctcggcttgctgacgcggatcatggacttcgggatatggagcgcattggcgatgatccggcggcagtggaatacgatctgggtggagctgaccacgttgaggcgtccgtaagcgtcgatcgtacagaacgtccggaatgtctccatcatcgtctgctgacatgcctttgtgtgatagacatggtcgatcacaacatcgctctccctcaatactttctcgatatctccctctcccgattcgtcatgggcgcacagatttctcttattgtccgccccgaccggaacaagactctcccagttgtcctccggatgcaccaggatcctgttgtccttcgccttcctgaaatcaaggagcggttccaggacctcgtactggactttgatgagctttaatgcccggtccacacatttttcatcgcgaccggcaacgatcgcgaccacatccccgacgtagcggacatgccggtcaagcaagagtctgtcatacggactcatctccggatatgtctgtcctgcctgcgtgtaccgcttcgcgtcctgcgggatatcttcccaggtatagatcgcctcgatcccgtccactttcatcgcagccgtcttattcaaggaagtcacgatcgcgttcgcatgcggggagcgcaggagttttacgatcaggcagtccttcggagcgatatcgtccatgtatacaggctgtccggtcacaagctgcatcgcgtcctttttccggacaggtttatttacatatttcataactttcgtcctctttctgtatttgtaacagtctcacatcatttgttctgcgtgttgtcacggtccgaccgtcacacgcgcgcctcaccggaccgtcacccgttcttttctttcttccatgcgagaaatgcctggataccgcgaagctgtccctcgtagccggagcagcggcataagttgcccgccagatattccttgatttcctccgtatccggatattcgttttcccggaacagcgccagcgcgttcataatgaagccaggattgcagaatccgcactgctcggcgccctgatccgcgataaaagcgccgaattccttcgcttcgtcctgaagtccttccagcgtcgtcacacttcttccatctgcccgcgccgcaagaacggagcaggaaagcaccggcttttcatctaaaaataccgtgcagagcccgcagttcgacgtctcacatccgcgctttacactgtaacagccgtgattccgcacaaaatcgatcagaagaaggtctgcgtcgatctcctccgagatcttttttccatttaatgttatcgtgatgttcatgtatgattcctcgtttttatctgtttccagtttctttatgctccataacggactgagtttctttcagtcagacaaagctttcttctttcaaaccattcttcatccgtctgttcttattcccccaacttacataccgcccgtctcaccagcaccccggccagatggttccggtactccgcgcttcctctcgtgttggagccggtcacgatctgttcctttacacacttggcagcatactccgcgatgttttccacatttttgtccttcatatcctcattggacagctcaaagagaaccgcttttcccggtcttgccccgatcgcgaactggtatccggcttctgtctttgccgcggcacaggtgaggaccggaaaatcggtctgcgtgttgcggacggactggtaatcaaacgatgccgcttctttttttacgatcagccggaccaggatgtcccggtcatacggcatttttgcgtactctctcaacggaatgatcccgcctttgtaaagctccacatagctgtccatcgccagaaacatcgtcagcacgtcggaaaatccgtatcttccgtaaatacttcctccgaccgtcgcgagattccggaactggacgccgacgatgtggcgcaccgactcccgcacagcgccgtccgtatacccgttaagtcctgaatcaagttccagatctctcaatgtgaccatgcagccgatccggaattcatcctccgtctcctcgatcgtgtcaagtccgagcccggacaggtcgatcgccgtaccgatcggcatctttcccatcttcagccagaccatgccgcccaggacccggttgctctttttctggtttaactgccatgcctcttccaggctttccgcttttttatattccctgatgactctcataccattgctcctcatgatccctcagaatatgcagttgttcccgccttttcctgctctcaaaaaagtccggatccctgtattctgaagcgttcttcaaaaattacttttattttaacatactttctgctataattccgttgtagttggaaaaatacaacgatattccag

SEQ ID NO: 2067 - DNA, 29205 bp, Unknown
  gut microbiota DNA sequence
caaacagctctccgctctgctcttagctctcgcattatctgtgagcgtaactgcatgtggaagcaacaccgcatcaacaacaactgctgccgctgagacgaccgcagaatccaccgaagcagcttctgaatccgcttctgagacttccgaggccgctgcctccgacatggaagtcacctatccggttaccatcaccgaccatctcggccgtgaggttacaattgagaagcagccggaatcctttgtcagcggctactatatctccacaagcctgatgatcgcgcttggtcttgacgacaagttagtcggcgtcgaggcaaaagcggacaagagaaatatctataaactcagcgctccggagctcacaagtcttccgtccgtcggaactgcaaaagagttcgatctggaaggctgcgcagcattaaagccggatcttgtaattgttcctgtgaaattaaaggattccatcccggcaatggaagagctcggtctcaccgtgatcgctgtcaatccggaggatgacgcaaagctgatggagacgatcgacatgatctccaccgcagcaaacgtagtagaaaaaggacagacactcgaatactggatctctgataccaccgcagagcttgtccagtctctcgagggaaaagaaactccgtccgtatatcttgcaggaaacagcgctctgttacagactgctggtccggaaatgtaccagtccactctgatcgagcatgcaggcggcatcaatgcagcttctgagatcacagatacctactgggctgatacttcctacgagcagatcctttcctggaacccggattacatcattctcgcagctgatgcagactacgatgtggactccgttctgaacgattccgctcttgctgactgcacagccgtaaaagaaggacatgtttaccagatcccgagcgacatcgaggcactcgattccccggttccggcaagctttttaggaagctgctacgtcgcttccgttcttcacccggacgttgtaactgaagacgatttcaagacagcagagaagaatttctatgaaacattctatggattcactccggaaagtgcaaactaactccaaccgaaccatgacaaccttaacactggcgatgacttttgtggtcatcgcctttgtttctgccctgagtaccggaaaatatccgatcacattatctggcctggctgccggggatccgatggcgctccgtaccttcacggttctccgcctgccgcgcgctgtcatgggactcatcggcggatttgggcttgggatcgcaggattcgtctaccagacggtcttccggaatccgctggcatcccccgacatcatcggtgtctcctccggagccagtgccggtgcggctttcgcgatcctgttcgtctccgccgccacgccgtccacaacgctcttcgcatttttcggtgctcttctcgccgtctgcctttccctcgggctcaccgctctctccccggtccgggaccattcttccatcgttctcgcggggatcgcggtccatgctctcgcacagaccgttctcatgctcttaaaacttatggcagatccggaaaaacagctcgcctcgatcgaatactggatcatgggaagtctctccggcgtcacctcatcaaagatcccgtttccggtcgcgatcatcctgagctcctccgcgctggtcttcctgctccaccgccatcttctggcactctcggtccgtgaggatgaggcccgcatgctcggcgtatccgtccggataacacgttttttcattctttttctcgccacactcaccgtcgcagccgccgtcagtgtgaccggactcatcagcttcgtcggtcttctcgctccgcacacagcaagacttctgaccgggcataaccggaagtccgcatgctttctcagcggtctcatcgggagtttcctgctcctgaccgcggatattcttgcaaagtcactcgccgcagtggagcttcctgtcagtatctttacctcgctcctcggagcgccgtttttgatctatctgatcctctcggaaaggaggcgctgatcattatgtctgaatatttttccattcaggacctctccgtctctatgggtggtcatcagatcctggatcatctttcccttccggttgaaaatcccgggcatatgatcgcacttctcggaccgaacgggagcggaaagactacccttttgcgggccatatgcggagagctttcccacagcggccatgttctcctgaacgggcaggacctcacagctctctctccaaaagctctcgcaggactcgtaagttatattccgcagcagagcgggatctccatttccatgagtgcgctggatgtcgtgctcatgggattttactcccggttgaaactcttcgaacagccgtctgccaagatgcgggaggcagccctccaggcgctcgcttccgtcggaatggacgattttgcgaatcgggattacttaacactcagcggtggggaacagcagctcgtgatcctggcgagaacactcatcgaagatacttcgctcctgctctttgatgagccggacagttcgctggaccttgggaataagtaccggatgatggggctgatcgcagatattgtacatgcggctcgaggctccggtggatctgtttcccgaacttgttttttctccccagaagagggatctgaaacagataccgttctggatatgccgtatctacaatccgaaaatgcttttgcaggaaaaactgcgattctctgtctccatgacccgacactcgcactcgcgtactgtgatatcctgctgctcctgaaggacggcaggctgatccacacgctgcacccgaaaacggatcccatcgccgtcatggaacaggctttttctgatatctacggggaggtgcgcctggttccggttcctaatccatcaaattgtgcagggaatcggctgattcttctgccgattttatagcgacagtcccgtaatcctggttgcattttctatagagctgccacatgatcctgttcataggaaacctctggattttcctcctactccctgcgcaccataccactgatgtaccagaaagaaggtgatcttttcatgaaatctgacatccgcgtctttctatgtgacgatgacaacctccgcttcttcggtgaaggtccctgccgcctgctccacctgatcgaggagaccggttcgctgcgggcggcagccctctcgatggggatggcatacacaaaagcgctccatatcatgaagcgtgcggaaaagaatcttggtttttcactgaccgccagaacgatcggcggaaaaggcggcggcgggagtgtcctgacaccggaagcaaaggagtttttacatgattatgaaacctggcggaacgcctgcattcagagcagccgcgacctctatactcaagtcctttctaaatacaacagaaacagcagtggagcgaaaggcggaagtgaactttctgaaagttgatatcgatccgattctggcaaaaaaacgtcatctgatcatcaccggaagccgcagaagtgggaagagcacactgctgcgggaaattctgacattgccggattttccggctgatacgatttccagtgaaatatctgaaagtctccggaatcctgtctccgccgactcctctctgcccggatcctgccggccggtgtttcacggattgggaagacatatttcagacattccgtttttgcctggtcaagccgaatcccgcctgcagatgtttcccggctttacaacacatgctttcaaacaggaccgcgttgagctgactgacaatctgaccggagaaacctcgcggatcggaatttaccgtccaaagttctctttccatgcctttccggcagattctgattccgggaaatcggcggcttcatccgcttcttccggcaatcagatggttccggatctcaacggttttctcggcggcggtcttgcttccataaaacgggcgatcgactctcccgccgctttcgccgtcatcgacgaactcggctaccttgaaagctcctgcccggaattctgtgatgccattttccggttattcgataaaaagcgtgtgatcgccgttctccgcagccagtccacgccgttcctcgacgccctgcgtgccagagacgatgtctatgtctatgaccttgaccatccggttctccctgtcggctgtgtgatcatggcatcgggacttgggaaacgcttcggatccaacaagctgatggccgattttaacggaaagccgctgattacccggatcctgtccgccacagacggaccgctcttcgcggcacggatcgtcgtgacgagatctccggaggtcgagtctctctgccgggagcgcgagattccggtcctgctccacacgatgccgtaccggaaccacacggtaaaactcggtctctccgcgctgttgggaaaaaatccagatctcgccggatgcatatttgcactcggggaccagccgcttctctcgcaggaaacgatcgaagcgatggtattgacatttgctgctcaagcttatcgttcgtgcggcgaaattctccggctcgcatcaatggagcatggagaggtcaaatcccccgggaacccgatcctctttgatcgccggtatttcaatgagcttctcacactcccggacaactccggaggaaatgtactcctgaaaaaatatccgcaacatgtccgttatttcccggctgcctctccgctggagcttgcagatgccgatacaccggaggaattggaatatctgaaaaatttttagaagtctctaatgttttttcttcatgtaccacaacaagtgaaaacacgcttcacgagtttccccttgttatcgcgacagtcgccagggtctcgcacaagcgcagactttggctcgttgttcgcgtaaataaaaccggagatcatccaggacatacattcatcctggatcacctccggtttctttttatcattctattatctttttatctctgacctctacaggttcttatcatccttcggaagcagcaggtttaacaggatcgcaaccagcgccgccggaacgattccggaaccgccgaagatcagctggacagcctgcggtgtctgcgcaagaattgccgtgttcgctcccattccatatccaacaccgagtgcgactgacacgatcgtcagatttctcggagtcatatgttcctttgtgatcagctggattccgctgacaacgatcgaggagaacatcatgactgcagcgcctcctaaaacagcctgcggcatgatggagatgatcgcaccaagcttcgggatcagtccgcagaggatcagaaaaactgctcctgatgccagagctgttcggtttacgatcttcgtcatcgtcacaagtcccacattctggctgaaggaagtattcggcagaattccaaataatgctgcaaaagaagaaccgattccgtcacagatcacgccgccggaaagttctttgtcggttgcctcccggtccattccgccttcaataacgccggaaatatcgccgaccgtctcaacagcggtcacgataaacatgatgatgatcggggcgatcgcacggacatcaaagaccggctttaccggaaggaattccgggatactgatccagctggcttccgccactttattccagtttaatacccatgcttttgtatattctgctccatccgcggtaatccctgaattcggaaggagcagtcccataataaccgctgccgcatatccggcaatgatcccgatgaggattgcagagttgctcgtaagacctttcgtccagtgtttcaccatgaggattacgatcagtacgaacagcgccagcagcagattttccgccgatccaaagtcttttgcactgctcccgccgccaaaagaattcactccgacagaaatcagggacagaccgatcgataaaacaacggttccggttacgaccggtggaaaaaatttccgcagcggcttgataaaagcaccgagaactccctcaaagagacctccgatgatcgacgctcccatgatcgcgccgtatgttgcaactccgccgcccattgtatctgcgacactcttaaatacgccgatgaatccggagcttgttcccatgatgatcgggacttttcctccgatcggtccgatcgcatggagctgtaccagagtcacaacccctgcgacaaacatcgcattctgcagaaggctgacctgcagatgtgcaaattcttcacttccgctgatcccacacgcaccgcagatgatcagaagcggtgtcaggttgccgacgaacatcgcaaggacgtgctggagtcctaacgggatcgcctgcttcaacggcatttttccataaaattcatagggtgcccggttggatgtgttttcttcactcatacattttctcctttacgtaaagttccggttcttctgttatcattctgccagacagtgagaccggattctttgtgttttttctgccacgatctgcggtcgggttcccatttccgcagtcttattagcagtatttatgtagtgcatcgttattataagcataagtttgaaagatgtaaatatgtaaatgaaaaaaattccatttaaaccttacaacagttgtagagtcaatgtttttattgctggtataagcactggaaaatcatgaccaaatatgctatcctaaattgatcagataccagggtcaaaaggtcggaaatctgatgcaagcttgcttgcgagaggattttcgaactcttgacccgccaaaaacatgaataagtagccatttttcgtagaaaaatgagcggattatgaatgtttttgaggattgcgggagtgcaaagcacggagcaatccggtatcatagggggcaaaagaccttttgaccccaacatctagatcatttatcacgataaccaagaaaggtttatacatatcatggaaccatactactataaccacatggaccgggaacgccaggccgtctaccgcgccatgcatcagggacttttgagtctcgctgactcatttcaggtcccgaagatcgacggtcatgcgctgagcgacatcttctttgaactccgcctggaccacccggaactcttctgggccgcaagcttcaaatataaatattacgcagactctcccaatctgatctttattccggaatatctctttgaaaagagcaagatcaaagatcatcagaaagcgatgaacgcgcgggtagaaaaacttgcccgtccggctgcaaagctttccgaaatcgagaaagaaaaatatatccacgatttcatctgtgaaaacattcattacgataagctgaaaaagccgtactcccacgagatcatcggtcccctcggacacggcgtcggcgtctgtgagggaattgccaaatccgtcaagatcctctgtgatgctctgggaatctggtgcatgatcgccctgtgcgggaataatccggaaaaaggcatcaaataccgtcatacctggaatatcgtaaagatcggaaaaacttattatcacctcgatgcaaccttcgacaacagcctcggaaaatgcttcgagaccggtgcggaaatccggtatgactactttaatctcgatgataaagccatcttccgtgaccatgaaccgctgattgccccggctccggcctgcaccgacggcgatcatttttactacaaggagaaaaaactctccttcacaaaacaggaggaagtctacaaacgtgccctgcagactgcgaagaaaaacaggaccttcaccttccactggcgaggcggctatctgacccgcgaagtcttaaaagagctgatcgaactcattgaaaaagccggaaccgagcagaataagaccgcccacatccagctaaactggccccaggctgtactcagatttcactacactgatgatatttcacaggctgtcgtcacgatggacgaggcaaatgaaggggaagatggtaccatgttatctgacatataagttatcacataatctctactttcttgctaatatcccgcgcaatattagcaagaaaatacactacaaaaaccgcccgctgccagcaacttcactggcaacaggcggttttcgcatacctacatatgaaatttttattttcccatgctctccaacagctgtccgatcttcgagacgaagaggtcgaacgccacatcgttctttccgctgttgatcacgatatccgcgagagctctcgtcggctcaacgtacatgtagtgcatcggttttacggttgtcaggtactggctgataatgcctctcaagtctctgccgcgctcttccacgtcacggacgatccgtcttaaaattcgttcatccgcatcggcctccacatataccttgatgtccagaagatcccggatgcgctcatccgcaaggagcaggatcccttccaccagaatgatcggccgcggctcgatctttatgatctcgtttgagcggttgtgctggctgtaatcatagaccggacattcgatcgctctgccgtccttcaattccttcaaatgctccaccagaagatccgtctccaacgaatccggatggtcatagttgaccttcacacgctcttcaaacggaatcccgtcctgtctgcggtagtaattatcatgataaataactgccacatcgtccccgaaatactgtttgatcctgttcgtaaaggtcgactttccggagccggaacctccggcaattccgataataacacttttcatttctgatcacctcataaaacgaatgtacccggttcatcccgggtacactgctatcctactgcacaagaccaaattcttccggcataaatctcgggcagatattctccgaagtacagatcacggtcgctgcaagtcttgttccgatcctgcaggaatcctgcaggctctttccgtaagtcagaccgatgcagacacctgagaagaatgcatctcctgcgcctgtcgtatcgacaacatccacttttcttgccggatagatcccggtacttccgtctttatccacatagagagcgccgtccccgcccatggtcacaaccatgcgggcaatctgcgctgagcggacgcgctccggaaggacctttgcgagctccgccgctgtcatgtgttcataatcctcggaaaaaaggatcccggcttcctgctggttgcagacaaaacatgctgttctgcgcaggaagtcccgtctctcgactgcgatcgtcatgttggacacgagtgcgtagacctctttcccatacttttccgcatacgcaaatgtctttttcacgatctccttatccgtgtcgatctcgatcgcgatgctgtccgcgtccttgaagatctcgtccccatactcatcgaggatctgctcgatcggcttatgatccggtctcttggaaatggaggcgacaacatctccttcatggtcgaaaacggcaagccatgttcccattccgttctcaacctttttcatatactttgtctcaactttatggcgtttcagcttctcgatcacatcatcacccatcgcgttgttgtccacagcgctgatgaacgtcggctttaactcgatgtttgcgatattctccgccacatttcttgctactccgccatggatctgaatgaccgttccggcatttcttccctgcgggatatacggggataaggaatatcccttaatatcaataaaaacatctccgattacaacgattcccatcttatatattcttctcctttatctctagcataacgctttcacaacatctggggcagtttcccattccggactgccccagacaaaaatttttccctgatcttatctctgtcccttatcatacgggattccttccgccttcggtgctctcaacttcttcgaagaaaccgccaggaccagaagagaaatgatatacggaagcccgcgatcaggtctgtagtccgagctgcctgtattctccgtcgtcacctggttcgatccgcatccggcaagcagaaatgtcatcatggacgccgcaagaagcagcgctgcccccctttttacatttttgcatccttcttctcctccgttactcatactctttttccagtccgtgcaggaactgcacagccccgctgaacagccgctaatatatgcgctttacccagtataaaagggatttcgggaaaagtaaacaggtttcttctttctgacgaaaaaagggacagatggattttttgtccatctatcccctgcctgttccgcttttgctcccgccagacactctctgctcttccggctctgccacgcctgtgtctgttttgatttcttcgccattgtataacttcgatcacttcattgtctgatattccaattttccgttctcatagcaataatattccccgccggctacttcagaaagattgaaatggaatctttatatcattcgcaccttaagactgcaagactattgatctcccatttcccggaaaattgctcagaccacaccgcacgggcgattcttctgttagtaggagtttttacagcacatagcaatcataccgaattgccttccccttcaatgtataggaaggttctctgcctgcaagacattcacttttcaatggccgcttaacgataattcttgacggaccgacttttaatgccgcatcaaaaagatctgtttcctccgagcacggtggctccagcttctggatcagctgaagttttttattgatcaggctggatttctgtctcgcgggaaacatcggatccagatagatcacatctaccgggtccagaagctttgacatgcattccacactatctgcctccactactttcatgcggccggcgatatcctttaaaatctgattctttttcgcacgacggatggcatctttcagaagtgcagcgaccaccggattctgctcatataatgtcacctcatacccctgtgcagccagtaaaaaagcatcctctcccataccggcagtggcatcgattgctttccgcccttctttctcggagcttgccgcctttaccagcatctcatgctgcagtcttccattggtgactctatgcatcattgtctccgcaaagtccccctgataagtcagcccgaatcctgacagtgacactcccttggaatcaaaatgaatcgtcagatactctcctggcttatccatgatcggcgctcctgtttttctggaaaaagactctgccatatctctctgcccaccttttccgaggcagactacgatcttgttgttcattttattgttctctctttcgctttctagtgaacctcatttgcaactggaatactgctgatttctttcatctgccatcctaatcttttccatgtcaaaaaatgtgcgtaattataaacttcctccaaaggatctggaaaagctccaaattcaataatggagcgggattctaagaaatcccaccccaactatcgacatagaaccaccgcaacacagtgccaaagttccgccatctgtgtcaatatcagcggtccttccgatttcagcctatatgtgatcccacacgcttctagttctttgcagaacatctcaaaatagtccggctcttcccattaccgtaatatccagggaaatatattgtcatccaaccggatttctctcaggtcttctttataacttgcttccatagttctctaattcatgaaagattcccatgacatagaccgttcttatatcttcatttacccgataaatcataagctatgccatgcccggtatttttgccttccggtattccttttttcgaagcacataatcgatacatgctggaaattgccatggatcttcttccagacgatcataaatttcttcgattcccgaaagaagatgtttggctgcctgatcgcttttcaacggattcaacagataagccagcaactgatccaaatgttcagatgccttctgcgtaatttccagtttataacccatatttctccctcatagatgcaagctgctttcttgcattcatcgtctgcccagcttctatctggctctccgactcctccagctccttataaacttttgacaacttcatcatccgttcatagttttccatactcatgagcaccatgtcaccatacccatttttcgtaataaagattggttcttttgtagaatgacacatttctgaaatttctgaagtgttttttaaatgactgattggaacaatttgcggcataaaagcacctcctttatgtagtttaattgtaccataattataccatgtatgcaattttatattatttcattgggtatgtgataaacttccattgttcatttggaacgcctcctctggttttgagtttggcttgcgacatcatattgcaggaggctttatttagttgtcctcaccggctgcacttattccattctcccaagaacagctgaaagcttaagtttttcatttagatgtagagaaaaattgtttcaactcacaatccacaagaaggctgactttgagggcggcagaaaagtcgattacctgatttttgtttcaactcacagccccgcaagggggctgactattcagcgttcctataccaagccaaagtgttcgttacaatacaacgaataattttgacacaaagcaaacaatctcagttacttttttgaaaacaaaaaagcgactgaataaatcaatcgccttttttacataagcaaatatataataatgtttttcaactctcagactttcatctgacaaataacaaagggtgcagaaatatattcccgcatcctctgttaacaatagtattttattcaaactcgacaactactaatcaattttgtttagagattatttgctgttgtatttgtctttcttttgattctttgatttgtccatattatcctgcctgtataagctaatgttatcattttgttatcgctgttgataacatcgcctgaacaactgtggataatagcaatatgttccgatacagattataagaaactttgcttagaaaatcaacatgtttttaattttcgttctgtaatgttgcatcagataatctgcaatacagattgtcatctccttcttccctatacgtttcaaagattccttcaactacaatctctgcattatcttccggatactcctctggataaatatgtgtgccatctccccatacaaattccattccctgagcacaacaggcagtttcatcctgaataatgcaataaaagtaatatttttttgtagcctcgtaatatgtagcataaaaatttccatcgattcggaacatttttccttcgtattcttcaggtgtaaccatcatctggtatactgttgcatataccagctcactactcatttgcgtaaggtcgtaatcaacagttcccttcgttttttgaatatcttctgtgtcttttatagtactttcagtttccttgcttaattcgtcactcggcgatagattctcattgtccgttgttttgtctttattttcattatttatctgctcatttattatcttattaacagaatttgccgtagtgatatttttcccaccaacgctctttttattactacatcccgtcatcagtaaaatacacaagaacagcaccatatatttaatcaactttttcatgagcgtcctcctatttttccaatagcacaactaaccataaatgctacaatatcgattgccactatcgttgatcctaccggagttcctgccagaatagacagtaaaatcccaaccactgcacaaactaccgataatataacagagcatatcgtaacgctaaaaaatgtcttgtatactcgcattgccgacaatgccgggaatatcaccagtgcagaaatcagcaacgaaccgactaaattcattgcaagaacaataatcaccgctgtaataacagcaattaacagattgtaaaaatcggttttcattcccgtagcttttgcaaatgtttcatcaaatgtaacacagaaaattttataataaaatataacaaaaacaaccactacaataactgacaagacgctacataataccacctgttcttttgtcaatgtcaatatggacgttgatccaaacaatgtactacacacatctcctgaaagatttggacccgtagcgaacagattcatcagcagatagccgattgccaacgctcctaccgaaatcatagcaatcgctgcatctccttttatctttgtgttctgtcctgtccgcaataacaaaactgcacaaataaccgttacaggcaaaataaatatcatattatttgtaaaattcaaaacggatgctaccgccatagctccaaatgccacatgagataaaccatctcctatgaaagaaaaacgcttcaataccaaagtaacaccaagcaaagaagaacagagtgcgatcaacacaccaacaatcaaagcatacctcacaaatgggtactgaaaataaaaaatcaatttatcaatcaaacagtacaccttctctcatattcctgcttcgttccataaaataccttttctccaatgtgtacaatatgactggcatatttcatggctgcttttatatcgtgagaaatcataataatcgtaatcttatcttccctgtttattttttcaacaatacggtacatctcatccgttactttcggatcaagaccagataccggctcatctaataataatattttctttgttgcacatagtgctcttgcaagtaaaacccgctgttgctgtcctcctgacaattcccgatagcatcgatttgtcagatttgtaatctgtagcttttccatcatttcactcgcacgttttttctctgatcggttataaaatggtcgcatgcctacacgattctgacatccggagagaataatctctctcacggatgcaggaaaatctctttgtattatcgtctgctgtggtaaatatccgatttcatcgctctttactccagctccaaacgtgatttttccacgaatgggctgttgcaggtttagcaatgttctcatcaaggtggatttaccagatccattttctccgattatgcaaagataatctccatctttcacagaaaagttgatatcttgcagcagtacttttccatcatatccaatcgccagattttgacagataatctgttccatagctcctcctactgcaatgcctcctgcaaaacatttaagttattttccataattgaaaaataagtcgttccttttttcacatcatcagatgtcgttgactgcatagaatctaatgttaaaataccctgatttttttcttttgtattttcaataattgttttcgcaattttctggtcagccttttcgattgtcatgatattttttaatccaagttcgtctgtctttcctgctaaaaacgtaattgtttcaaagctggcttctgtctctgctgagcatccaacaaaagctgcataataacttaatccataatcatctaccatatatctgaacggaaatctatccccaaataacagtgtcttctgtgaagccgaatctactgtttcctgatacttcttatccagttcatccagtttatctgcataagccttttcattttcctgataagtattcgcattttcagtatctatttcagcaagattatcagcgattgccttgcaaagaacttttgcatttctcaaagaaagccatacatgctcgtcgtattccgcttcttcctcggctccatctttcgcctcttcttcctctgcttccatgccttcaacaacctcttcttcttttacactgcttccaagcacatctaataaatttatgactttcatatctttattaacagcttcctttaatgcatcttctacccatgcatctgactccccgccaacataaataaaaaggtcacaatcagaaattttcataatatcatccgcagtaggctgataactatgcagatctactccattgtcaagaagcatcgtaagatccatgtcagatacttcatctcctgcaatctcttttacccagtcatattctggaaatatggttgtaacaactttaacctgcttatcattattatcttttgcctgtgtattggtattggaattattttgaccgcaagcagaaagacagcatactgccataactgccgctaaaagaatagaaatattttttttcattgaataaaacctccgtttttatcttaacttttccaaaaaagggtacaaaaacaaaaaggtacacccttaggactaccctttctgctttataaaaaagttttattcaatcgtttagtcttaccttttgacttacaagagatgtatcagaaacaattaaaaactgacctgttatcaatagtgcaaacaatatcagcacaggatttatggctgcaatcgtaatcgtaccattacctgcattccttaatgtctgctctgcctgatgaatattggcacaaatcggacagtcttcgcctgtacagtaatgattttcttcttttacaatatagaaaagagaagcaaatgtaacaaatatgaataaaatgcatactgccattgaaaatactctttttttcttcgtattcatttgtttctcctttcccacaatcacactgtgtttttaattttgtgttttcttacattcactgcatattccataaaatactgtacgcagagaatccatctcaaaaccatgatgttccatcatatgttgtttcagactttccacttcattacactgcaagtgaattagctttccacatttttcacatttgcaatgatagcataccatttgattttctttttcatggctgcccatatattcaaaacaggcactgctggttccgtctacaacatatttagcaaccagaccttctccgaccattttctccagatggcgataaacagttgttgttccaatggatatcccctttttctgaaaatattcacaaatgtcatttacggtaacatggctgccttgaactgatttcaaaaaggtaagtaattcggtcatttgctttgtcttgtatggtgctttcgccaaatcaatcacctcgcttctcaatttgaaaacctttttcattttatcacataattccattttgtcaatataatttgaaaatcgttttcattttattgttgataaataagttctctattcacaatctccctcgcacatgcctgtatgttattcattcttccaacctattcccaggcattgtccgccttcaactgcttccgtaattccctgtgcctgcttcatctgctctatgatcctttcaaaacgtccatgtgcctgttcttctatatctgccagataactgttcagtctgcaactcatgagcagatcaagatatacattcctgcggtattccttcaaataccgcaaatgtctttgtccccatactccaataaatctcgattcttcttcgtccggcaaagtaaggcaggggataaaataatccccatgtctgatataagtgccacccatttcttcaaaaattgttttcttcataatctgttccacctttcttatcgctccatgtctctggatttcttctttgtccgcttcggctgctgtctgccttcctgctgatagctgtgcagttttttcagcacacttatctttgtcggtgggtctgatgtctgtttcttcttctgtgctgtctgattcttcgtccgtctgtgcttgccttgttcatcataaaacatatttctggtagcaattttcacttctggatgctccagcattttccgctcactgaatatcagatgaatgtggtaattggtcattttcttattgtgatgaagtgctgcactgcattccacatcgtatctttcacgaaagctgtctgtaaaaagtctgaccacatcatcaggctcgtactctacaaaatgctccggaagtgcaataataaattcacgcccttcaatacagtttccggttgttccgctcgccttaaaatccaattgattttctctggcaagattcttccaaaactccggcgttgctccttctgtctgataggtcgcatataaatgctcctatcgttttgaattggaaatataatcacttcttcctgccacatcggacagcttgttttgtctgataaatgaatgtctgcctataagcattctcctttccggctctcgcctgctttactgtgagtaggtgcataggcacctgtttacgaactaactgccgtttccggcataagcctcgcagagcgaaatacgctgagcataaatcgtcagatttgtgcgatgggtatatttcgctctcaaacgccgagggctttagtaagtgcttttgtcagccatagtttcctggcttatgcttttcatctcgggcgtatccgcccattttcatatgcccgtatccgggctgtttttcattctggatcactctggtattctcgcccggacatactccagatcgccgcaatacgatgttccaaccagataccattccattgcaggattcatctccattcttgtccgcacccacttatcatccacgagaacttccatacactctccacagtgaaatcctgtgtctacctataaatccattgacagcaatccatatctgccattttcacagttataacctaatcttccttctctcattgtgtggttctcctttccaacttttccttgtctgctatatacaggggcatgccacgctcctgttcttaccatcaaggaagaattaccatcggaagctctccggtactcctcgcctgtccagatactcttttctcgcctgctcccgttcttcctctgtcggagcagttttgaactttccatacaggtcacgcattaccatcttgtccagttttttctccaactcccgcttgatttctgtctcgcagtctacatcctccattaaatgaaaccgaagtaactgcatgaacaattcctgtgatatttgcacatttttcattccatccatcctttccgtgacggcatgtgacagcagttccgtttctgccctttgcaaatcccacaacaaggtttccgtgttgcgaacaagatataacttctggtcttgctgatccctgcccgatacctccagcgttgccgcattgcccgtccgcttttctttctgaaggagaaaggcaccgtctgccgctccaagtagtccgcttgttccggagatcatgtcaaacttatcgtccgcattctgtttccgtgtgtggtgtacgagcagcatacaaagacagggcacatctgcaaaacttttcagtctcgccataatctgataatcgtttgcataactgtaattatctccgccaacctcacgcactttctgaagcgtatcaatgataatcagcttcgtatacggatgctctgccacaaaccttgcaagctgttcatccagtcctttcccaagctgaccggcagaaacagagaagtaaagattatccgtactctctgctccaaacatccggtacaagagcaggctgataagctatcttccggtgaaatcagcaaggacgactacgataactggcgttatcactatccggaattcgataccacacagatctgggcaaaagttccgtctcaggaactcagtgatgctctggtcaaaatgctcaaatccgataaataaagacgacaaaaagcccttagctatgagttattacccacagctaagggcttcgtttataatatggatttgttcagcgtatggctctgaacgcctgttgcacagccatcattctccaactccaaaaccactggattacaagtataatggctttcatgcaactgttatcaaattgttatcaaaagacttttggaaatgccggaaacccgcataaacactggggttctttaacatttcaatttattcaaactcttcccgagtttattatcggcaactcataaatgctgatatttcccgcattttggacacatctatttcgccaaatatcgctcttttcgcatcgttttcaaaacttttagtagcaaattagttgcagtatctgcacctaaacttttttccataggaatgatataatctacttttttattactcacaatgaataaattcctgtggctgtcaggttatctattacgcctgctgccacagccaaaacgaaaggagcattaccatgagcaatcaacataaaaacccaaccatcagcttcagaatcactgacgctgaaaggaaacaaattgaagcccgtatccttgccagtggactgatgaagaaagattacttcgtccgttcatgcatctacaatcgtatctgcgttgttggcaagaaagaaaacatctatcctctggtgcaaactgtgaatgcattttatctgcaattacttgaaatgcaaaaggcatttacctcaccagaccgcactcccgatactcttccttcttcggaagccatcaaggaattacaaattgaatacactaatatgctaacagctattatcgacctgctggatggtgcaaaatatctgtgggagggagactgccatgaacaacaatcttaattttcagttcggtatgtatgaactcaccacagactccattatcgtcaataccggagagaacgcaattcttgttatccgttgcaaggaatgcaattcctccgttatctttgacgatccgactgatattgtatatctataccggctgtcagaggaaaccccgctgctatatgccaaactggcattgaaagaaaacggattacaggattatgtagatgctatgaatgaatttaattaatttttcccccagttgaggaaatactctattgagttagtctcttcttagtctcatcagtctcatagtaatttgagactggtgagactaagatttaccatttctctaatatatatttcactgccttttttaattatcactaatttcttccaaatcatccaacgatataactccgtccaattccttttaacatcccaattctatcttccaatctttacattcaaatcaatgaattcgaaattcatctaatagtacagcagccttctcatttcttatttctgtcaatgctaatagtatgtcctcatatgcattgatcagcttctcatccttttttatttcatcgctatagaatataaaggattttaagataatcgtatcaactatcacttgtgaatctattatttcttttgcaaactgttctttgctatttctaatagcttttgtaaagcatgaactaatagatgtcaaaatttctggtaagagttcacttatattgagtaaatatactgtgtatagaacatcattcaaatgattggatccatacttctcaatctgtacattcagaaagcacttatctttataactatattctgcctttactttgtttacatcccatctgctatatcttcctttacaaaggaacaatctcttttcaagaatatttcttacatagtcctctggaatactatttacataagtttcaagaattcgaatcttcttctcaatgtcatctctcttacccttctccctaaatccatcaacatatgacaccaaaaagccactaagaacatcttcataaaagtccaatgtatctctggtaaatttcgaaaagtcagttcctttaaacagaatatcataaacagcttctggatttcgtcctataatattcaattctctttgaaaataagaggatactttatgttcttgaaatgtgtcaattatttcatgagcccgcatttctttacagtttttatgccatatttcaatcatacattgcacaatcgaactaataactatggcaaattcctcatcttctgtatccaatccacaacatgcaatattacagagaaggtctatatcataattactgatatcaaactcagaaagatctccccccttaccatcatacaaatattcttgaattatttcagacctcttattttgatattcattccccttattttctctaatccaataatccacgccacgtaatttaggaaccatattaggaatgaattcatactcagcatcattatgattttttatatatacagcattaaacttctggtgattcatttcatcttctgcaagcataataattgtattaaaaaccctacttgcataattcctattttttcccaaaaaataatatgttaattctgccaattgactaatcaatcctgatttttcatcattaacaatactctctaatatcattatcaaaatctgctttttaagatcattatttatattcttatttaattgttcccacaatacaattaccatattaacttctgcaacataagattggtttgaaaatattttctttacacgcttaatccattcttcgactagtttatttcgctgctcatccgtaatatcgcacattatcaatgcagacgcgataaatgttacaagtactttctcgaactgcatttcaatacgataatcatctttcatcttttcacaaagaatatcaatcactgtaataacttgaccagcattagcctttttatcattaatatcctctaacaaatgatttataattttgttcaactgcaatattggttcgtttgcatcttcattattcttaacaatcttttgcgcttcccccttgatctgcggttcgatcattattgtcttttcatctatttttgtcacagcagcatcgcgaaagtccattttttgaatctgcaaattctcattggaatacgttttttcatcgtatatagaatataagtaatctaaaataacatgacatctgttttttattccatcatctccataaagatacgaattagcaaagtattgttgcaaattacatgcacacttttcatctttctcatatcgcctggttatttctggaactcccattgatagcattatgtgtttttccaacaattcttttgtcggattagaaataaattcgccactacgatgaatatcaaaatatattaattccatactggatgctaattctaatgcatatcccggcatttctttttgataattcatccctatagcctcaataatagacaaaagcaatacgttgtttgccttttcatatatagtattcttaacgtattctgctaagcctttaatatatgcactttcagaagtatttctcatagaattaataacagtcttctttattacaaaaacaatgtccgtcaataccaccggaaggttatgttccatgatatctgccatccacaaccatccattacccaaatacactcttttcttgttttcctttggaaaaaaaatttctatatttgttatctcatctggcttattctctgcaaatgtctgtactgcattattaacaaataatattgcccactcaaggccttttacgaagtcacatctcataacataccagaaaaaagtgttattatacacaccgttttcattattgtcgaagtgatttgcattgtcagatagaccatacgctctcacattattatggtcatatccatcatacctaaaatgctttcttgacactctttgtccccataatgtttccgctgatttacatgccaattcgggtaattccatagcaaataaaagtggacattttttcacaaccgcctttagaatctcttcagcaacactgtcccttctactagttccagagcaatattctactatcatattttcaacaaattctttcagccatgacttagatgacttggccattttggcaacaataaggaaaagctgcacaatctcttcatcatgttgataatatgatttttcctctttactcttttctattagctcgtcaatatatctaattattattttgtatgctttttcttcagtatccgcagttttataaaaacaatttgcataatcatcacacagcttaataatagaagttctatttttatctaaacttatgcgttcttcaaaaaccataccaattaaattttcacgtgccgctcctatcggtgttacattcattattaatgctggtgaatgattaattttcgcctcaaatgcatataagtttgttatatctaacaattcctcaaccactgtttcatcgagcaactcctgaaattccttgaaaaacaatccacagtattttgattttactatcccaatttctgtttgctttttccattttgcctcaatactattatccgttaacagtgtatatacaaatttctcgcgggcctcctgtacaaacagtttgttagatatccaaatctggtatcgcctatatatgcaacgtccgattttctctatttcatcaaaaaaaacattatacgacccatgacatgcatcaaacgccttatctatatatcgttcaaaacaaatatcttcgaaaatatcatatttcaaacgaatcttattcctgctttcaacaataattccttctgatttcaatgcttctagaatatcgctatctacaatatcactatcaacaccaacaacaaaacgactagcacgttcaaaaacaatgcgctcaacagtttttctaacatcactttgtaagacactatattttttgcacttgtcttttaaacagatgattctttcccatatgagatttctaaaattattctcgtcgttaatattttcttctacaaatcctcccgatacaattaaattgagataaaatggcacacataataaatccgaatattttttattctgctgtaaggataaaataatgggataacttttagcaaccttatcaatctcatttttcgccaaatccggaatctcgtatgttttgattctatattttgtattaatcttcataaacgcagaactatcagtagttctacatgaagtaataatatatacattgctgtatttatctgcaagcctatatatctcctgcaacaacgtaaatgcattgtcaccacaatctgcaataaattcgatagcatcaataaatatatacagcggtttattttctaaccacaagattgcatcctctacatcacaatcccacaattcgtttactttctttcctgtggacaaattctctgctcgcgtgattaatacgtattcttttccctttaacagttttttgcatacaactgatttaccagaaccagcatttccctgtatcgatactaatttttctcgtcctgcctgtatcgtttcaataatttctgacctgtcaatttcatattcaccgttaataagctcttcaatattttcaagttcaatttctttacttatttcaatcgcacgcaaaaactttttaatgttttccttatgaggttgttcttctatcacccccagcttatccattatcttggaaaaatccgatgatagcgtgttatgtagtgttctttcaccgcttgacataagggacttcgtatgctcattatatgcgtataaaatatcctcaataatctgagtcatttgcttcttttcctcattccctatacgcagctctctattctgctcaaaaaagccccgaatgatttcttgtatttcttcctctgaaaaaatatgatccttatatttatcccccatatcagttttaaatctatcaaggcaagcttgaactaaaggatcatctgaatcccaattattgatatcaatctcttttctttttaacttgtcttttacaattaatacccagcttcttcctgcctcttctaaagtaacaatagaactaagcaatccaattgccgccattagatccattcgtcaattaccttctctcttaattcttgtattcttatcctaaccacattggttaagatgtggttaggttattttctcacgaaaaatatttctgatttttacttgatggcttttccggtatagtcatctttaacacaccatttttcagcataggagttaaatactttcttctaaagcttgtcctgctatcaaaatcaaattcatccattatttcttggaccgacttcgggtctttacaaaaatcgataatcagcttattcacatcctgaccattttggttaggatgatggtcaggatgctgaccatcatctctcaacaacctcaaatacctatcacaagccttgcaaagaaccataattccagcctcattaatctcgtattccggcaatggtccatcatacaacgcacaggcttccctaatcttctcaaatcctcttccccaagcttcaatcataccgcttttgaaaaagacgttagccaatttcggattaaaaggctttgatgaatgtttcataaacaatttgtcagtagaatccagatttggaggcatctcaccatcgttccaaatatatatcttatcctcataaacactaatctggattggattgcagctactgtaatccttatgaacaattgcattcaacaaaatctcacggaatgcgtccttgtgaaacataaattgctcaattctctggactccctcataatcaatcaatgccttcatatattttgtataaactaaatcaacggtcttatctacctgctctatcaaaggaccgtgcacctcatcctggtacaccaaatccgaatctgattttccaaaatatccgattttgatataagaacctgttacccacttctctggatctttataaaacgcaagcattgctgctcttatcaaatatccatcttcatcaatcaggtgcaggttatccatcaatatagtatcttccacactgacttcttcctttgtaagccttcctcttttcactgccttatctttaaataactgtattgcatcctgctttaaatcagctactgtcagttttggtagaggcacaccatcccatgttcttccctgcgtttttaacaaagccctttccaattcctttccagtaatttcacgcatggtacttccggaacgataataatattttccacgaaaacttattaaagatggatatttatcaacaattatctgcagatactcaagtttgcctttatataacaaattcacatctgcaatgattcccattgtgtctgtaattttattaggaattcgctctaataaatctcttgcattatcaatacctacaacattaccattgtcatccgtacctatgtatattgttccaccgtaggcattggcatatccacaaatccattttaaatactcatcctgccatgattccttccactctatggattgatgttctttttccttcatatatccaccaactttccaaattactgcttgtccacttccgtaaagaagtattccaatgtatccacaaacatattatgctcaaacaattccttaatttgctcccgattcatccatgcaacctgcgccacttcatctgttgtggcattgcctaaatcaacctctccatcgtaatcaaacagccaaacatcaacaattttattagccacttttccaaactcgattttcttaatgtctgacaaaacaacttgacctttttctggcaataaatctattccaacctcttctttggcttctctaagcgctccttgcaaactgtcctctccttttactacagaaccatccacacattcccacatcaaaggatgtgttggtctgtttgcagaacgctgcgagataaggtactcgcccttggaattacgaatccagacatgcaccaccaaatggtagccgtctatcggtaactgttctcctctgatatggtcttttcccagaagctctcggttctcattatacaaatcccatatttctgcatccggcacatactccacaatatccccaaagtctgcatgtaaagttttacaaattttactaagaattgtaaggcttacctcttcatcacgtcgaagctttgtcattgtgttaggggcaatttctgcctttttacgcaaatccgatttactcatttttttatctattaataatttccataatttattgtatgatactgccataacaatgtctccattcaccttcaataattatcaatttcctatctgcaatccattatctgtttcattaactctgaatagtctattaaattcattctactttttatcgtctgttgaaatctacgagcatcctttgagaaatatgagttagttaccattattcctgctgtaaccctgtccgcttcaacagttccatatagttgtctaacaagtccaacattcacaggatgcctaggcgctttctttttacattcagcataaatcaccaaatcgcctaacactgaattattaagaacaatcaaatccttaccaccatctcttgtctgtttcgtaagttgcacattatatccttttctttcaaacaattcacaaaccagttcctcaaactgtctaggagtaatttcttgaagtatttctggtcttaatgcaactttatccacaagcgaatgcgttactacctttatatcattttttatttcgtctggtactctaataatttttcgttctggaacaactatctctggatgttgtagagatacaccacctttatatgtatatatttgatgtatatccttttcaaaatcaagaaaatattcgttaagcccctcgccctttagttttgtatgaagcttttcagctatcgttctaggcgttaaattttgcttatcaagttctttaaaaataccttctacaatactgtcactcgagatacgggcaccaagataatcactaataaacaataatatctgtttatctgttaatggctttaaccttatttcataatcaaaatttatatcaaacttattttctctagcagtgcatatataacaccctctagcatttttaatgttctctaccatttgttgtttatatctatatatttcgtccaaaccatccactaaacaaacaacatctgtaaaatcagatgaatgtttccatattttatttcccatctgtgaaaaaaccatcgtttcataccagatttttcttccttgttcctctaatatctttccaattatatttaacaaaaaagttttaccacttcctgccgcacctgttatcaagattttgccatatggtttcatcctgacaacatctaaaagttcctgtaactcgtcccttcttataatctccacacgcagctttcctttcgttacccaaccgacttatccagcatctctataatcttttctttctcgccactaccattagtcataaatctcagtaatggaatttcatacaactccataatatgatttttcaacaaatctcttgaagcctgaacagtatcctctttatggtattcatatccgtcaacctcaatcgccaacacaggctttttaccaattctgttataaaccagaaaatctaaatgtgttgctggattcattgcatactgacattcctgctcatttaatagttctggattctt

SEQ ID NO: 2068 - DNA, 1806 bp, Unknown
  gut microbiota DNA sequence
tggtgtactggtaggacactgtactgtgaacacaaaagaaaatcataccggtgtgactgtgatcgtccctggaccggataatgcatttgcaaatcactatacggcggcagcctatgtccacaatggctttgggaaaagtgccggtctggtacaggtagaagagcttgggactcttgaaacaccgatcgcccttacaaatacgttaaacgtcggaaaggtttgggatgcacttgccggtatcgtgatcgaacagtgccagaacgatgggctggaacccatgagcatcaatccggtcgttggcgagtgcaatgactgccggatcaaccagatccagaaacgtgcagttggtgaaaaagaagtgcggcaggcttttgagactgctgccgaggagttcgaagagggggatgtcggtgccggtgccggtaccatctgctacggcatgaagggtggaatcggatctgcatcccgcgtgatctgtattggtgaaaaggaatacaccatcggcgttctggttcaatcaaactttggtgcaaccgaagattttgtactcaacggagaggctgttggtccaaaaattctggaatggaagcaggaaaagaatgatatggctgcatccgaagaagataaaggttcgatcatgagcattctggctacggatctcccattgacaagccgtcagctcaaacggattctgaaaagaacaggagttggcatcgcacgaaccggcggttatacgggacatggaagcggagaagtcatgatcggctttacaaccgcaaatcggatcccgtccggtcgtgaggaggaactgctccagatatcagcaattccggagcacgtgatcaaccgggcttttctcgctgcagcggaagccgaacaggaagcgatcttaaattccatgacggctgcaaaacagacacgcggaagagagggggagctgtattacagccttgcagagtatcttaacgacagggaagtagaaacctcaaaatagacttgaagcaccatttccggcatctcaccggttctggtgcttctttcttttgacatgctttgcataagaaagctatctattcttccaacatcttgcgtattatccagctcacgatctgcctctgctatttttcgaaaatacccattttcgcagaatctgcatttgcaaggactaaatccacattttccaaaatttataatgatcaaatgctatacccgcagcctacctttccaatatcaaacctggcactttttacaactgggtaaaacggcttcgcaaaaaagcctgctatgaaatacctcctgccgcaggcagagtggattacaaagctgcttcccgacaggatattgtaaaacttgaagtaatcccggaagatccagcaacagtactttacgatccggaaggacagatccctgcaggcacgaaaatcaaacccactatcgagattcagacaggcactgtttgtataaaaataatcagctggctcagggaacatgtaaatagcatagagtaaaacactcgcatggctggcatccttgcatagggtgccagatttcttttgttcagcacgccctatggctgggcgcttacgctataaaaaacaatgacttattcaccgcttacgagctactatattttttcgcagaaaaaaaagaaatacctcatttctgaagtatttcttttaatctcgcttataataatgtcagaaaagaattattatcatcatatccgtgtaccggagttacattaagaagaacgtttcgcattaaattttttgcctctgttcgttttgcgaacactttttttacatt

SEQ ID NO: 2069 - DNA, 990 bp, Unknown
  gut microbiota DNA sequence
cggcctttcatcttctccgccacataatccagctctttaaacagcgccttcaaatagagatgaaccttcttctcccacgctccgatcgggtaggaggtgaaggaacagtagaggcaggtggtcgggcagaacggaattcccacatagaggctgtatccgttttcatagtcgatatggcttaagagctcccgctcccgcttcgcgacctcgacacttaagtcgatcttttcttcacttgtcaggtacatgtcccgcatgaaggaacggatgcgttcctcatcctcaccctgatcaagtcttgtcatggcgatctttgtcgggcggataccggtcagggtcccccaggggagttcttttcccgtccgcttttttaacatgccgtaaagctctttcttgatcgttgtctttgcgtttaagcgaacatcgtagtcgatcggaaatacggtctcatctgagacagtgcctgtcggatccgtgatcttcaagccaaatttcgtctcatccgcattttgtgagcaggttccctccacgtaaaaatccacatcgtcctgtttctcatggacaaaagtctcacccggataaaacgccatcaaaagctcccggatatcctgctcataagcagtatcattcaataaaattccaatcatctcattgcccccgaaagaggattatacttcttttcaaaaccgatggtagtcgtgtccatatgacccggatagaccatggtgtcatccggcagtgtggagagcaggcgtcttacagactccgcgatctggcgtccgcttcccgtcgggaaatccgtgcggccgtaggagcctgcaaacagggtatcaccggagaagagaacctcttctttttcaatatagtaacagcaggaaccgatggtgtgtcccggtgtttcaaatactttccatgtaaatccggcgatggaaagctcgtcgccttctttcaccgtaatatccggtgtcagcgtatacggttccctgtagt

SEQ ID NO: 2070 - DNA, 38868 bp, Unknown
  gut microbiota DNA sequence
ctaaaaggttatacttgtctacgctgatcgcctggtttgccttgcctcccataatgcggaggttgatcgaatagagaccaagctgggtcaggattcccgcgaggattgccgggatccccattgccgtgtgaaagattcctgtcacaaggcctgcgatcattcccgcgataaacgccgcaaacagggacactcccacagaatgtccgtttaacatgaaaatgatgcagacagcacctcccgtacacatggttccgtccacggtaaggtctgcaagatcgaggatcttatatgtaatataaacgccgatcgccatgatgccccagatgagtccctgtgcacaggcacccggcaatgcattaaacaatgttgcaaaattcacgtttctttcctcctatggctgatgataacaaacagggtgacaaaattttttgctgtttgccaccctgatgtcctcataatttcaagtcgttattattcttcgatcacaacgtagtcatccggaaccgtgattccaagtgcctcacagtttgccttattgtatttctttgttacctccggtgcaaactcgatcggcatttcctttacatctttgccgtccatcaggatctctgcgcccatctcaccggctttgtatccgatatcgtagtagtcgatggaaagagttgcaacgccgcatccggagcagattccttcttcacctgcaattaccggaactttcgccggaaggcagatattgtttatgatctctgcattggaagcagccgtattgtcagtcggaacatagagaacatcgttctctcctgctgctgttgttgttacggaagcgatatcgttggagtctgcgaaggtgtattccttacaggtatatccgagatcctcaagatatccttttacggttgttgcctgatatttggagttcggctctgcggagcagtataataagccgacattctttgcatccgggaacagctcatttaacattgctgcctgctggtcgagcggagcaagatcggaggtaccggagatgttgagacctgtcgtacctgtccagttgtcgatatcaagtgctgtcgcgtaatctgtgatggaagttccgaggatcggaatctcgctggttcctgctgccgctgcctgaagtgctgcggtcgcatttgcaaggatcaggtccacatcgttggaaacgaactggttgatgatcgttgcgcaggtagcggaatcgccggatgcgttctgaagatcaaacgtgaccttgtcaccgagtttatctttcaatgcagcctggaaaccttctgtcgccgcatcaagtgccgggtgctgtactaactggcagattcccacattgtaggtctttccatcttcttttgctgcttctgtggaatcggccgctgctgtcgttgtctctgctgcagctgctgttgtctctgctgtggaactggatccacatccggttaatgcggaagccgctacaacggctgccattgcaagtgctgttacttttttcataatatcgatctcccctcagcttttcttttttgtaacatcccgctgtcattttcaggatctgtatatcctccccttcagacgggatctcacattctcaaatgcgttgttgcgttacgctttaacgcatgtaagtgaaactgtccttatcatacacctatacgccggattcgtcaagcttgattttcctgtttttaccttttcttgttacagtacacgggcactctatgcccgcgcactgtagcaggattttgccgatgcttcgcattccgaatcggcaaaatccacgaccacaacgttatcatacggaattttcagttcagaaaattcctatccgtgaaaagtaaccttttctcaatatcccacaataattgtaggttttccacaatttgtcagacgatttttgtcaggaaacagaatccgttttgtccgcaaaaactttcaggaatctctccccatacttcgcatacttaaattccccgactccggagaccgtcagcatttcttccttattcttcggcctgatcagacacatatgcaccagagtcttatcggaaaatacgatatacggtggaaccttctcctcccgtgcgatctcacggcgcagttcttttaaccggtcaaacagtgtcatctccgcctccgtaaacgactcggtaccggctgccatctttgtcttcttcgcgccgccggagatctttcctgtcttcactctctcctgctccttcggaagcttcatcatgaccgtctcaccgtcgtttaagagcacttccgcattctttcccggcttcacgatcgcgtactcgtcagaggtcaccaccagatattcttttatctgcagaaaatttaaaacctgtcttaacctgtagaccgggactcttgccagctttccgtaaaaggaattttcatccatgtgataattcctgatcttcgccgtcgaagctccgtgcaccgtgtcgaggatcaccgtagtcccgtaccgcccgcggcactccacgacgcagccgacaatggctctcgcgatctccgtcacatccgtctcctcaaactgtgtcttacaattagaacagtttccgcagtatccgcttccgtactccccgaaataccggagaatatattccctgaggcagtcattcgtaaagcagtagaatgtcatcttttttaaccgttcccggtcgcgctccgcaacgatctgccttgtcacatcgtcgagttcctcgttgtcacggttgttgtcgataaacatctggttcgtcacgacatcccgcccgccgtacaggagcagacagtccgccggttccccgtcacggcccgcgcgcccggcttcctgatagtaactctccatatttttcggcatgttgtagtggatcacaaagcggacattcgatttgtcgatccccattccaaacgcgtttgtcgccaccatgatctgggcgcgatcgaagataaaatcttcctgattctgctttctctcgctgtcggaaagtcccgcatggtatctcgtcacggagaatccgtccttcatcagcttctccgtcacttcctccacgagttttctcgtcaggcagtagacgatgccgcactgtcctgcatgttcttcgatatacgtttttaccgccgcatatttatctttcgggctctgaacctcaaagtagagattcgggcggtcaaatcccgtcgtcgtcacgaccggatcctgcagctttaagagatcgataatgtcatcccggacttccgcagtcgcggtcgccgtaaaggcgctgacgaccgggcgctccggaagtgcccgcaggaattcctcgatctttaagtatcccggccggaaatcctgaccccactgggagacgcagtgcgcctcatcgaccgccaccatggcgatcttcgcatggacggcaaaatcaagaaattccggagtcagaagccgctcaggagcgacgtagatgatcggataccgtccctctctcgcatatccgagcgccttataatactgtcccgccgtcagggaactgttcaggtacgcagcatgaacgcccgcctggttcagggcgctgatctggtctttcataagtgagatcaggggcgagatcaccagcgtgatccccccgtttgcccccgccatcagagccgggatctgataacacagggactttcctgcgcccgtcggcatgatccccagcacatctctgccggaagtgatcgcatcgatcatcttctcctgtccgtcccggaacgtgtcatagccgaaatattgtttgagaacctcatatttatccataaaagtaatgatccctttccacacccgtcaattgctgccgggaacctttttatcgttgatctgttggctgcagctggtgaaccgctttccagttgtctgtccatgatatcactctcccgccgcccccgcaagtatgaccgccattaaaatttcataaacaaatcggcaaccgttacagtacacgggcactctatgcccgcgcactgtaacaggattttgccgatgctccgcattccgaatcggcaaaatctgcgaccacaactgtatcatacggaattttcagttcagaaaattcctgcctgcgaaaaataactttttatctcatccacggcccgccgctttttatcttgtaatctctccccgatattgctataattggatacaatacaaagatactcaaaaagagtgattgacggaggagaaaacatgaactttttagaagagcgcatcgcaaaagacggtgtggtaaaagaaggaaacgtattaaaggttgacagctttttaaaccatcagatggatatcgagctttttgacgagatgggtgcggaattcaagcgccgttttgccaatgaaaatatcaacaagatcctgacgatcgaggcatccggtatcggtatcgcctgtatcgcggcgatgcacttccatgtgccggtcgtatttgcaaagaaatcccagagcatcaacctcgacggcgaaatgtatgtggcggaagttgaatccttcacccataaatgcaagaaccaggttatcgtctccaaaaagttcctttccccggacgatcacgttctgatcatcgacgacttccttgcgaacggctacgcgcttcagggactgatctcgatcgtccatgacgcaggcgctaccgttgagggaatcggcatcgcgatcgagaaaggattccagatcggcggacaggtcatccgaaatctcggctaccacttagagtccctggcgatcgtagattccatggatccggccaccggaaccgttaacttccgaagccaggaataaaaaagaatgtgcctcggcacattctcgcgccgagcgcggtcgcttgcgacaaccatcatcttcgcgcgagtgcacatcttaggcacgcagtgcctttttatttaacaggaagttccatcggaatttcctgttgaacaaaaaagaacatcctgcagtcagtacccaatgtaccggccgcaggatgtttttttattttttcctgtcagttttctcattcatctcgttcccgtttttcgcttctgttccgctcttctccttcggaagcgggatcgcgagaacggtctggatcaccttgttctccaccttcatgatctttaagaggtaatccccgatcctgacacttcccttctctccgaccttcgggatatgtccgatcctcgataccataaaaccgttcagggtatcaaaattgtccttatcttccttatcaaattccactccgagcgtctcttccacgtcgtccagaagggtgagacccgtgagctcatatgtaccgttcttccgggatacgatatccggctcttccttgtcgtactcgtcgaggatatttccgacgatctcctcgagaatgtcctccatcgtgacgatgccggcaagctgaccatactcatccaccacaagttcgatgtggatcttctgggactgcatctccttaaaaagagcgttgatatttttcgtctcggggatgaaatgagggcttctcaaaagtcccttgatctttgcgatcgacgtgttcagatgatccttggaatccgtatagcggagcatatcgcgcatgtgaaggatgccgatgatattgtcgatatcttcggaataaacaggaaatctcgaataatttgcttccttcacaacgaaatcgagcgcttcctttaacgtcatctccccgtcgagtgcgatgaccgcggtccggtgcgtcatgatatcggccgccaccttatcgtcgaactcaaagatgttcgtgatcatctccgcctcgctggcctccagaacgccctgttcatggccttcattgaccatgtacatgatatcttcctcagtcacgttgtcatccttctcgcggatattgatcccaaccgcctttaaggaaatataggcaaactgatccatcagccacgcaaacggaaagagacattttgtcacaagttccacgagcggcagaactttataacagaagcggatcgggctctttgccgcgatgcgcttcgggatcacgatcccgagccccgtgagcagaaatgcgatcccgacgagtcccgcaatgtaggcgatccccaccgctgccggatgcgggatctgtgtatgcgtcccgattaaagccgtgagtttttttaccacaaacgccagcgaggacgcgcccatcgcaagcgtcaggatgctcgtcgcgagctggttcgtgcggatgaagagatacgggtcttcctgtatctttaaaagtttttccgcccgcttgtttccttcgtcgcgctcatcctccagcgcactggtgttcagggcctgaacggccgcaccgaatccgtacatcaccgcaaacaggatcactgatgcggcaaacagaacaattcctatccatgaattgccatcgtccatgagattttccaacactcctttatctttccataactatcctattttttcagttacttttttccgtatttcgtccactataccatctatttccatgcccgtcaaggaatcattccgccgtatcacttttcacgttacagtacacaggctctccatgcccgtgtactgtaacaggattttgccgatgctccgcatcccgaatcggcaaaatccgctacccaaactgtatcgtacggaattttcagttcagaaaattcctacccgtgaaaaacaaccttttcacagctgccagaccgttacaatgtccggggctgaaatacccgtgtactgcagcgccaaactgcgattatgtagcagttttttctccccgcacggtcctcaaaaaccgccaagttccagactgaccttcaatgcgtcatttacctggtccagcaggtccccgtcaaggtggcaaatcttttcccttaatcgctgcttgtcgatggtcctcaactgttccaggaggatcaccgaatccttcatcatgtcgcagtccctcgcggatagctccacatgagttggaagtttcgccttattcatcctcgatgtgatcgccgcacagatcacagtcggactgtgtttgtttcccacatcgttctggatgatgagcacagggcgcacacctccctgctcagaacctaccaccggtcttagatccgcataataaatatcgccccgtctgatgatcacaagtctcacgctccgtctgaatttctgcggagagtccggggctgctgtcaaagccataacggtatcttttttgacagcttccctgacatttccgtattcagagtgttccccacttatgatattttattcagaaatcgcggcggcgtgccggtcagaatccgacatactcctcatccgggcagttcctgatcccgaggacctttccgttcttcacatacacacgcggaacccgctttccgatcagacacgggatctcgtaatggaagccgccggaaatctctgcgatctcctccatcgtgatctcttcctccccgtctcttccgattagggtcacaagatctccctctttggcctctggaatcccggtaagatccaccatgaactgatccatgcagacgcggccgaggatcttcgcgcgctttccgtggatcagcacttccccgcgtccggacaggtttctcggatatccgtccccgtaaccggcggagactgtcgcgatctgcatcgtccggtctgccttgaacgttcctccgtagccgacttcagttccaggcccgatctccttgatatatgtgataaagctcttcagtgccatcgccggcttcatcgtgaggatatcctttctcacctcatccgacgggtacagaccgtagatcgtgatcccggcgcggactgcatccatgttcatctcctgcatctccacgatcccggcactgttggaacaatggcagaccggaacctccacgcctgctgccttcacagcatcacagaagttcttaaaccggtcatactgctgtctcgcaccagtcttatctgcctcatccgctctcgcaaaatgcgtgaacatgccgtcgatcttcactcccggaagcgccgcgatcttttttaccatctccacggacgccgtgtccggtctgagtccgatccggctcattccggtatccaccgcgatatggacatgggctgtctttttcagcttttctgcagcttctgacattccctctgccttatccagttcaaagaccggcatgcagagctcctgccggatgcactcctcgtatctcggagcagcgaccggaccgaggatcaggatctccttcgtgatcccgtgtttccgcagctgtacgccttcctcaacggtcgcgaccgcatatccgcatacaaagcggtcgatcgtcttcgcgaccggaacggcgccgtgtccgtaagcatccgtcttcacgactccgtacatttttgtccccgggcgaagatttttctccatcgcctccatgttttcctctatatgacccagatcgatctctgtataaattctgtcaaattccattttctctatcctccgaaaggcaatccgcgatctccccggcaaggactgcgtgaacaccaaagcgcttcgccgccttttcccctgccagaccgtgcacatagactccgagggaagccgcatcgctctcctcaagccccagcgcgatcagtcccgcgatcacaccggtcagaacatccccggaacctccttttgccatagcgggcgtcccgctgccattgacaaaggtctttccgtctcttcccgcgatcacggtcgccgagtcctttaagacgcagaccactccgtactgatccgcaaactctctcgccgcacggatcggattttccttgatctcctctatctgaattcctgtgagccgcgacatttccttcatatgcggcgtcacgatgatattttctgtaaaataaccggtgagttcccggtactccgcggcgagattcagcgcgtccgcgtcaagaatgatcggcacatacgcgtcctttaagacgttttccaccatgagccgcgcatgatcctccatgccgatccccggccccagaacgatcacatctgcccattccgtctcccttgcgatctttctcgcaaagctctccggatcttttccggcttctctcgcatcgtaggtggaaaggatcgcctccgggagtttttcctgaacgatgatcctgttttcctccggtgtaaagatcttcacgagtccggctcccatccggtatgccgctctcgcggagaggcaggctgctcccgccatgttctttgcccccgccatcacgaggacttttccgtatgttcccttgttggaatccggcgttcttgccgggatcctcaaaaggtcttcccgatccagcatctgcacgtgtttttcctgctccgcgctgctctccggcacaaaaccgacgtccctgaccaggagctctccgcagtattctcttcccgggaacagcacctgtccgagctttttcattccgaaagtgaccgtcacatccgcgcggaccgcgtcccccatgacttctcccgtgtcggagctgatgccggagggaatgtccacggcgatcgtcttcatatcctcattgcggttgatccagtcaatgagctttttgtatgcaccttccacatttctcgaaagaccgatcccgaagaccgcatccaggatcacgccgcggcatgcgttcgcctttgtctccgtctttgcaaacggatgcgccggggatcgtttttcttctgcatccggcagttcttccgccgtcatcaccgggatccccagccgtttcacgatatttaactgggcttccagctcttcgctcccttttccgtcccgtcccgggaacaggatctttacatcatatccctttaagaacagcatcctggcggcggccactccgtctgccccgttatttccaaaaccgcagacggaccagactgtctctgcctgttctttcttaaggatctcttccgctttctccgcaacggcaaaagccgcccgctccatcagcaccagggacgggatcccgtaccccctgatggacctggtgtcaaacgctttcatttcttttccgctcagaactgctttcatccggcatccccctctccgacggcaaacgccatcgcatgatccttcgtgtcagagatcgacacttcgatcgtcctgatcccgagctcctccgccttcatctctgctcccgcatgaagttcgacatacggctttccaagcgggtcccttaagacctccacatggaccggcataaagtcccggaatcccgttccaaacaccttcgctactgcttctttaaccgcaaaagtgccggcaaggacccggggatcaccctttgcctgccggcgctcgcgctcggtatagatacgcgtcaaaaaagcctctttttcacaggcttttttcacacgctcaatttcgatcaaatcacagccaactccaatcaacatgtctcattggttcccgtctgttctgctttttcctttgctttccgctcccgctcatcctgcatgctgcagacacggtaggaaagacgcatcaggctctcggaaagatgcacattctcaacgactacatcatccggcacatttaagtctgtatgggcaaaattccagatcgccttgatcccggcttttaccaggcgctctgcgatctccggtgctttggacttcgggatcgtgagagccgcgatctgtacttcattgtcgacaataaactgctccaggtcatcgatcccacggatctcgactccgcggaccacaagaccgatcaggcgcgggttgatatcgaacattcccttgatcataaagccgcgcttctcaaaatttgtatagttggcgatcgcctgacctaagtttccggcgccgatgataatgaggttgtgctgtctgtcgatccccaggatccttgcgatctcggtgtagagatatttcacattgtatccgtatccctgctgtccaaagccgccgaaattgttaagatcctgacggatctgggacgccgtcaccttcattctggcactcagttcattggaagagatcctctcgatcccctcctccatcagttcgcccagatatctgtaataacgcggaagtcttgagattaccgcctttgagatctgtctctcgtctgtcattttttagttccaccttctcagtataacgctgtcttttattatacctatatctatattatttgtcaaatctttgtcagtaaaatgcgcaaactgcccagacggaaaaatgccccgcccgaaatctccccagaccggacgaagcattttcctttgagtatgtctgtattcgtaagcattcaatcctgcattcccacaggaccgagcgctcactctgtataaaagcctgccccttttgcagcgcgggctgttagacagtcatgatcattctgcaagttcttcccacttttcgtagagaacttccagttttcctgcgatctcctctttttccttgtttaactccataagtttcgcaacgtcggagaagacgctctcatcgcagaggaggccgtcgatctccccgtctcttgtctccagcttgtggatctcatcctcgaccttctttaaatcgttctggcgttttctctggcgggcctgttcttccttctgagccttccagtcgagctttccgccggcatccgctgcgctgctctccgcaggctttccggcagtctccgctaccgctccggtcttcgacgcgccgaatccgacgatcccgccggcactctccggcgcctcgtttccgaaatgggccgtcatcatcgcgtcatgtttttccagataataatcgtaatttccgatataattcatcatccgctttccggtgagatccaggatcctcgtcgcggtcttgttgataaaataacggtcatgggagacatagagcacggttccgccgtagtggctcagcgcgttctccagaatctccttcgatgtgatatccagatggtttgtcggctcatcgaggatcaggaagttcgcctcggagagcatgagctttgcaagcgacacacgtcctctctcaccgccgctcagatccccgatccgtttaaacacgtcatccccggtgaacaggaacgccgccagcgtacttctgatctgtgtgttggacattcccggatatgcgtcggagatctcctcaaacagcgtcttttccatgtgcaggacctgatgatcctgatcataatagccgatgtggactctggaacccaggatgatctcaccggcatccggcttcacgagaccgttgatgatctttaagatcgtcgtctttcccgttccgttatccccgataatcgccacgcgctcgccgcgcttgacatcaaagctgaggtccgtaaacaaggtctgggagccaaaggacttcgcaagtccgttgaccgtcagcacatcatttccgctcaggatattcggctccaggcggatgtccatcgcatcgttgacctccgacggcttttccaggacctcgatcttatcgagcattttctcgcggctctccgcccgcttgatggacttctcccggttgaaggacttcaacttctcgatgaccgcttcctgatgtttgatctcctgctgctggtttaagtacgccttcatctggatcgcacgcatctgcgcccgcttctcactgtaggccgtatagtttccggagtacacgatcgcatgtccgttgtccagctcgatgacctttgttacgatcttatcgaggaaataccggtcatgggcaacgatcaggaccgcaccgcggtaatttaagagatatgtctccagccatgcgatggaggacatatccagatggttcgtcggctcatcgaggagaatgatgtcagggtttgtgagaagaagtttacccagagaaactcttgtcttctgtccgccggacagtgtggagatctgtttagaaaactctttctccgtaaatccgagtccctttaagactccgacgatctcactcttccaggcatagccgttgatgagctcaaattcgtggctcaagcggctgtactggttcatcatggtctccagcgcttccccggaggccgttttcatggaattttccagatctctcagccggttttccatctcgatgaccgactttttcgcatcgagcatctcctcatagatcgtccggtggcttaaaagatcctgattctgtgccagataccccagtgtctttccgcttcccagcacgacctcgccggaatccggtgccagttcgcccacgatgatctttaacaatgttgattttccggcgccgttgatgccgacgatcgccgctttttcatgatcttcaatatgaaaggaagcgttcttgataatatcgtcgcttccgaacgatttgcagatattgctgcaggataatatcataaaatcctcctgtttcttgttgtaccgccgctatttccttcgttcatacggcttctgtatttttccagacgacgtttttcttcctcgcacaacagttccgcgattcaccatcatgcataaaaatccgccgttaatcttttcattgttgtcctgaaaaaaggattactctttttcacagaatttctgccttttctcaacttctgcattatgcccagggaaaatacggccacactgccgcaagaaacatgaccggcagcaggttcgccaccttgatcttttttccccagatcaggttcactccgacgcagaagatcaggaccgatcctgtcagggacatgtccgccagtccctcatccgtcaggaacggctcgatcaccttcgcaagaagcgtcatcgccccctggaacatcccgaccgggatcgccgagaaaatacagccttttcccatggacgccgtcatgatcacgacgatgatcatgtcgagaacagcttttgccgtgaggatcgaatagtcgccgtaaattccgtcccggatcgatccgacgaccgccatcgctccgatacagacggtcagggaagccgtcacaaatgcatccacgaacgcattgtcgccgtcacttttcgtcttctccttcagccattccccgaaccgttccatcttcgtgtcgagatcgatccactcgccgagaagagccccgacagcaaaacaggcgatcatcatcatggatcccgatgaagaaagcccgttttccgtcagttttaacatctgctccatacagccggagactccgataaacaatacgcagagcgccgacgccatcatcaggttgctctgataacgctccgtcagtttctttccaaataataaccccatcacgccgcccgcgacgatcgcagtgacgttgatgatcgttccaagtccgaacatagttgtctcttttcttctgtcatgatatcacgatccgcagttttcacactttgggctgcttatccggcgatcgtgatccgtatttgctgttttccggaaatctgcaggctttttccctctcctgcgctcatgatcgcctgtatacatgcaaattgaagtatatcacaaaatcatattttcgtctatctccaagttttccggtctcggcattccccgacattctgccagacgaatgacaccggcaatggaaaggcgattcgtcccactttccctgcctgttcatagcaaaatccgggtttccacctgctatttgaaacgacctccggtcaagcccttatgattttatcaaggtcctgacacagaggtcgttttctgcgtttatactgattttttaatcttcttttaccttttcttcccatctggtccttctgtaatacaggaaggaaaggatcgcgcatacgatccagccgaccggatatcccattccgaccgtatactcgttgaatgcgatctttgtcacgaagaagagatagatctgtctgcagacaacgaagctgaagagcatgatgcacatcggtccctttgcatccccggatcctctcaaggaacccgcaaggatctggttgaaggaactgcagaagcggaacgggaccgtcatcaggataaataaggttccatagtgcagcacatccggatcctgattgaaaagggataccagggatcttgcggagagtgccatcgcgccggaaatgcagatcagcacgcccacgcccatgaacactgcctgtttgacgccgtctctcgcacgctccacgttctttgcgccgagattctgtcccacgaacgttgtcgcagcctgtcccatactctgggcaggcaggattgcgaactgatcgatctttgaatggcagctccatcccgccatgatgacagaagaaccaagtccattcacatacgactgcacaagcgcgttggaaaacgcggtgagcccctgctgaactcccgccggaagaccgatccggaagatctcgccgaggcaggatttattgatgtgaaggtcccgaagaacaaggcgatgtgcttccttcgtcctcataagagtcgagcacgcaagagcagcggaaactgcctcggcgatcaccgtagcgatcgcgacaccgctgatcccccagccaaatttcgcaacaaagagaatatccagagcgatattcaagcagctgctgatgatcaggaaatttaacgggcgcttcgtgtcgcccacagcccttaagatcgcactgctcatattgtaaagaaagaggaccggaactccggcaaaatagatctttaaatactctcccgccggtccgatcacatcatccggcgttgacatccactttaacatcagcgggacaacccagaccgagatcagggagacaaaacatccgacgatcactgcaaacaggatcgtcgtctcgaccgcctcgtggagcttttcatgattccgggaaccgaaacacgtgctgatcacaactccggcaccgatcgagatcccattaaagaagtttaccagcgtattgcagatcgccgtcgtcgcgccgaccgcagccagcgccgatgttccgagatagtttcccacgacaatgctgtccaccgtattatagagctgctggaagatattccccatgatcagcgggattgcaaaaagaaccagctgtttccagatcacgccctgtgtcatatcgatattgctttttctgccggatgtaatttttgacattcttttgtccctttctgcgatctcatgtgtacgaaatatgtaaaatctgccgtcattctgtaatatctatgtaaatcatacgggattttccgttaaaaagcaagcggttctcctttgttgatcccacaggaaatttttgtatccggcacatgattttttgtaccccgttcttctggtctgcccgggcattcttttcgccttcaaaagctttctccggctttttctctcttgttcaaaagaatgtgcctcggcacattctcgcgccgagcgcggtcgcttgcgacaatcttcatcttcgcgcgagtgtgcatcttaggcacgtagtgcctttttgtttaacaggaagttccttcggaatttcctgttaaacaagaaaaggacaggatcccttttcggtaccctgtcctgtccttcccatctttttattttatggccgtgatttcaggagttactcccatgtcgggatgtaagctcccttgtaagtgtcctcgatcacttttgcaacttccggtgtacggaaataatcgactactttcttgtaaagctcgttgtccttatcagctgttcttgcaacgatgatgttgacgtacgggttgtcagatccctcttccacgctctcaaggaagatcgcatcttccttcgggtttaaaccgttgtcaactgcgtgaccgccgttgatgattgctgctgcaacgtccggaagaaggcttgctgtatttgctgcctcaacctctttgatgtcaaggtttaacgggttctctgtgatgtctttctttgtcggtgtgtagcctgctgccggatcaaccttgatcagacctgcggactcaagaagctttaatgcacggccgccgtttgtagcgtcattcgggatcgcgatgatgtcgccgtccttgatctcggatacgtccttgatcttgttggagtagaggcctaacggagccataatggtctcaccgatgatagaaagatcataaccgttgttcttgcagtcatcctcaaagtaagcgatgtgctggaaagagttcagatcgatctcaccgtcatttaatgcacggttcggaagcggataatccgcaaattttacaagctcaaggtcgatattttcctcagcaagcttgtcgatgaccggctgccactgctcgttgttctcacctacaacaccgagtttgatgactgtcttctcgccggaggctgcggttgtatcagctgctgcctcagaaccggctgcggttgtatcggctgcagccgctgttgtctctgtcttctggctgctgccgcatgcggttaaggataatgctaaaactgctgctgcgccaagtgctaaaactcttttcttcataatatttctcctcctgaactttctttgtcgctgcccgttttcatccgcattcgctgtgcggaccggacagttccttttattgatacggcccggaaacagttccgctccgtttcaagcaattttaatctgaaaccaccgttctagtgagtcgtctttttgatcacataggaaccggtactctggatcaggcttaccatgatcagaatgatgatgacggttacataggtgacatcggtctgccctctggaatgaccgtaacggatcgcgaaatcgccgagtccgccgccgccgaccgcaccggccatcgcggtaaggccgaccaggctgataaatgtgatctgcattgcacggacgatccccggaacactctcctttaagtatacccggaagatgatctcccacgggctgtttcccatgctctccgccgcctcgatcagaccgtagtcaacttctgcgagcgcactctcgatctgtctcgtaaagaacgggaccgttccgaaaataagcggtaagatcgcaccctttgtaccgatcgctgttccgacgaccatacgggtcagcgggatcagcgctgtcagaagaattacgaacgggatcgaacggaaaatgttgaccagcttatctaaaatattaaagatcaccttgtttttcaggacacccttcggagctgttgcagtgaggatgatcccaaagaaaagaccgaacaccatggagatcgcacctgacacgatgaccatgtagatcgtctgaccgaagctttcgagaagctcatccggctttgacatgacattcgggataatcgcatttaagaaatcaagcattctcgatcacctccactccaacgttcttctccttcagatattcgatcgcggcttcgatattctccttcgttccgcttgcgatcgccacagttccgccgatcggggcgtcctgaacgatctcgatatcagcgaagatgatattcagatccacgctgaatctcctggaagcttcggagatcagggcctccgacgtattcttcttaatgtaattcagccgcaggatcttttcacccggctttaacgcgacaagcggtgacttctcctcgaccagcttttcgatcttctgaaggttggatgtcgtgcggatgaagtctctcgtgatccccgccttcggtgctgcgaagatcgagtagacatcgccttcctccacgacattaccgtgttccatgacggctacgcggtcacagatctctttgacgaccgccatctcatgagtgatgatcacgatggtgatgccgagcttttcatttaagtgttttaagagctgtaagattgcacccgtcgtctgcggatccagggcactcgtcgcctcatcgcagaggaggactttcggatcattcgcaagcgctctcgcgatcgcgactctctgtttctgtccgccggaaagctgactcggatacgcattctctttttctgcgatatcgacaagctctaaaagctcccgcactttcgccttgatctgtgctttggaaagtccgcttccctttaacgggtaagcgacattctctccgactgttctggatctcatcaggttgaaatgctggaagatcattccgatcttctttctcgcttccctgagttctttcgccggaagatccgtgagaacttttccgtcaaccgcgacggttccgctcgtcggtcgttccagtaagttgatacatcgcaccagtgtggattttccggcaccggagaatccgatgataccgaagatctcaccactcctgatatggagtgtgacatcagagaccgcatggactttttccgcaccggtatcaaacgtctttgtaatatggtctaactgaatcaattttatcctcccatgtacgtgccagccgtacattttctaatctctgtgtgtgctaataagataccacgttttaacctattcgtccaatatagataagaaataagttattataggttttttttatagcaaagccttttttatcaaatattccggctgtgacattcatctgtctttgccaggtgaacattcatggccgatcgccacctttttgtgcgccttaggaattactccaaatttttccgacacgccaaaagactgtgcctcagcacattcaggcacctcgcgaggtcaattcccgccacacaaaaaagtacggggcagcaaccatgttcgccgccctgtacttcatgttctgatctatttctcttttcttacgcttcttccacagccttcacagcctgatcaaggaaatctgccttcacatactcgaccgttccctcatcaacagactttgcgatctccggacggatcgggatctgcgcgagaaccggaattccgtattctttcgcaacttcctcgatacggctctctccgaatactgcgatcttctttccgcagtccggacattcgagatagctcatattttcaacgagtccgaggatcggaacgttcatctttttcgccatgttgacggccttctcaacgatcatggagacaagctcctgcggggatgtcacgatgatgatcccgttgaccggaagtgactggaatacagtaagcggcacatcgccggttcccggaggcatatcaacgaacatgtagtcgatatcctgccagagtgtctcactccagaactgttttaccgcaccggcgatcaccggaccacgccagattaccggatctgtctcattctccagaagcatgttggaggagatcacatcgatcccggtggaggatgtcgccggaacaagaagttttccgtcctgtgtcacggtcacaccgtcatggatcccaaacgcattcgggatcgacggtcccgttatatccgcatcgaggattccgactttcgcacctgtcgcgcgcatccgacatgccattaaggatgtaactaaagattttccgacgccgccttttccgctgactacgccgatcactttttttacggaactcgccggatttaacttctcaaggaagctctgcggctcactcgttctgcttccgcagtttgcggagcaggttccgcagttatgggtacaattttctgctgtttcgctcattgttctctcactttctctactgttattcaggcttacattctgacttgcattttatgtacagagcataacctgatcgtcctgtactgctctccggatcttattccttgagtcctgtctcgatcagattgcagactgcttcaatggcctctttctcgtccggtccgtcacagtggacggtgatctcatcgccgcagcggatcccggatgccattacgtttaatacgctcttcgcgttgatttccttttctttataaaaaatcatcactttagaatcgaacttcatggatgtctggcagagcagtcccgccgggcgaagatgaagaccggtcgggtttacgactgtaacttttctttctaccattacctaattcctcctattctgattgtaagttcataaacgcaaaaaccgccccaaatgaccattcctcatttacgacgtttttattcatgaccaggcagtttcattgtatactacaattcccctaatgtcaacggagcatcccccggaatcgtttgacattttcccctcaccgggctacaatcaaaacaatatcgtgcacaagcaacgtgtccggccagccttcacgatcctgtcccgactggaatgccggcacgtccagatatccaacgaggagttttcccaatgaaaatacttgccccagacttatataagatcatcctgacgaacaaaaacatgaggacttcatccagaaacctctatattataaaaggcagcgaacgaagcctcatgatcgacacctcctggaacgtgccggagtgtctgtcggagatggaacaagccctgaacgagctctccatcgactgcagggatctcgacatcttcgtgacccacaatcatgtagaccacagcggctatgtctcctttttcaccgaccgcggcgcccgggcgttcatgaatccggtagagatcgcagcctcttccgaccgctaccatcgtttttatgaggacaatgatatgcgccgctcctacacgggtgaagtcggagtcacaaaagaacggactccggacgcatggcaggagatcaaggcaggcgccgaccagctcgccaaggataacaacgtgaatttcgactttccattcacgcccatcgcccccggagaccgtctttcttacggcggttacgacttcgaagttgtctcccttgccggacacacctccggtcagtgcggacttgttgaacgaaatgcaaagttattcttctgcgccgaccaggtgatcctcggccttgttcccatcgtcatcacttcaggaaaggatcagcatctcctcaccgaatacttcgcttccctcagggaactcgcatctgattacagcggataccgttttctcccggggcactacggtgaattcacagagatcaaagaagagaccgaccggatcatcgccggatacggggagcgctgcacacagctccgtcaggcacttgcagagagtaatcgcccgatgactctcctggaactcgaccaggcgctctacatccagcgcatgcagacttaccgctactccttcctgttctcctatctccacacctggccaaagctcttttcctgcctggactggcttttcgagaccggtgtgattgatcgcacggaacaggacggagttttgtactggtctctccggtgacacctattcgctgcgcccggtcctctcctccgcctctctcttcgagaacacgcacccgcagtaattctgccggtacagcgcgtgttctctggagagctccgtggatcgcttatatccatttttcttcttgaaatccgacggcagaaattcaacgccgtactcttttcccatctcttccccgatccggttcagccgctccgcatcttttaacgggctgatcgtgagtgtcgttgtaaagaaatcgaacccgccggcttttgcctccctcgcagcctcggaaaggcggagtttaaagcattccgtacaccgtgcgccgccttccggctcctgttccaggccttttgccgccgcgtagaaatcgtccggcacatacgttcccgccacgaaatggatcggatggcggtccgcctcgttttcccactctccgttgaattcccggatcaggcgctcctgctccgaagtccgttcctcgtactcagaaggcggatagatattcggattataataaaagaccgtgatctcaaaataccgggagaggtattccaggacataactgctgcaaggtgcacagcagctatggagaaacagcgtcggcacccctcccccgctctgaagttcctccagttttttttctaattctttctgataatttcgtttattcataaattctccaatgataacaagcgaaaacacgcttcgcgagtttccccttgttatcgtgacagtcgccaaagtcttgcgcaagcacagactttggctcgttgttcgcgtaaataaaggaagagaaaaaaggcagccggatcttctcctgctgcctgtatctctttttcggatccaccagacacatccgcacctgtgatccgctttcatcttttttgaaacgagtttctacaggaaatccctgatccgtttgctgcggaccggatttctgagtttccggagcgccttcgcctcgatctggcgaatacgttctctcgttacgttgaactcttttcctacctcttcaagtgttctcggatgtccgtcctcaagaccaaatcgaagcacgatgacctgacgctctctctctttgagatcgcctaataatgcatcgatgtgctctctcagcattacagactctacatttccctccggggtaaccgcgttgctgtccgcaacgaaatcgcccaggttggagtcatcctcctcaccgatcggagtctccagggatgcaggttctctcgcgatctgcatgatctccatgaccttgtcctctgacatatcaagcgcttccgcaagctctgtcacggacggctcatagccaagttccagggtcagctttctctgcatctttgacatcttgttgatcgtctctaccatatgaaccggaacacggatcgttctcgcctgatctgcaagcgctctcgtcacggactgacggatccaccaggttgcatatgtacttaacttatatccttttgtatagtcgaacttctcaacgcccttaataagaccaaggtttccttcctgaacaagatccaggaaactcattccacgtcctgtataacgctttgcgatacttacaacaagacgcaggtttgcctcgatcaggcgctctttcgcagactcatctccctctgcctttctcttcgcgagacgaagctcctcatccgcggaaagaagcggcacagtaccgatctcctttaaatacatgcggaccggatcttctgttccgataccttccagaaggtcgatggcgtctaagtcaatgtcctctccgtccttgtcttcacggtagtcatcatccagatcgtccagaagcatggaatcatccgcaagcattgcgtcatcgattaccggcacaacatcaatattgttatgctccaggtaattataaatttcgtccatctgctccggtccgaggttatctccggcaaaaaagtcgttgatctccgtcgcgtcaagggcattctgttttgacttgccgagtgcgacaagtttcttaagtttgtctaaaaatacttctttttccactgaataacgtcctttcaggttggggcttgctcaaactgctccacgatagttcattatataccatccagcgacatttttcaacttttttccttgaatttttcactgatttttagcatattcgaaacatctcatgccgctttgcggtcagtcttccgtcttctcttcctttttttccggttccgggctgcagctcagagtgactgcttccttcacattctcgatcttcgcctcttttaccgccccgccgaactcaccgtcgaggacccacgggacatcctcatctgcagtcaccgtgaattttgatgacttgaaccggatcatatccttattttcctgttccgggaacagaaggagtccgcttaagatgtttggaaggtccaccggtgacttcggcgtccggataaacaagccctcaaacagaccgtcatggaacgaaacatccttcggagcgagtccgctgaatccgccgacactcgtggtatttgtcaccattccgaagataaattccccgtctgcctcgccgtcatcccatgcaatatgcattttataagatttcagctttcccagcgccttgattgattccaggatatacgcctgatgtccgagaacatttttgacatcctgcggagtgctgtaggaaacctctgtaaacgctccgaacgctgcgatatacacaaaatacctctgatccccgaattttccgatatcgacaccgtaggatttaccgctcaccacatcccgcgctgcctccgtgaggtttgcagggatctttaaacttcttgcaaaatcgttcgtggaaccggacggaagatacccgatctccggtcgtttttttaacttcatgatgccggagatcacgctgtttaatgtgccgtccccgccgctgcagacaaaaagctccacctcactgccatactcctcagcgatctttgccgcatctcccggctcctgggtcacataaacggacggcagataacctgccctgcagaagatcccgaggatatcggataactgatttttaatggcttccttccctgaacggggattaaaaagaaatatcatttttttcatcatgatcacgctccatactttcaactagctctcgcagctgtccattgtctgcgcagctgcaatctttctataagccgcaaacgcattcgggatcggatacttttccttcagctcttcccgatctgcaaacagcagtcccggaatttcttctgttacacggatcagatatccgctcatatgccattccacatggctgaaaatatgctttgccgtcgggagttctttctcgatcacagctctgcatttcatctgttccagcacttctttcccggaaagttttccctccaggttcggaaactcatagagggatgccagaagccctgtgtcatcccgctttctaatggctattttatccccgcattccactaataatacggtcttttcctctattttccttttctttttcggtgttttcaccgggatctctgcggtcagatccttttttctcgcctcacagacggtatagaacgggcatggtgctccgcagagcggcgctccgttcggcacacagacgatcgctcccgtctcgatgagagcctggttgaagtccccggcttctccttcttttaaagttttcagggtctcctccaccgccagttccatcttctttttcactgcctgctttaagatatcctcatagcttcccgccactcttgacaggacccgcataacatttccgtcaactgcagggacaggaataccaaacgcgatggagccgatcgctcccgccgtgtaacttccgatcccgggaagtgagagaagcgccgcgtggtctgccggaagcgctcctccgtattcggagacgatgatctctgccgcttttttcagatttctcgctctgctgtaatagccaagaccttcccagcacttaaaaagttcctcttcctcacaatccgccagcgcctgcacggtcggaaagtgttccatgaagcgggcaaagtacggttttactgcctcgactctcgtctgctgcagcataatctccgagatccagatccggtaggcatcccggttctcacgccacgggagatctctcctgttttcccgataccacgaaaggagcggtcctctcgcggcatccagacgctccgtcagggtgaggttcttcccatccggaaagattttctggaggccggaatagagatccgcccccgaaacattcatttcatccttatacatatccatagactccgcggactgaaacttccccggagataatctcctttaacgtgccgtcagcgagacgtacaagcaatgcgccttccttgttgatcccctcggaaacgccgcggaactcgcccgccgggtccaggacgcacacctcattgccgagatttacgagattcgcattgtactcctcgatgagtcccgacatatcctgagtcttgataaacgtgtcatagtatccctcaaaggcctccatgatcgctgcgatgatctcgcttctcttctggatctttccgctctctatgtagagggaggttgcggtagccttaatgtcgtccgggaaatccttctggtttacgttaatgccgattcccgggatcacatactggatctccatgagttccgtgctcatctccgtcaggatcccgcagatcttcttcttattcaatacaagatcgttcggccatttgatctccgatttcagtcccgtcgatatttcaattccctttttcgccgcaagagccatgaccagcgtcagcatcgacgcagccagcggatcgatctgaggtctcaacagcatgctcatccagatcccgactcccgcaggggatgtccagacacggccccgtcttccctttccgccaagctgctgttccgcaactgccagagtcccgtggggcgcgccctgttccgcaaggctccggatctcgttgtttgtggagactgtctcctcaaagaatacgacattcgctcctgcccacttcgtatggatcgtactttccaactcttccttcgagagcacatccgcagatcctttcagaatatatcctttattccggaccgcttcgatctcatagccctcttctttcagctgattgatcaccttccagattgctgtcctcgatacaccgaacttctcacagagttcctgtccggaaatatagccgtctgtctcttttaataatttcaggatttctcccttcatctcattacctccaacagttcctaccaaatgctaaccgcgcttaagatcgtgaagatcagcaggaccgttccgaatcccatctggaacaccgccgcagttcttctccgccgctcccgctttgtccgggagagccagtattttcctgtggcgagatttaaagccgccgccaggaaaaagatcaccggaaagaggaacatgtacctctccgtgtcaagaaacgaaatgacggacatgaccaccacggcgatcccgatgatgatatgcatggcatcaagcgccatggattcgctcctgacctttcttcttttattgttttccgccatatttcagcgttctcctcatatctctatcctaccgtcagcttatccgaaagcagttcatggatcttcccaacgatctcatccggcgtgtatacacggtagacttccaactgcatcttttttgcaaacagctcaaggaccgcaccgtaaagatccctgtagtcccactcggtgcaaagcctcagcttctttgcgagaaacggaaagatcttttccgtgtagacacggtaacccgtgagcttcgcgaattcgtcctctttcacatacggtctcagccagatcttaaacaggtcaagctccgacatgatcctgccaaaataatacgcctcggaatatggcatgtcaagataatatttccgcccacagagtccgtaaagaaatctcagcccgtcgaaatagccgagcttcatgtttttcttcgtccttgcgctgtcaaactccaggatcccgccaagatttctccccggtgcgatctcatggatcgttacgtccgccgggatatccataaactttctccggtccacgccgatcccgtaaaggcggatcacgatgatatctttgtacccccggtccgtcagaagatcgaccgggacattgttgacactgccgccgtccagatacgtctttccgccgatcttttcctgcttaaagcccggaaagtaagcgctggccatcatcatgtccttcatggtccccggcggcgcttccttcacatcaaagtcctcttccttccggtccgtgactgaaaatgacgcggcacagaaatcacgtggtgagcgcctgatccgctcctcatccaccgtctcttccagaagttttttgagtggggcgatatcaagccccctgtctgaaaacagccgtttgaattctgccgccgcgtcggtcattttcatggatcgaacgccgaatttctttagttttgcgatcatgggatcatccacccggaataccgtggagtaggtcatattcccccagatctcctccgctttttccaggtcatccatacagatcagtgcgccgttcaacgcccctactgacgttcccgcgactcccctgatcttcacgccggcttcccggagcgctttccagacgccgatctggtacgcaccccgggctccgccgccctctaagacgatcccatattctttttcaagatcaattctcagtttcactcttctttgcaatctccgttacacttgtcacaaggccggccagggactggatttcggacggaataatgatctttgtcgcctttccgtccgccgcctttgcgaatgcctcaagactcttgagctgtaaaactgcctggtccgctcctgcttccttgatcatgcggataccgtcggcattcgcctgctggatctttaagatcgcctccgcctgaccttccgcctcgcggatccgtttttccttctccgcctcagcgtggaggatcgctgcctgcttatccgcctccgcatcgaggatcgcggactgtttcttaccttccgcaacgaggatcgtggacttcttctcaccttccgcacggaggatcgcctcacggcgctcacgctccgccttcatctgtttctccatcgcatcctggatcgctgccggagggataatgttctttaactccacacggttgaccttgatgccccacgggtccgtcgcaacgtccagtgccgaacgcatctttgtgttgatcgtctcacgggaagtcagggtctgatcgagttccaggtcaccgatgatgttccggagtgtggttgctgtcaggttctcgatcgccatgatcggattctcaacgccgtaagcgtagagcttcggatccgtgatctggaagaacacgaccgtgtcgatcttcatggtaacgttatcctttgtgatcaccggctgcggtgcaaagtcaacgacctgctcttttaagagaacccgttttgccacgcggtcgataaacggcattttgaaatggacacccacgttccatgtctcaagatacgcgccgagtctctccactaccatcgcctgtgcctgcggcacgatgcggatacaggagacgaagatcagcagaatgatgaagatcagtactaatactaataatgccggcatattcattcctcctttttttcattgggggatcatcatgatcccttttttatcccagaacgcccggatatcaccgaccgttctgatgttttccgggtcgataaccgttcagcatcctcacagttacctgggtcattcttatttttccgtatcggggatcggctccacgataagttttacgccccggacctctttgatccggacatgagtcccgacctggatcgtcaccgcgtcatccgcggatctcgccgtccactcctgtccgtctatcacggcggctccggacggatcattattgtcgatctttgcgatcactttcgctctccgcccgatcagcccgtttacgttcgtcttcacggtctcccggttgacaaaccgcatagcgagcggtctcgtaaagagcagaaggataaacgatacgatcaggaacaccacaagctgtacctgcacggaaacacccagcaccgcggctaaaaatgcggtcaccgcacctcccgcaaaccagatcgtcgtgagcgccatcgttgccgcctcaattccgatcaggattacaaaagctgccatccatccgatcatatccataaaatcactccttttacgcgcgccgctgtcttgccgtctcaaacatcaggatcgacgccgcgatcgcggcattcaatgactccacttttccggccatggggatctttacccaggtatccgccatggacgaaagtttttctgtcagtccgtttccctcatttccgatcaggaatgccgtattaccagtatagtcttcctgctcgtaattattcttcccggcgagatgcgccgcgaatacccggatcccccgcgccttcagatccagcacagtctgctccagatcatccgtatagaagaacggaacgcggaagaccgatcccatcgtggagcggatcaccttcggattatagatatccacagtatcgcggctcatgatgagtcccgtgatccccgctccctctccggctcttaagatcgtaccgagatttcccggatcctggagattttccaggaccatcaggtgggccggacggtcgctctttaagatctcgtccatcccgtaggagaactgtctgacaagtgccagcactccctggggcgtctgggtatcagacatcgcagcgaacacctggtcactgaccagctcatatcccggatattccgcaaggaacgcggcatttgccggatctttcgcgaaagtttcagaaacatagacacttttcacctggtctttcgggagctccgcggccatccgcacaccttccacaacgaaaagtccctgctcattcctcgctctcgccttcttttttaactcaatgaccgcctttacctggtcattttttgtgcttgtgatcattttcctgcctccggatcaagtttctccacttcctccatccagatccgtctcgcagcgtcactcggcattctcagatcgcctctcggggagacagccacggaaccgaccttcgggccgtccggcaggcaggagcgcttaaactgctgtgcaaagaaccggcggtagaaggtatttatccacttgtagatcaccttgtcctcgtaaactcccgcaaatgcgatctttgcaaggcggtagatcttcgccggatgatagccgtagcggagaatatagtagaggaagaagtcgtggagctcgtaaggtcccacaaggtcctccgtcttctgggagatttttccatcctccggcggcaggagctccgggcttaccggtgtgtcgagaacgtcatagagaacatccgcaagtgccttgtcaccgcaagtatccgcgtagtagctgaccagatggcgcaccagagtcttcgggacagaggcattcactccgtacatggacatgtgatcaccgttgtaggtcgcccagccgagcgccagctcggacatatctcctgttccgatgaccatgccgtttgtcttgttcgcgaggtccatgaggatcagggtgcggtatcttgcctgtccgttctcataggtcacatcgtggatcgccggatcatgtccgatatcctcaaagtggatggagaccgctttccggatgtttacttcttttaatgtcgcacctaacttctttgtaagtgtgaccgcattgttgtaggtgcggtctgttgttccgaagcacggcatcgtgacggagaggatgttctctctcgggatccccagcatgtcgaacgctctcgctgtgacgagaagagcgagtgtagagtcaagtccgccggaaattccgaccaccgcactcttcgcgccggtatgggcaagacgtttctttaagcccatcgcctggatcgtcaggatctcctcgcaccgtgctgttctctcccgctcatccgacggaacgaacggagccggatcgatatagcgatttaacgtgaggtctgtccgttccagggtaaagtccatataatcatatccatccgcctcagttcccggctggcaggtcgtcattcttcttctctcgtttttcagtctgacaaggtcgatatccgccgtgatcattccgtttttgaagcgctcggactccgtgaggatatttccgttttctgcgataatgtcatgtcctccgaatacaagatcctgggtggactcaccctcccctgcgttcgcgtaaatatacgcgcagacaaggcgggcagactgtcctgcgatcagcatctcacggtatccggcctttccggtcgtctcgtcgcttgcagagcagtttgcgatcacggtcgctcccgcttttgcgtgggaaacactcggcggatccatcgtccagacatcctcacagagctccgcggcaaccacgagttccgggatatttgtacagcggaacagcaccttgcttccaaacgggatcaggcgctctccccactctaccacatccggttttaccggccccggattgaaatggcggagctcgtagaattcagaatagttcgggagatgtctcttcggaacgagacctaaaagctcaccgctcttgatgacagccgccacattgtagagctttccgtccttcatccacggaagtccgatgaaggtcagcatgtccatatcttttgaggcatccaggagccataaaagttcttcctttgcctggtcgatcagcgtatcctgcaaaaacaggtcactgcatgtatatccggtaaggccgagttccgggaatacgaggattttcacgtccctggccgccgcttcctgcatcatcttccaggtctgttcccggttaaataccggatccgcaacctttaaatctggggtggccgccgccacccggataaatccgtctttcatctcttttctccttatacaacgattcagtcatagacggccttctccctattctgaaaatttccgcatggctgaatgatcattttttgttacgcgcaaaaatccattccagatcggctgcgccgatgggagttttgccttcaagccgatattttcttacggtcagcgcagtaaatgcgcagacctaccgggcagttatttttattatacactttttctctgaaaagagctattcttttcgcccgttttatatatatttcatctttatattatttttgaaaaggcgaaaggctgtgctcccccactgagcacagcctttcattcacgtacaatttccttgcattatacagttcctcgaaattgataccccttcaatttcaatgcttatgcagtatagcaaaatattgtgggaaatgctatggtaaatatagttaaatttgcacaattttattgtgtatatttactatcttctgcacaaatgtccgcgctggaaatgcaattcctttgtttttacaaaaaaacaatcctgtctgtcgtgattctgccggatgaaatccgcattttgtatacagtacgcattttttcattctgaatatcctgccggtataatttcctgtttccatgaaatactatctgggacatccggatcatgtatttcaatcactcacgaaaggacaggcgatccatgaatatttcatcagacctcgaccggaatctctcccattttcacgaacttctcgatgttcagaaaaatttcgatatcgtatatcacacactcaccatcggcggcagggatgcctgcctgtactttgtggacgggttcacaaaagacgagattcttctgcggctgatgcaggatttcgcctccgtaaaagcggacgcatttccggagtccgcccatgattttgccaggcagtacgtccactacggcgagaccagcgtcgagaccgatgaccagaatatctttatccagctcctctccggtctctcctgtctcctgatcgacggatacgaccgggcgatcctcatcgactgccggacttatcccgcccgcagcgtctcagaaccggaaaaagacaaggtgctccgcgggtcccgtgacggctttgtggagaccctgatcttcaacaccgtcctgatccgccgcaggatccgggacatcaatttcacggtggagatcatgcagaccggtgagagttcccacacggacattgcgatctgctatatgaagcgacgggtagatgaggaccttctgaaaaagatcaaagggcggatcgaggatctccatgtggacgccctcaccatgaaccaggagagtcttgcggagtgcatttttccccacaaatggttcaacccgttcccaaaattccgtttttccgagcggccggacacagcggcggcctccattcttgagggaaatatcgtgatccttgtggacaactcccccgcctgcatgatcctgccgtcctcagtcttcgacatcattgaggaggcagatgactactatttcccgccggtgaccgggacctacctgcggctctccagaatgaccgtctccttcctcaccctgttcctcacccctgtctggctcctctttatgcagaatcaggagtggatcccgggctggctggagtttatcaaacttgcggacgatatgtatgtgccgctgatcttccagcttctgatcctggaattcgcgatcgacggcctgcgcctcgcagccgtcaacacgccgagcatgctgacgaccccgttaagcgtcatcgccgggatcgttctcggcgaatactccgtaaaatccggctggtttaattcggaaaccatgctctacatggcgtttgtcaccatcgccaattactctcaggcaagcttcgagatgggttacgcgttaaaattcatgcgggtgatcctgctgatcctgacctcccttttgaacgtctgggggttcgtcctcgggaccgccatcgccgtctgctccatcgtattcaaccggacgatcgcaggaaagagctacatctatcctctgatcccgttttcctggtcagaggtcaaaaaacggtttctgcgcggacggcttccgcacacggagaaacgtcaaaactaaatttgaatccggcttctttcctctacaggctcacaccgcaaatatccctttctcaggaatatataacggttttatcagatctttaacgaccacttgctgagatcccagaccttcgataccagtccgtcatagaactctggctcgtggcagatgagaaggaccgcacctttgtactcctgaagcgctctctttaactcatccttcgcatccacatcgagatggttcgtcggctcgtcgaggagcagcacgtttgtctcccggttcatgagcttgcagaggcggaccttcgcctgctcaccaccggagaggacgcggacctggctctcgatgttcttcgttgtaaggccgcactttgcgagagcggagcggacctcatactgggtgtaggacgggaattccttccagatctcctcaatgcaggtcgtcgtgttgcccggcgccatctcctgttcaaagtagcctgggaactggtaatcgccgacctccacagttccggagatcgccgggatcagtccctggatgctctttaagaacgtggtctttccgattccgttcgccccgatgaccgcgatcttctcgccgcgctccatcaggaaattgagcggtttggagagcggctcatcgtatccgatcacgagatccttcgtctcaaagatcagctttccggtcgctctcgcatttaagaagtggaactccggcttcggtttctccttcgcaagctcgatgacttccatcttatcaagtttcttctgtctcgacatcgccatatttctcgtcgccacgcgggccttatttctcgcaacaaagtcctggagctttgcgatctccgcctgctgccggttgtaagccgcctctaactggctctttttcatctcgtagacttccatgaaccggtcatagtcacccacataacggtcaagtctctggttctccatatgatagatcaggtttaccacgctgtttaagaacgggatatcatgggagatcaggataaaggcattttcatagtcctggagataccgtttcagccactcgatatgctgcacatccagataatttgtcggctcgtcgaggagcaggatatccggcttttcaaggagaagttttccgagaaggacctttgttctctgccctccggagagctcgtcgacatccttgtcaagtcctatctcatcgagaccgaaggcgcgtccgatctcctccactttggagtcgataatatagaaatcatgcgccatcagaaggtcctggatcgttccgagttcctccatcatggcgttcatctcgtcctcagaagcatcccccatcttcgcacagatgtcattcatcttctcttccatctcaaaaaggaaggagaatgcgctctttaatacgtcgcggatcgtcatccccttttccagcaccgtgtgctggtccagataaccgacgcggacgttctttgaccactcgacctttccttcgtccggcatcatctttccggtaatgatattcataaatgtggactttccctcaccgtttgctccgatgagaccgatatgttccccctttaacaggcggaaagaaacgtccgtaaagatagcccggtctccgaaaccatggcttaagtgttctacatttaaaatactcataaaacttcttactattccggcttctccttgatcttcagccgttttccctttctcctggaattccaggtacgttttgaccctgctatccggcaaaagcatgtactccgtcacagcagcacattaatacggcagcaaaaaggctgtgccagacagcgtttccgtcatctgcacagcctttttaatattaagcatttatactctgcccgtaactgttcagttacctctgctcattattcgtctacactgtagttcggagcctcttttgtgatgtggatatcatgcggatggctctcgcggagtgcagctgcggagatcttcacgaaatggctgttatcctgaagctccttgatattgtgggcaccacagtatcccataccggcacgaagaccgcccagcatctggaataccgtatcctcaacgaatcccttgtaagcgacacgtccttcaacgccttccggaacaagcttcttcgcgttcgactggaagtaacggtccttactgccgttctccatagcggaaatggatcccattccacggtaaactttatattttcttccctgataaagttcgaagtctcccgggctctcatcgcagcccgcgaacatggatcccatcatgcagacattaccgccggcagccagtgcctttgtaacatctccggaatacttgatgccgccgtcggcgatgatcggaataccgtactccttcgcaaccgcatagcagtccataaccgcagtgatctgcggaacaccgatacctgcaacgacacgtgtcgtacagatcgatcccggtccgataccaaccttgacagcgtcaacgccggcttcaatcagggctcttgtagcctcaccagttgcaacattaccggcgattacctgaagatccgggaatttctccttgatcatctttacgcagttgataacgttcgcagaatgtccgtgtgcagagtcgagaacaacaacatcgacctttgcatttacaagggcttctgttctctcaagaacatttgctgtgattccgattgcagcaccgcagagaagtcttccgtgatcatcctttgcggagttcggatacttgatctgtttctcgatatctttgatcgtaatgagtccttttaagttaaagttttcatcgacgatcggaagcttctcgactcttgcctttgcaagaatgcgctttgcttcctccatagttacgccttctttagctgtaaccagatgctcggaagtcatgcactctttgatcttcttggaataatcttcctcaaatttcagatcacggtttgtaatgataccgacgagctttttaccctcagtgatcggaacaccggaaatgcggaatttcgccatcagctcatctgcatcttttaatgtatgttccggggacaaataaaatgggtctgtgataactccgttttcagaacgttttaccttatctacctcttcagcctgcgcctcgatcgacatgtttttgtgaatgataccgattccgccctgtctcgccattgcgatcgccatgcggtgctcggttaccgtatccatgccggcactcataaatggaatattgagcttgactttctttgtcaggtgtgttgaaacatcaacctgattcgggattacttcagaatatgcaggtacgaggagcacatcatcaaatgtaataccttcaccaatgatcttacccattttatggttccctctctttcttctgttttattatttttaaaaaaaatataactaaaaactgtcattgcgtcagttccagttattatcctagagtataacagctttgtcgaattttagcaaccgtcaattcatataatttttttcacttttttattatttttgcttataaatttccgaaaatttttcagcccggcagttccagcctcgccatacggaattaccggtactctttcaggatctccagaaactcaagattttcctcgtgcgtccggacgcagatcctgtaaaatctcgaatcgagttccctgtagtttttgcaggaccggatcagaatcccgtgttccaggaaaaactcgtacagccacgattcctgctccgtcttaaaatccttaaacagcaggaaattcgcctccgaatggaagactgtaaatcccgcctttgtgagtccgtccgaaagaatatttctctcct

SEQ ID NO: 2071 - DNA, 2457 bp, Unknown
  gut microbiota DNA sequence
gaacgggatccgctcatccgaaagagccgccagccccgcttcctgggccgggatcgatacgctccacggctgccagttttcttccatccgctcgacaagtcccggatccgtgcagaatccatagccgatccgcagtcccgccatcgcgtatgtcttcgtaaatgccctgaggagaaataacgttcccccattttccggcattccttccttccacgccagaaattcccggatacagccatccgccttttcttcatttaagaattcgataaagcattcatcgatcacggcaacgatccccgctcttttgcagtaattgagaatctttaagagatccgcttttctcatcatcgcaccggtcggatttgccggtgtacacaaaaagatcatatcggggcgttcttttttcagaaattccagatattcggaaatgttcagaaaaaaggattccgattcttttaagtaaaaaaaggaaacttccgtcccacatgctttcaatgcggtctcatattccataaaagacggggcggggatcgcggctttcttcgggcataacgtctgcaccagccggaatatcagctccgcagcgccgttcccgaagatcatcatctcccccgggatcccggtaagttccgacattctcgcgcggagtgctccgcaggtactgtccgggtatctggtgctgagtgcgatgctcttcatcgccgcctcccacacaaaattcggcatccccagtggatttacattgatcgaaaagtcaagctccacgttccggttccgataaacatcaccgccgtgtccgtattccatcactgctcaccgccttttaacagcaccgggatcccgcagacaacgcgaaagaccgttcccgcgcgtgctgccagatactggcacgcgtccccggtcatctcacgccagaggcggtcatccgcgtccaccgggacgatcccgcagccgatctcatcacaggtgatgactgccgccggatttttttccagaatttcatccagaaagcggtacatgcacgcttctgccctgtccccgcaattttcctcatttccagccggagattccgtccgcagtcccgactcgtccggatccgtgatcattcttcttatatacatatgaagatttaagatcgcctccgcgttgaacgcatcggcaaatcgcgttttttctccgtccgccgcacagataaagcggtcttctctgttctccgccgcccttttcatggcaaattccgctttcccctgatgcgctccccctgtgatcagcgtgatcccgtctgtcatatgctccattttctccttgtcctctctctgagccgtgttcttctccgcagtttttatctttaccggaattccgcagaggacctcatacacttcatcggcctccccggccagcgcaatattgatctctcccagaaggttccggtactcttccgtctcctccgagtatgccccctgatctccggagacatcatttgtcacgatcacgaaaaagccggacttcttcctgaccttttcgatcccggcaaggatcctctcttttgcatgttccgccggattcttcatatctccccggtacatctcattcgccgcaaggtttgaaacgcattccagaagacagcggctcccagccgggatctccgccgtttcaagatccaccggacattcgatcgtcctgaaattcttctccgcccgcatattccggtgtttccggatccgctccctgcactcctcatcccaggcgatcatcgtcgccagataccaggatgggcaggtcttattttcttccgcccgttctcttttatcctgttcaaggatcagcgattccgcaaatgccgattttccgctcgaactgcctccgtttacaagaatcatcatagtctcttctctcctattatccgtgtacatcacaagcgctgccgcatagcatctttttacagcccgggatcatacgccgccgccaccgtcacgccgtctcccgcttcctttttaaataagatccggcagtctctgactcccatccggcaggctgccaccgcagatctctcgcagacatttccggttcccgtcgtctttttgacaaattccgactctgtaaacgttcccggctggctgttcagctcctcactggaaaaggtgagaaacgggacctgcagcgtatttgcaaaatcgatgatcccctgttcctgctttttgatatcgatactcgcgaccgcaaagacacttctgagatcgatcccgttccgcctcatagcgtcctccaccgtctctcggatcttctccgcgggagttccccgtttgcatccgatccccagtgccacacacctcggtacgaggcgcaggacacggtctgacgggatcccgtccttctcccggtccgacaccgtgatccggatattccgtttacagagcctgtcgcgaaacagtccttccggtatttttttccatcctg

SEQ ID NO: 2072 - DNA, 15631 bp, Unknown
  gut microbiota DNA sequence
ctgcccaaattaacgcctgtggagatagtaggttacgaggtcgatgaagcaggaagcccattggcttaagacaatgggtagttcactaagcagaaaaataatggctcggcaagtctgctcatccggtccatcagagtgacatggacgaaccgctatttgtacacaataagaggaaaaatcatgaaacccagtaatattaaaacaattgcaggccggatcctctttttcctcgcagtatgcttcatatttattatgccgattttaagcctccttcggatgagtctgacgaccgacggaggctttggtctgcaaaactatgtggacatgctgcatgaggagagaacggcaaaagcgatccggaatacgctgatcatatcggtatcttgagaacaggttgggaacagagcaacgaaaaagagcgatcatattgtaacaatatggtcgcttttcgtatatcaagcgacaggggaaaaggcgcagcttgaccggcagtggcatctctgatagaatggatggcagaaaatgatcaaatgtatagttcacggaggcggttatgcagacattaaaccaggatatcaaagagaaaacatttaagcgggtctatctgctgtttggggatgaaccgtttcttgtgaacagttataaaaagcgtctccgggaggcgattgccggggatgacacgatgaattacaactattttgagggcaaggggccggacgtgaaggagatcataagtctcgcggacaccatgcctttttttgctgagcggcggcttgtgatggtcgacggcagcggatttttcaagagcagtgcgccggaggagcttgtgaattatatcgcggagatcccggaatcgacctgcatggtctttgtggagagcgaggtcgataagaggaacaagctttataagaaggtcaaggacaatggatatgcggcggagttaaagaagcaggatgcggatcagctcatgcgctgggcggcggggatcctcgcaaaggacgggaagaagatcactcgccaggtcatggagtattttatggagcggaccggggatgatatggagaatatccggatggagctggagaagctgatctgctacacgatggggcgcgaggtgatcacgaaggaggacgtcgaggcggtcgggacggttcatgtcacgaaccggatctttgagatggtgacggcgatcgtcgcggggaatacgaggaaggcgatggatctctatgaggatcttctgactttgaaggagccgccgatgaggatcatgtttctgatcgcgaagcagtttaaccagcttctgcaggtgaaggagcttgcggggaagggcgcccagaagggggagatcgcttcgaaggtgaaggtgccgccgtttgtggcggggaagctgattgcgcaggcgagggcgttttcgcgggagcagatcctttcgtatgtggagttttgtgtggaatcggaggaagcggtgaagacggggaggttgtcggatcggttggcggtggagttgttgatcgctaggaagtatcggtaggtattggcgagagtacgcacaggacaggtttcagtttggaaaaattggcggaagtacgcgccggcctgccttcagactcaggcgcgagtggattccgggggcggttcctctaggcttgcgaaaaaatgctaagggcggagagcaggggacacaactcgctgcgctcagacaagtgtcccctgttctccaacgcattttcccgcgagccaagaggaaaccaaagcccccggaatcaggcgtctgagtctgaaggcagaccggcgctgggggttggcttggcgaggggacgcgcaggtatggcttcagccacaggcgcaagaggaagccaaagccccggaatcaggcgcctgagtctgaagccatacctgcgctgtgcagtggcgggagtagggagaggatagaaaaaagaaccgccggttccgacacaccctcggaatcagcggttcttttttatttatgcgtaataatccagttcgatgataattaagccattgcgcttacagctttagccaaacgggatacttttctggaagcggtattcttgtgatatacgcccttggaagtagccttgtcgatctcgcttgtagcagcaagaagtgcagcctgtgcagcagccttgtcgccagcagtaattgcagcttctaccttcttaacgaaagttttcactttggatctgattgctttgtttctagcagctcttgtctctgctactacgattcttttctttgcagatttgatgttagccaatctgtacacctccatattattttaaaaattatctctgtttgttttgcatcaaagcctggacacggacagttcaatgtaaacatactattacattctagcgaatatttcccaggatgtcaatacataaattgcttttttcgagagaaaaataagagagtctggttacttttctttggtaggaattttcagaactgaaaattccgtatgatacagtggagaccgcggattttgccgatttggaatgcgaagcatcggcaaaatcgagttatagtgcgcaggcactataactgagaatggttacttttcgtgggtaggaaggagaagatgctatgaggcaggcgaatgttgattttgtggtgcggacggatctggcgatcgaggagcgggagcgggtctgggagagcgggagtgagatcgcgggggtccggatgcgggagtgggaagcggcggacgcagggatccgggtgacggaggtcttggtgtgtgatgagagaggggaagaggcgctcggaaagccggtcggtgtgtatctgacgctggatgcgccgtcgcttgcgaagaaggatgaggattaccacagggaggtctcggaggagttatcggggcttttgcgggggatgtttgtggatcatgggcttgaggcggagcggatggagcggccggtgaggacgctggtcgtggggcttggaaatccggaggcgacgccggatgcgctgggaccgaaggtgctggagcatctccaggcgacgcggcatctggcgatggagtacgggacggatttttgctggaagcatggatatccgatcctgagtgggatcacaccgggagtcatggcgcagacggggatggagacggcggagatcgtaaaggggatcgtgcgggagacagagccggatgccgttatcgttgtggacgcgctggcggccaggagtgcggggagactcggagtcacggtgcagcttgccgatacggggatccgaccgggatccggggtcggaaatcaccggagcgggctgacggaggagacgctggggatcccggtctttgcgatcgggattccgatggttgtcggggcggcggcgatcgtgtacgacacggtcggggcgatgacggaggtgctgagagagcgggtggaatgcggatccggtgatgaggagaaaggaacaaagaaagaaaaaacgaagaaagaagcaatcaagaccgaagaaacagaggaagataaggaaacgcgaaaaaacggtggaaaatggacgaaggaagaaccccggagaagagaggaaaagcggatgataccggaaatgctccgggttgaggaggcttttgaactcgtcaaggaacttttaaagccggatcttggtcccatgtatgtgactccgcacgatattgatgagcgggtggattttctgagctatacgatatcggaggcgatccatggggcgctgttttacaataaatgaaaaagggtaactgttcagcagatctgtgcacttgctgcgctgactgtgataaatctgctatgcatctgaaggaagctccaggggaggttcctgcaggcgtgtaatgaacagttacgaaaaatgattccgttacaggagctgatggaaagtgtgtgcgaaatttatccgaaatgagataagaaaaatccagtgaagaaaatgcgatttcttcagcatcgatagcgtgatgtactcgaaaaaagcagcagacttgattggtatccggcgatcgggcgtaaaggtactgaatcaccgctcttgcacataaactgtaaggaaacggcgggccgggcggtaaggatgaggcggagatggtactattttaagcggatgcttgaggcggaccgccggtttgtcgtgcagatgttcggaaatttactgggagtcctccggtatgccgggatgtggatcgggatcgcggcggtatgtgcggcagttttatatctgggaagaaaagttttttcggtttcgctgggtaaattttatgaggatcatgcggtacagatcgctgacgatattgtgcggggatttcttcctgcgtggaaagaagatgaaggcgtatcgtttttccgggaaagtcggaaaaatgaaaacagcgggctgaatgcggagtatgaagaaatcttcgggatcgaaaatgagaacgaggcgatgcgggcggaatggatcacaggcagggaggctggagaggaagaatacagggacggaagcgggaaaatgatacgggaaaacggggacgaaagcgggcaaacaatacaggaaaacggaaatgtgaacgagggaataaaagaggggatgaacggaggactagacgaaagcagtctgtcagaacaaaccgaaagcgggcagcttcatgaggaaagagctgcatcggatgacaatcttctggcatccggaattttcaacaccggaaattccggcattatattagaaaaactgaatgattacgactatctgatgaaaaaattctataatgtccatccgaccacgacggcgagccgtgatctgatgcaggcagaaacatttctgtccaccgatctttccatcgaaaagaatgcggacagtccgcagatcctgatctaccacacccactcccaggagacttacgcggattatccggaaaatccggaggcggatgtgatccatctgggggaggagctggcggtccttttgcgggaacgaggttacaacgtgtttcatgatgagagtgtttacgattatcgggacggaaagctggaccggagtgcggcgtatacctatgcacttgatgggatcacgggacttttacagaaatatccgtccatcgaagtggttttagatatccacagggacggcgttgcggatgggacgagacttgtgacggaactcggcgggagcgagatggcaaaactcatgtttttcaatgggacgtccatgagcccggacggaccgatcgaatatcttccgaatccgaatctcagagaaaacctggcattcagcttccagatgcagcttctggcggatggaaaatatccgggactgatgagaaagatctatttaaaaggcctccgctataatgagcatgtccgggcgcgctccgccctgatcgaggtgggcgcgcagacaaacacatacgcggaggcgaaggcggcgatggagccgcttgcagatatcctggatcttgtgttggatcatggacagggagattaaaaaatccgaaggccaggtgactgccgggatttccttacatactgatcttcttttcccactttccggacatataataaagctcgacgagaatggatgccacgatccatccgatcggataaccgaagccgacaactgcggccgtgttgcagatcgaggtcgcaatatagagatagatctggcggaacaggacaaaggagaacagcatgatcagcatcggagtcctggaatcaccggctcctcgcatggctcctgcgacaacctggttcgggcagcagaacgcgagcatgaagacgttcatccggagaaacatggttccgtagcggaccacatccggctcctggttaaagatcgcgacaaggctcggggcgaacaggaagaggatggcggcgcttgcgaacgtgataatgagagcgaggcgcatcgcgacaccggttccttttttggccctcggaaggtttccggcaccgaggttctgactcatgaaggtcgtggaagcctgaccgatactctgcatcggaagaaagacgaactggtcaatcttcgaataactgctccatccggccatacagctcgaaccgaaggtgttgatgtaggactggacatacacgtttgagaatgaggtcagcgactgctggaatccggtcggaagtccgatcctgaggatctgcttgaagattcctttgtcgatccgcagatcacgccaggtaagtctgtaattttccgtgctgcgggagaggacaacgagtaccagggcagcggagatgaactgggagatgatcgtcgcgtaggcaacgccctcgatcgccattccgaagccgaccacaaagaggaggtcgagcgcgatgttcatgacgctggagagacagaggaagtagaggggacgtttcgtatcgcccaccgcgcgcaggatcgcacttcccatattgtatacaagaagaccgaacacgccggaaaaatagatttcaaggtacacggacgcagacggaaggacatcctccggtgtggacatgaattccagcatatacggggcgacccagatgccgagtccggtcaggagaattccgcagatgaaagtcagcgccatcgtcgtctcgactgcgatgtggagtttttcatcatcgtgcgctccgtagtagcggctgatcacgacgccggcgccgacggaagttcctgtgaagaacatgacgatcatgttgatgatacttgttgtggacccaacagcggcgagggcgtgggagccgacgaagtttccgacgacgagactgtctacggtgttgtagagctgctgaaagagatttccgatcacaagcggaaccgcgaacatgatgagaagtttcgtgatggaaccggatgtcatgtccatggatttttgttttttaggggtatggttcatagcgggttctccttggcgtgacgcaaaaggctgcagtagttaccggatatgtttccaaaatggagagtcatgcaggatcctgtccggatatcgcagcaggaaaatggtggacgggtgacaaaagagggaccgggagcagaaatcccagtcaatgaaaagttcatgtaaagaatgttaattaaagtctaaatcagaacggttggaatgtcaattgctttaacaaaacctgtaaaaatgaaaaattgtaaggtaaatatttgcgaaggaagacccgggatcataaatcctgaaagtgagaccatggctcccggaaaaaccggcaaaatctgcgggaggtcatgttcagaactgcttgcgcatgaaggcaaataatgctatatttaatatgataaattgccatttctgcccccatcagcctgctcagaaaatctgatgggaaaatgaatgcgataaatatagaagaaaggtaattattcagtaggtctgcgcacttgctgcgctgaccgtaacaaaacacaggcttgaaggcaaaaatcccatcggcgaagccgatttggaatggatttttgctcgtaactgtgtgggactgaacagttacgaagaaagatgtgcaggaaaccggctgtctcagagcgccggatcactgcagaagtaaaaaagaagagaggaacatgaatggttcattattcccaggataaaatcagaaatttctgtatcattgcccacatcgatcacggtaaatccacgctggcggaccgcattatcgagaagaccggtcttttaacgagccgtgagatgcaggcacaggttctcgacaatatggagctcgagcgcgagcgcggcatcacgatcaaatcccaggcagtccgtactgtctataaggcgaaggacggcgaagagtatatcttcaacctgatcgataccccaggtcatgtggactttaactatgaggtatcccgaagccttgcggcctgcgacggcgcgatccttgtcgttgacgcggcccagggaatcgaggcgcagacacttgcgaacgtctacctcgcccttgaccatgacctcgacgttgtcccggtcatcaataagatcgaccttccgagcgccgatccggaccgtgtggcggaggagatcgaggacgtgatcggacttgaggctcacgatgcgccgaggatctccgcaaagatgggcttaaatatcgaagatgttttagaggcgatcgtccacaagatcccagctccgaagggagatccggaggcacctctccaggccctgatcttcgactccctctacgattcctaccgcggcgttatcgtgttctgccgtgtgaaagaaggaaccgttaagaaaggaaccccgatccagatgatggcgacgggcgcttcctacgatgtcgtggaggtcggatactttggcgcaggccagtttatcccgtgcgatgagctccgcgccggtatggtaggttatattaccgccagcatcaagaacgtaaaagatacccgtgtcggcgatacggtgacgaaccgcttaaatccatgtgcagcaccgcttccgggatataagaaagtcactccgatggtctactgcggtctctacccggcggatggagcgaaatatccggagcttcgtgacgccctggaaaaattacagttaaatgacgcgtccctgttctttgagccggagacatccatcgctctcggattcggattccgctgcggattccttggacttttacacttggagatcatccaggagcgcttagagcgcgagtacaacctcgaccttgtcacaacggctccgggcgttgtataccggatccacaaaacgaacggagaggtgatcgacctcacgaacccgtccaacatgccggatccgtccgagatcgactatatggaagagccgatcgtctccgcagagatcatggtcacgaccgaatttgtcggcgcgatcatgcagctgtgtcaggagcgccgcggcatttacctcggaatggaatatatggaagagacgcgtgcactcttaaagtatgagcttccgttaaacgagatcatctacgatttcttcgatgcgctgaaatccagatcccgcggttacgcgtccttcgactacgagttgaagggatacgagaagtctgagcttgtcaaactcgatatcctgatcaacaaagaggcggtcgatgccctttccttcatcgtcttcgaaggttccgcctacgagcgaggaagaaagatgtgcgagaagttaaaggatgagatcccgaaacacttatttgagatcccgatccaggcggccgtcggcggaaagatcatcgcgcgtgagaccgtcagagcgatgagaaaggatgtcctcgcgaagtgctacggcggcgatatttcccgaaagaagaaacttctcgagaagcagaaggaaggaaagaagcgtatgcgccaggtcggaaatgtggagatcccgcagaaggcgttcatgagcgtcctgaagctggatgaggagtagacggcagagggaagaacagcgattttaaaaatcagagatcgattggcatgatagattctgccggattctggaaaagctggaaaaatacagtctgacagacaaaaggatatagtccagaatactccctgtctgcgccgcagcaggggaaaaacgcaaaagtccatttccggtataagaaatggacttttcctgtatccggaccggagaccgaattcctgactgcagggcctgtcaccggcagttcttttcaaatctatggaaacggaccgattttgccgttacttatctcctgaaaggagaacggtttccctggcggagacagaccctgaaaaaacagagtgaggtacacaatgaaacttacaactctttgttatatcgaaaaagatgaaaaatatctgatgatccaccggatcaaaaagaaacatgacgtcaataaggacaaatggatcggcatcggcggaaagtttgaacgcggggagagtccggaggactgtatcctcagggagacgaaggaggagaccggtctgacgctcacagactaccggctccggggtgtcctgacttttgtatacaacgatgacgatgaggagatggagtacattttcctctacacggcggacggctttgcgggggagctcgcggaatgcaatgagggaacgctggagtgggttccgaaaacgcagatcgaccgcctgaacctgtgggagggcgaccggatcttccattatcttctcgatgaagatgcgccgtttttctccttaaaactccgctatcaggatgatcttttaaaggaggcggtcctcgatggaaagccgttggagcttctcgatctgctccgtgaagacggggaaccgtccggtcaggtgcgctggcggactctggtccatcttcacggagactggcaccggacgagccatgtctgggtcgtgagaaaacgcgcggacggaggacatgacctgcttttacagaagcggagcggggaaaaggattccttcgcaggctgttatgacatctccagcgccggacatatcccggcgggacaggactacctggaatcggcgctgagagagctgaaggaagagcttgggatcacagcgaaaccggaagagctgcggcttgtgggagtccacgacgggcgctatgagggcgaatttggcggacagatctttaaaaaccatgaaaagagccatgtcttcgtctatgagaaaccggtggagatcgaagacctgaaacttcagaaggaagaagtggagtccgtaaagtggatgaagatcgaagatgtccttgcggcggtaaaagcgcatgatccgggatactgtctgtttgaggatgagatcgaaatgctctgcggggtgctcaaatgagcgggggcatggaattatatctgcacatgccgttctgtgtgagaaagtgtgcctactgcgatttcctgtcattcccgtcaggagctgagacgcagagaatgtatgcaaagcggctgatgaaagacatcgacgtcatgggaaaacgatacggggagatcccagtcgagacgatatttatcgggggcggaaccccgtcggtgccggattctgcgctgatcgtggagatcatggaacatgtcagacatgcgtttcatgtcgcggatggcgcggagatctccatggaggcgaatcccgggacggtgacgcgggagaaacttacggattaccggaaagctgggatcaaccggctgagcttcggtctccagtcggcgaatgaccgggagttaaaacttctggggcggatccacacctgggcggaatttctggagagctttacgctggcccgcgagtgcgggtttgcgaacctgaatatcgatctcatgtcggcgcttccgggacagacctgtgagtcatggaaggagacgctctcgcgggtcacggatcttgatccggaacatatctccgcatacagcctgatcatcgaggaaggaacgccgttcggtgaacgatatgggagcgaagaggggcggaaacttcttccggatgaggactccgagcgggagatgtaccatgagacgaagcggtttttaaaggactgcggatacgaacggtatgagatttccaattatgcgaagccggggcgggagtgccgccacaacatcggctactggaccggagttccgtacctgggactcggactcggggcgtcctcctatctggacggctgcaggttcaccgtgaacccggatatgaagcagtatctcgaagaaaagccgggaatgtttgcagatatcgaaaagctgacgaagaaggatatggaagaggaattcttctatgtagggctccggatgacggccggggtgtcgctttcagaatttgaaagacgattcgggatctccgcaaaggaagtctacccggggctgatggaaacattcgtgaaagaaaaggccgcgcgttttgaaggcgaccgttttgtactgactgattacgggctcgatgtgagcaactatatcatggcgcagtttctgcaggactgaagttcctgcggaggctgcgttttttagattcatgggaaattttgactttatgagtataaagtaatacagaaatatataggcaaagtaaaagtatggtaaaaatgtataaaaagatatcaaaaacggcgaaaatgtgctataatttatacaattcttgagaatgcgatattatacattctgcacggagaataccgatccagaaatacagggggatatttttatggctaaggaaatgatcgcaatgctccttgccggcggacagggctccagactctacgcgctgacacagaagcttgcaaaaccggcagttcctttcggcggaaagtatcggatcatcgacttcccgctctcgaactgtgtaaattcaggaatcgataccgttggaattctgacccagtaccagccgatggtgttgaatgagtatatcggaaacggtcagccgtgggatcttgaccgtctctacgggggagtccatgtactgccgccgtaccagaaagcgtccggctccgactggtataagggaaccgcaaacgcgatctatcagaacattccgtttatcgagcgctacgatccgcagtatgtgatcatcttatcaggtgaccagatctgcaagcaggattacagtgatttcctccgcttccacaaggagaaaggagcggagttcagcgttgccgttatggaggtcccgtgggatgaggcatcccgcttcggactgatggtcgcagacgatgatgaccggatcacggagtttcaggagaaaccgaaaaacccgaagtccaacctggcttcgatgggaatctacatcttcaactgggatatcttaaagaagtacctgatcgaggacgaggcggatccgaactccgagaacgacttcggaaacaacattatcccgaaccttctgaaggacggacgaaaaatgtacgcctaccactttgagggatactggaaggatgtcggaacgatctcttccctctgggaggcaaatatggaggttctggatccggagcacagcgggatcaacctctttgatgagaattggaagatctacagccggaacagcggcatgaccggacataagatcggctccaacgcggtcgttgagaactgtatgatcacagacggctgccggattgatggaaatgtaaagcattcgatcctgttctccggtgttaaggtagaaaaaggtgcaaagatcgaggatgccgttgtcatgggtggaaccgtcatcaaggccggtgctgttgtggaacactgcatcgttgccgagaacgttgtgatcggtgagaatgcgatcgtcggttccatgccgaaggatgagggacacggtgtcgcgacgatcggatccgggatcacaatcggaaagggagcaaagatcggcccgaacgccatggtcaataaaaatgtggaggacggtgaagaacaatggtaaattccaatgcaaatgcgatcggtattattttcccgaacagttatgacaatctggtgccggaacttgcgggcgaccgcctgatggcatccatcccgttcgcgggacgttaccggatcatcgatttcctcctttcgagtctcgcaaactgcgggatcagcaatatctccatcgtggtccgcgagaattaccattccctgatggaccatctgggatccggccgtgagtgggatcttctcagaaagaacggaggtctcagcatcttcccgccgtatgcggagaagaacatgaaggtctacagcggccgtgtcgaagcgctggagagtattctgcagttccttaaaaataagaaagaaaagtacgttatcatgaccgacgcaaatattgcggtcgattttgatttcaatgatatgttaagggcacatatcgagagcggcgccgatgtgactgtcgcttacacggaacaggagatcccggcggagctgatccacgcgggcgtccatggggacatgtattacacgttaaagctcgaggacgggcgtgtgaaaaggatcttcatgaattccgaggagagcggaaaacagaatctttccatgaacatctatattatggaaagagaagctctgatcgagaagatccatgcggcgtttgtacgcggctattcctattttgagcgtgatatccttgcgccgcgcttggagaaatataacgtccgcgcgtacaagtatgaaggatattatgcaaggatctgcggactgaagagctactttgacgagaatatgaagcttcttgacgatgagaatctggaagcgctgtttaccggcggtccggtctacacaaagatccgtgacgacaacccgacgagatacattaccggatgtaaggcaaaaaataacctcgttgcagatggctgtgtgatcgagggagatgttgagaactgtattcttttcagaggcgtcaagatcgagaaaggcgcgaagatcagaaacagtgtcctgatgcaggatacggtcgtgaaggccggcggacgattggattacgttgttaccgataagaacgttacgatcgaggtcggacaggagcttaagggaacggatacacagccgttttatgttgccaagggacatacggtttaaaaaagcaaaggataaaagggaatcttccgtgagagactggatgctccatggagattccctttttgtgtatatgagaacatagaaaaaatgaaatcggaaaggcagagcgctaaagtctgtgaagcgcggattttcctgtaaaaaaaggtgacctgcgcaatggcagatcacctttttgtaagaaaacggagcatcaggactggatcagatagacctcagaacgttccacgccgtgattttttgtttccgaatgtgtgttgtaaaaaatatcgatgtgttttcctttgacgccgccgccgacatcctcagcgatatattcgacgccgtcgatgagaagatggcttccgagcgggatgacgcgcgggtcaacggctacggtgcggctcgcggtggcctgggttcctgtttttgtgaggcgtccatatccttcggagcagcttctgcatgggcagtaggcggttgtcttgaaggtccctaaggagacgagagtcgcgtttttgatgatgcctgtctcggtatcgtactggtaggcgatcggaagtgcctgtccgtttacgctgagtttgatcatgtaggtgttgtccggaatggaggaccagtcgatcatgatctcaaagccgtgggcgccgtttccgatgccgcttgtctttaagtcatcgcgttcgatatctgcggtggcggtctctgctaagagagagtcgcctgtatgggcgttgaccacggtgacagtgacggaaaccggggtgtccggggccgcggagttccacgcccatccggagatcttatttccgtcgatgctgtcgaggtggccagagtttttcgaggtgcttgcgaaggcgcatacggtgtttaggagcatcgcgaggatggttattaaaacactgatggtcattctgattttcttcatataacatatcctttcttttttgtttcatatctattacaaagtatatgttgagatgtaacaaatatgtaacaatttggaaacaaatatgtattatacacggatttttttatttgtcaagttttcgaggggtacgcggtgaggctccgggctggagtgcaggggatgcggggatggttcctctaagctcacgggtggctgctaagggcagaaaatcggcgacacaactcgctgcgctcagacaagtgtcaccgattttctaacgcagccacccgtgagctaagaggaagccagatccccggatcaaagcacgccatcc

SEQ ID NO: 2073 - DNA, 92929 bp, Unknown
  gut microbiota DNA sequence
cgggcttttcgaagctcggcgttttgtgttgggaatatgaaatgagctgccgcacgttagtgcgacagccccttttctgttattttgaatcgagaaagcaatgcagagagcaggtcctgtaggagccatacactaaaaatgcacaagaaatacactgctaatttagtaaataggtatatatttagatattttcatagagaatgaccttgccttttttggtaaatgttgtttgaaggggacagtgcctctttctgtttatgcatatcaattttgaccatcagtttttgtacagattcccgggtgacagtttcgagatgaagtgataaaataaaagcaaagcatgtaattctgagcatcttaatatcatctaaaatatctgttttcaaatctggaattttcaatgctttttatcacaacaaacaaaagcagagagagttctggaatgaaaatgtacggagttctctcggaatatggaggactgcgtatgaagaaaaacgggaaacgatatgtcagaagaaagattcaagaacgcaataactggggaaatgacatccaaaagatgaaccctgagttggttaaaacatcctcagatattcaggatgaagagttcctgaaagaatcggcagaacgcctgatccgcatccttggagaaccaaccagaacctacaaagatcggatttttcgaatgctattatcggaccgaaaaacggcattggaagtttataatgcgatgaacgacagtaattatgacaatccggatgaacttgttttttcgacactgaaaaatgctgtttatatggggatgaaaaacgatgtttcatttattatcagctcacaattggttctgtatgaacatcaatcatcgatcaatccaaatatgccgttaagagatctgttttatacagcgtgtgtgttttctggtctgatcatgaatgggaacatctatggaaaacatcagattctggttccggaaccgaaatttgtgatcttctataacggaaaagagaagatgccggaatgctcagaattgagattatcagatgcctatgaaaaacattccgggactccgtctcttgaacttgtaattcaggtgatcaatatcaattatggatgcaataaagagctgatggaaaagagccggacacttcgggagtacatgatttttgtagaaacagtgcggaattatgaaaaagagtatgaattcaaagaagcagttgagtatgcaatcgatgattgcatacggaacaacatactgaggagcttcttgacaaaaagcagagcggaggtgttaagggtgtttctttttgagtatgaccaggagaaacatattcgtcaggaaaaggatgagtctcgtgaagaaggcagaaaggaagggataaaggaagggataaaggaaggaataaagctgggacgaaaagagggacttgagcttggtgagatccagatgttggtaaaacagatgcaaaaaggccggattacgatggaagaagcggcggaagacgcagggatgacagtggaaaagtttacatatgcgatggagcatgttatgtcacagttgatatagaagataagagtgtatctgtccaaaatgcacatggataaagaaggaacgttgtttcatagatcgtgaaaagattatctgcccctaactggttttatgcttgactaaccgatagtttgaagagtatcctgtaaaagaagatacaaaaagaataatgcagagaaaaatgtcagacaatatatagtaaacataaaaggaaacttattgtagagtgtagaatcagggggcgtaatcatgcaggctttatcaacagcgaaatccggggaacggtacacgattaaatggatgcttggaaatcagcaagtgatggattttcttcatcgtcatgatttctgcgaaggaaatccgatcgatgtgatccagcagaacaatgactggatgatcattggaaatgatggatgcagacttgcaatcggatgcgaggttgcagaccggatccaggtgtaaaagaaagtaaaagagtgagaacggcggttggaatttcgatcatgagatcggatagatccggctgccgtttctctatgtgtaacggaatgagaagaaaaccatatttatgtggatccaaggtgccggaagcaatcatgtgcaagcttcgaaacggatgtttgtcacgtttgaaaactgttttgacagaaatacggatgacaaatgatttctgctcggaaaatccgggatcgcgaaggatcgttgatgcaactgcgcagagttacctgtttaccagatgtgagtgacaagtgtgatgccttatgttattcttggaacaggatggttatcaggagagcggaggaagaattgcaatggtaaaaatctatggaacattgggaccggcatgtcaggatgaaaagatcctggtggagatgttttcacttggaatgaccggaatgaggttgaatttgtcccatgtgacactggcagagtccggggagctgatcgggaagatgaagcgggcggcagaagtacgtggggtgaagccacagctactgatcgatcttcagggaccggagcttcgcacaggggcggttgcggagccaatcctgctgaagaatgaagaaatcgtggagatctgtgcggcggcagatcagaaggttgttgaatttttagaaaaaaacagagaagaattaacggaaacggccgataaaaagaaaaacagtgaaagttcgctggtgcaaaaccggacatctgctcagaggatgcctgcccggatcgagctgccggatattacaatcccatacctgattccagggcaggagattctcctcgatgatgggaaaattcacctgaaggttgtggaaaacccggagaatagaaagatgggaagtggagaaaaacggagatattttgcaaaggtactctggggcggactattaaagagcagaaagagtgcagcatttccgggagcgaagatcaattctccgacactgacaaaagctgatcttgaaaatatccggcttgcgaaagagatgggcgtgacaggagtcatgcagccgtttgtgcggggacgggaagatctggaatgtgtaaaaaatgcactgaagggagccggagctgaggatgtgaagctttttgcgaaaatcgagaatctggacggagtccggaaactggaagagctgatcccggaagctgatgaaatcgtgatcgccagaggagatctcggaaatgcggtccatctttgggaccttcccagtgtgcagagagaaatctcgcagaaatgtctggtgaccggaaaaccgtttatggtggtgacgcagatgcttgcatccatggagcggaaccctgttccgacccgcgcggaggtgaatgatatcttccacgcggtgctggacggcgcttcgtccgtcatggtgaccggggagactgcggccggagattatccggtggaggtgatccggtatctggtgaacacggtgagaagtgcggagaaaataatccgtggatagaagaaatatatctggaaatttcagtcatacagtaaggacagacgctctttcttgaaacgtctgtccttatttaaactgctatgcattgtcgggaaagtgataggtttctcagagaaatcgagtgatgaattatattttgttcagaactggaacggacatgaaacacatttcttgcggtttatcgcttaaagtaacaggcatttgatccggcaaagttcaacaagtgattgcgaaatccattgtgtgctcggtttcaaacggtccatgtcctattccactaacgcccatgcccggcggatcacacgcttcgtggaggcgagaacgatatctgaattttctccggggcgcggggtaacctcaatggagagcacatatggttttgcagcattgaaaaagccttcgtttttcagtacctggaagaagtctctgagctcgtcggtgtcatttgcactctccgggtaaccaaatcttgggtgcttatctccgtaaccgtcacaaccttcctttacaacggcatttccgatatgaaaatgcgtgatataagggcgcagagtccggacaacaaattcgcttgattcatgggtgatcgggatgtgtgacaggtcgacgagaagtccgaagttattgtgggtcattcgcatttccgcagcaaactgtgcggcatatggagcaggccccatgagagaagccttgtcgacatcgtaatcgaagatttcaagttcgaccatcatccctttcgtatttgcataatcgcaaagtgtccgtgttgtttttaatagctaggaaaaagcctcattccgatgctccggagtccatttccctgcaagaaaagagatcccttccgcaccaagaaaatgtgcttcatcaattgtgtgaagaagagcttcttccgctttttttcgttcgtcttcatcaatcgcatttggattcagtccattggcgagctcaagcggctgcgcaccgtagcatacggtgaggtggctctgattgagaagctttgctgcctgtgcctgctcagatacattgctgtatccttttacctcgactgcatcaaaaaaatcatcgcaggcgatctgaattaaggagtcaattggatctttgtcagggaaactcatccattggagagtgccgacacggaaaaatttgtggatcgattcattcatgagaagtttgatatccagcttaaaaaagctgtttttcctttctacatatttatcacatggactggctttcctgcgaggaatgcccgaatattctccaccgtgctgtccatgatccggctgcggctctctttcggagcccaggaaatatgtggagtgataatacagtttggcacggataaaaggggattgtcggctttgatcggctctgttgagacaacatcaagtcctgcggcagcaacctttctggatgccagggcatctgcgagatctgcctcattgacaagctgaccacgtgcattatttaaaaggatcacgccatctttcatttttgcaatattattccgattgatcatttccgtgttttccggagtcagattgcagtgaagggagattacatccgaatttgcgaataattcgtccagtgtgacatagtccgcaatcacgcggccgctttcattcggatagagatcgtatgcaatgacgttcatgccgagtgcctttgcaattcgtccctccgcctggccgatccgcccgaaaccaatgattcccatagtctttccttccagctcgatcaacgggtaatcccagtagcaccagtcggcattttcagcccatttcccttcatggacggtcttatcatggtgaccgatatggtggcagatttcaaggagcagcgcgatggaaaactggctgacggatgcggttccgtaagttgggacattgacaacaggaattcctttttcagctgcataattgtaatcaacgacattgtaaccagtggcaaggactgcgatcaggcggatgttcgggcatttatcaatcgttgtccgggagatcggagttttattggtgatgacgatctcagcattgctgatccgctctgcgatcaatggtgactcaacataggaagtacggtcgtacaccgtgagctcaccaaattcttttaatccttcccagcttaaatcaccgggattttctgtgtatccatctaaaacgacaagtttcatatcaaacatctccttttttctgatgtgtgatcagcccttttcacggaagctttcagtaagagaaatttcggatgacacggtgaatccgttacagattccggaaggctgcaaaacatattttcaacgcaacctgttctcctgtccggcgaagaaaagcctcagtacattttcagcagtctgttccagattttcttttgcatgttccatggccgcttcaagtgacatgatcccggggactgtatcaaaaattgcatcgattccaaatttataaagagtttcgcagccatccccttttgcaccggcaatcgcaacgaccgggacattccagatcttttttgcgcgtgaggcaactccgaccgggactttcccgagagcagactgataatcaatccgtccctctccggtaatgatgaggtccgcatgctttacatgttcatcaaaatctgtgagatccagaacaagatcaatgccggaacagattgtgaccggaaaatacgggagaatcccgcagagcaggccgccggccgcaccgcttccgtctgtttctgctgcattgcatgtcagctgatcatttaatatggatgcatagtggctcagtgctgcatccaggatccggacctgctccggtgtggcgcccttttgcggtccgaagatcgcagcagctccgttagaaccgcagagctggttttttacgtcacaggcaatgacaaactcgcattcggcagcttccttcagaagagcatctgtggaaatccgggcaagttcacttaaatggacaccgcccggggcgagttctttccctgctttatcgaggaaagagattccaagtgcctgagccagccccgcaccgccgtcggttgtggcacttccacccagtcctaaaatgatcttttttaccccgtgttccagggcatggcggatcagttctccggtcccgaaggtggaagcatgaagggcatcgcgttcatctggttttaataaagtaagtccggaggcagcagcagtttcaagcacggcactgccatccggcagaagtccatattcggctgtgatcggccgccccagcggatcatgtacagggacgcagacctttgtcccgttcatcgctgcgacgagtgcatctacagtcccctctccaccatcagcgacgggaatctttgtaacggttacattcggaagaacagtattcgcggcgcgttcgattgtatcagtgacttcacgggcagagcagctccccttaaaggaatctgcggcgatcagaatattcatggtcaattcctcctgaaaaatatgactgctccaactgctgtttctcatttgtgcgattagtataacatcgttgtaacgatatcgtccatgtcaccgaacacaagaatccggcgtgagaaatgttatggagcacaaaaattatgcgtgatggtccagctcagaatttggatacagaagcaggacgagttcccaaagtgcagcgtggcggatgtttctggtatcaaagccggtgagttctgccagctttttcaactggtactgaaccgtgtttttatggacaaaaagtgctgacgctgtcttttcaacggatccattgcattcgtaaaagacatgcaacagatgtaagtaagaatgaagcaatccgtgcccgaagaaaggcatcgtaaaaagtcagaaatgtacaggtttcctggtcatatccaacaaaaaatccggggctgggagctttggaaactccgagcgcagaagaaaaagaggtcaggtatgcggaaagctcctgcttttttccctggaaaccatggagcagcaatacaatacagcctggggcagtgcagaaaaacgaggaagttccgggtgctggaagaatattgtttagtgtcttcacaggatcagcagttccattttctgtcagggcctgatctgcgatcacaacggcggcgtgataggatgtttccatagagagaccgtattgtctgccatatttccagatctgtttttcagaaaggggctgttcgaacagaattctttttagaagacgatcctgtgcagcttccggggaaggcagtgggtggagagcgctttctctgagaagtgtttccgcggtggttcggatcagacggatatagcggtttaattcttcgtaagcatctccgcggattcccacgacgccggcaatctgtccttcgaaccggatcgggatgttaatgccgatgcgtgatcccgggtaatcggagtcagaacgaacgatcaggcagtccatgttatcgcggatcgattcgtaggcgccctggtggagagtaccgatccgtgagagatccgtactggcgatgatgatcccgtgatcattcatgagatttaccgggcgatccaccgccagagagacttcgcggacaatccgttcggcggcttctgttgagatgtacatgaaaaattcccccctgtgtgtgcaatgaaattgtggggatggatggaaaagacattcagccccgggagctttttcctggaagtcctgtaaaaaatattttcactgggaaagaagctgttgaaatatctttattataacagaaaatcataggacagacagcatctgaaaagatttataaaaaaatgggtttattgtacgaaattttcagtttataaaattctatccatggaatgtgataaaaatggtcattttacagataaatgatagatcagacagttgaggctgtgttttttcgtccgtgatactgcaggaaacgaaacaagcacaggatcctgcagattgctttatcccgtgcttgtttgcaaaagagaattttacccgatttctgttgtggcagaaattccaacatgccggggaggatcctcttgatatgaaatttagtatgtatcaagcggcggctgcacggaatccggcagcgggcaggtgtagtgtccgccgtttcgctttgtgacttccttctttgctgcttcgatcacgtccgggcggtccatcgttcggatgcaggagagagccaggacttttgcggcagtcaagagacctttgtgggccagcgggctgcaggactgggcaaccatctgccaggaatgtcctacatttccgacgcacgcggtagcaatgttgatgtttaaggtcggtgctgcatagccgacatcgccgacatcggtggaaccggcggtcagtttgatcttatccgggttgaacggatggatctcggaatccagcggtttttcgagaatctcttcgagacggtcttccccgtaagtctcgatgatctgtgcgcggatattttccattgtggtttccggataggtatttaagaattctttcgccatcgcgtaatctgcatcatcccatttcggagcaccgacttcctgtaaacactcatcggcaacttttgcgagggcattgttcggaaggtattccgtgaatgccatggagagttcgcattccacggaggtatcggtcatgatggaggcgccgcgggcaacgtttttcacgcgctcgaagagctcttttacctggtatacccacggggaacggacctcgtagcggatcgtcgcgtgatcctggacaacgttcggggcagttccgcctgcatcaatgtaagcgtaatggatccttgcctccgggatcatgtgctctcttaagtagttgcagccgacgttcatgagttctacggcatccagagcgcttcttccgagatacggggtcgcgccggcatgggaggcaacgcctttaaaatagaagtttgcacccatgatcgcattgctgtggttgcattcgacggcgttttttgttgccggatgccaggagtatacgaaatcaacgttgtcgaacattccggcgcgggccatgaactgtttggcaccggcaccttcctcagcagggcagccgaagtagatgatcgttccgtctttcttatttgcgatcaggtattctttcacagcgatcgctgctgcgagcgcaccggttccgagtgcgcagtgaccgcatccatggccgggagcgccttccgtcagaggttctttgtgcggatctgctgctttctggcttaaggatgagagtgcatcgtactctccgagaattcccatgaccggttttccggttccgtaggagaaggttccggtaaagcaggttgggattccggcatcgccctcggtcagggtaaagccttcttcttttaagatggattttaacagggctgctgatcttgtctcgtggaaagcgagttccgcatattcccagatcttatcgttggcgtccaggatctttgcggatttctcgtcgatcacacgggtgagaaattccaggtctttgttcatgtgggttccgtcctttcttttagggtgtgggcgatgccggagccttttacactgcaccgcattatagggatagtttactacagtttctgaaaaagtacaatgggaaatatgatatgattgtattggcgaaagtacgcggtgagcttccgagcaggagcactcagggatgcggggatggttcctctaagctcccgggagactgctaaagacggaaaaacaatgacacaactcgctgcgctcaaacaagtgtcatcttttttccaacgcagtcacccaggacctaagaggagccagatccccggatcaaggtgctcctgttcggaagctcaccgctggtagttattgggaaaatggaaaaagcacagagggcaatactcctgtgtcttgcggcaattctgcggcagatatttaccatgcgaggaagaacgtgatataatcgtgacagtaatgcgagaaaactatctggatagataaaaatcaggaggaaatatatatgtcaaaactgatctatgtcgcggatgatgagaaaaacatctgttttctgatagagaatttcctggaaaaagagggatatgaggtggagtgtttcggggatggagagtctcttctggaggcgtttgagaaaaaagctccggatctctgtatcctggacattatgatgccgggaatggacggactgacggtctgcacgcagatccggaagacgagccatgttccgatcatcatcgtttccgcaaaggattccccgctggaccgcatcacggggatcactctcggaagtgatgactatatggtgaaaccgttcctgccgctggaactcgtgacgagagtcaaagcgttgttccgccgcgtggatgcgttctccggacaggaggaagagtcgaagaattcctatgagatcggggatatcagactttacccgaagcgccgcgctgcgaagttaaaggatgaggattttgccctgactccgctggaatttgattttctgtgccacatgcttgagcggaaggaacatgcggcgagccgcgatgacctcttaaaatccctgtggaaggtggacagcaaggaagtagacacaagagctgtggatgatatggtgaaacgtctcagaaagaagctgaaggaccagaagagtactgtgaagatcgagacggtatggggatatggcttccgcctgacgagtggaggagaggaatgaaattaagtatccggatgaagatcttcctcccggtgatgctgcttttgatcgcgtttccggtggcggcatggttcgtgttcagctatgcgctggacggacatatgagctacaatgcgaagcgggatctggggcagatggtgaagaccgtggaggaacttacggaggagtacagcaacgtggatgtgccggatgagaacagcgcacaggatgaccgcggaagtctcctgaatgccctgagaaactcggcccagacggagtccggtgagacgaagatgctggtgatcggaaagaattaccgcgtactgtatccgaaaaactacgatgatcagccggagatgacccagatgtactcggaattcctgacaagaatgacaggaaatgatccttcgtttgaaagcggggagatctccgaggagatgatcggagatacgagatacatgctctattttcttgatgtggggcagaaacggtcggggcgtgtccagaatatcctgctgtactgcccgatccatgatacaagcgtgatcttacatgaagtgtcgagactggtgttcatgatcatgggagtcatggcgggagtctccatcgtgctgttctggtttgtagctggaagtatctcaaatccggtgagccgtctctgtgaggcagcgcgcgggatcggcgaaaagaagtttaaaaaggtggagaccggaacaaacgtaaaagagctttatgaactggagaatgagatcaaccagatgcaggacaatcttttgaaggcggacgaggcggagcgcgtctttttccagaatgcgtcccatgaactccgaaccccgctcatgtccatcagcggctatgcccaggggatccagcgaggtgtctttgaagatacatcccaggcagcaggagtgatcctggatgagagcagccgtctgacggaggtggtcgacgggatcctgacgctcacgagaatggaccagatgcgctaccaggtcgttccggtggagctggggatccgggaatatatcgaggatcagatcgagcggctggaaggtcttgcttaccagaaaaaaataaaactggaatttttgccgggagacgagcataagattatctcggatgtgatgctgctcgggcgggcgttctcaaatgtgacatcaaactgtatccgctatgcgaaggagatggttcagatttctgtggaagagtcgggggatcagctgaaacttacgatccgcgacgatggatcggggattgcagagaatgatctgccgcatctgttcgaccgtttttataaaggaaagaacggaaatcacgggctggggctttccatcgcgaagcgttccatggaatatatgggaggcgatatcgcggcagaaagttctccggacggtgccgtgtttacgatcatactgccgcaggattgccgcagctttgccgtagaagaatggacggaagtgtgataagatggtaacagttcagaggaaggattctctgtacatgaaagcatggaaaatatctgcggatttttggaaatctgttatcagcttacatcacaggaggacacaatgatgaagaagattttatttttattcggtcttctggtatgtcttgcgggaatgccgcttacggcctttgcggataataagactgcgaagcagacgtatgagacagcgatctcagacaactggaaaacgatgttaaagaacagtatcgctctggatacgatcaatgcggagaataatacgcatctgctggaatggcaggatgtgaagaatccgtcggatgaggcggtaaagcttgtggataagatccagaagctccaggcggagcaggaagaagatcaggagagtatggatccttacacaaaggcgaagaaatcctgtgacgcgaaattaaacgcggacggcgcgaatgcggcgctcgagaacattatccggatccagaaggatcgtctgagcgatcagaaggaactgcaggcgctgtgggcgaaggttgataaactgttaaaatagagcgcaggttcagctctgaaaaccgtctgcccggtggaacaaagatctgacaggacgggttccggtgagcaggtccagaaaaataacctgaaacatggtttcttacgaaagaaaaacggctgtgaagaaaagaatcacttcacagccgtttttgtgctcatttttctgtaaaaaacatcgttttatggatctcgctggcggggcaggagaatttctgccagttcgatgcgagatattcagccctgaaaatccgccaggtccgggatatattccttcaggatctccgggtgatagttcgcgatgagtgtttccgggaagtttaactcttttaagagggcctccgcgcgcgcgtggtcgccgaccgatgtcgtaaagtgtgcatcgctgttcatgatgaccggaaccttgtagctggcgcagagcgggagaatgatcctgtcattttcatatgcgtggatgcgggaaccgcctggtgtcagggaggtgttgttgagctcgatcatgcggtggttgtcctttgcggcttttacgaccgcctcatagtccagtggaaattttccatcatccggatgtccgaggatcgtgacatacggattttttaacgctgtgagcaccgcgaaggtgttgtcttccattgttcccggtttcaggcagaggtcatggagactgacgactgtgtaggataagcgctttaacatccgctctgacaggtcgatggtcccgctgtagtccacgatgtttaattcacatccgaataaaagacggacaccctctaagaccggcgggatcacattgaagttgcagaattgcatttccccgcagcttcccggcatggacggggcgtgctcggtgatgccgaggatcggcaggttctttaatgcagcggcatggaccatctccgtgatggttccgtaggcatgtccgctcgcgatggtatgggtatgcagatcagcataatctttcatggtaaatgcctccaaaaatatcagaaaattcctgtttcagttcagaaaaattcctacctatgtgcagtaatcactatgcgttacagtctacgggcatttcatgcccgcacactgtaacgggattttgccgatgcttcgcattccgaatcggcaaaatctgcgaccataacggtgtcatacggaattttcagttcagaaaattcctacctgtatacagtaatcactatgcacattttatcataaaatttttatgaaaactatggcaaatattcacagaatatggttaaatagaggaagaaattatcatccatttttatggcctttttatagaaataagcggaataaaaatggaggatgagaaaaggagagatgaaatatggaatccatggacgattacaaagaggagttagaagcttcccttaaaaaaattagagttggcgatgttgtgactggtaccgtgcttgatgtgacagatgacgcggtgatcgtggacttaaagacctacgcggacggcgtgatccgcaaagaagatctgagcgaagatcctgatttcaacatggcggagatgatccatccgggtgatgagatcacggcgaccgtgatggcgacaaatgacggggaaggaaacatggtcctctccaaaaaggaggcaaaccaggtccttgcgtgggataaactgaagaccatgatggaagagcgcacggtcgttccggtaaagatctctgagatcgtaaacgcaggtgctgtcgcatatctggaagggatccgcggctttatcccggcttcccgcctcagcgacgagtatgtggaagatttaaaggaattcgacggaaagacgatcgaagtgaccgtgatcacggcagatgaggagacacaccgtctcgtattatccggacgcgaggcagcgagagagaaaaagcaggaagagacaaataaaaagatcgcaaaatgtgaagtcggcgctgttatgaacggcacagtcgagaccttaaaggattacggcgcatttgttgagctggaaaacggacttaccggtctccttcacatctcccagatcagcacaaagcggatcaaacatccgggtgcggtgctgaaagagggacagaacgtaaaagtaaagatcatctccaccgcgaacaacaagatcagtctgtccatgaaagagctgatcgaggaggaagcggagagagaagctgaggacacctacggatataaggaagaaggtcaggcaagcacaggtcttgcggatctcttaaagggtctgaagctgtagcaggaaagcgtgaagacatggtcgcatggacggaacgttcccggctgcaaagaaagggggcgtcagcatgacgaaagagtctggagggtttgatcagatcgatcagtggaaatcaacgatgtttttatacagctccgcgttaaaatccatcaacacgaagatcgagatcttaaataatgaatttatccagttatacaattacaacccgatcgaacatatcacttcccggttgaagacgccggagagcatcgtgaaaaagctgaagcacgatggatgtgaggtcacgatcgataacatggtggagcacttaaacgacatcgcggggatccggatcatctgttcctttatgtccgatatttatcccatcgcggatatgatcgccagacaggcggatattacagtcctgcatgtcaaggactacattaaatatccgaaggcgaacggatataagagctaccatatggtggtgacgatcccggtctatctgtcggagggaaagagagatacgaaggtcgagatccagatccgcaccatcgcgatggacttttgggcgtccctggaacacaagatcgcttataagtttgagggaaaggcaccggattatctggaacgggagttaaagtcctgtgcagatatggtggatatgctggatatgaagatgttctccttaaaccaggcgatcatggccgtcgaggaggaagagcgcaggcgtgaggaagaaaagcgctgcgagcgtgagaaagcagaaagaaaactggaggaacttgcaggaaacggtccgacatagaccgttttcggctgttttgatgacagaaagttccaagacgaaagatctgtactccggaaaagcggatgcagagcggccagtctggaggaaagatagatgagagtcgtactacagagagtaaaacatgcgtcggtacatgtggacgggcgggagaccggttccatcggacagggattcctgatccttctcggtgtatctgatgaggatgatgagacgatcgcagataaaatggcggacaagatctgcagactccgcatttttgaggatgagaacggaaagacgaaccgctctcttcaggatgtgggcggcgagattcttgtggtgagccagtttacactgtatgcagactgccggaagggcaaccgtccgagctttactggtgcaggagcgccggaccatgcgaaccgtctctatgaatattttatggaacagtgcaaaaagcatgtggaaaaagtggcgcacggggagttcggagcggatatgaaggtggatctgctgaatgacggaccgtttacactgatgttggacagcaaagagctgttcccgaaataggatactattacacatacggaggatttttagaatgagcggcaaagatcttgaaaaagtacttctctgggaagctccgcatatcggcgaaaaagcgccggagcagatcccggaggcacaggatttctgtgagggatataagacattcttaaatgagggaaaaacagagagagaatgcgtgaaaaaggcagttacactcctggaaaacgcaggatatcagaaatttgacccgaaagcttcctacaaagcaggggataagatctactggaacaaccggaagaaggcgatcattgcttctacgatcggaacaaaagatctgaacgagggactgaggatgaacggtgcccacatcgattccccgcgcctggatttaaaaccgaatccgctgtttgagaaggatgagatcgcatatttaaaaccgcactattacggcgggatccgcaaataccagtgggggaccgtgccgttatccatgcatggcgtcgttgtaaaagctaacggagaggtcgttgagatctccatcggcgaaaatgagggcgatccgcaattctgcgtgacagatcttctccctcatcttgcttccgaacagaacggaagaaagctcgcagaaggtttaaagggcgaggaactcaatattatcatcggttcgatcccgtaccatgacgaggagaacgagaagatcaaaaatccggcaaagcttcttgcgatgaagttactgaacgagcgctacgggatcacggaaaaagatttcacccgtgcggagatcgagatggtcccggcatacaaggcggtcgatatcggacttgaccgcggacttgtgggatcttacggccaggatgaccgcgtctgcgcgtacacagctctgatggcggagatcgggacaaagaatccggaacacacgacatttacgatccttacggacaaagaggagatcggttctgtcgggaatacgggacttcactcggactatgtccatcatgcagtcgaggacctcgcggagagcttcggggcggacacaaagactgtgctgcgccattccatctgcctttcttccgatgtaaacgcggcttatgatccaacgttcgcgagtgtctacgagagcagaaactcgagttatgtaaacaaaggctgcgtgctcacaaaatatacaggcgcgagaggaaagtccggcagcagcgatgcaagcgcggagacgatggcaaaggtcatcggcatcatggaagagaacggtgtctactggcagaccggtgagctcggtgcagtcgatgcgggcggcggcggaacgatcgcccagtatgtggcgatgatggatgtggatgttgtggacctcggcgttccgatcctttctatgcacgcaccgtttgagctggcttcgaagcttgatgtatacaatacatataaggcgttctgtgcgttctataaataaatgcggatgacggctggaccggcaggagctgtgtccaggagtcggaaggacatttctgacgccccgttttgaaaaaattgaaacattattgaaaaacactctggaagagatcctgatggacgtaagacatggaagatctttgcagagtgtttttatttacgcgaacgacgagccaaagtccgcgcttgcacgagaccttggcgactgtcgcgataacaaggggaaactcgtgaagcgttttttcacttgttttctaacacatgtcttaaatttctgtgaacactcttttttttcgcgtgacggtatgttagaatgagtattacgcgcggatgttccggaaaacgggagacacgcgggaaatatgagacagaatggaaggaaaaagaaaacatgaaaaaaatcataaaagcaggtctctgtgttgcagcagcggctgtgatcgtaacaggatgcggaaataagagtcagaacacagagagcagctctgcggctgaggagcaggcagcagctgcaactgttgagacggagacaaaatccgaggaagagcttcacgacgaggagagcgtgactctcggagattataagaacctgacttattctgcaaaggtagaggaagtgacggatgaacaggtccagacaagattaaaggagctctgcgcagagtatccggtaacgatcgagggacgcccggctgcggaaggcgataccgcgaatatcgattattccggaacaaaagacggcgttgcgtttgacggcggaacagcagaaggttacgatctgaagcttggaagcggaacttttattgacggctttgaggacggcgtgatcggcatgaacgtcggagatgagaaagacttaaacttaaagttcccagataactacggaagcgcagatcttgcaggacaggaagtcgtattccatgtgaaattaaaccagttaaaatctgagtccgagagcaaggtggacgatgacctcgcaaaacgttattacaacgatgatacagcgactcttgatcagttaaaagaggaagtgtgtgcggatctccaggcggaggccgacagccagttcttcaacgcagccggaagtgagctcttaaatgaagtgatcaataactccgaagtcacagcagatccggacgctgttgatgacatgttcaaccagttaaagaccacatactccagctatgcgagcagctatggtcttgactttgaccagttcctcagcatgttcctcggaacggatgaggatggacttcgcgatactgctgaaaaccttgtaaaacagcagctcgttttagacgcgattcaggcacaggaaaatctctctgcgactgaggatcagaaagataagctcgctgttatgaattacttcaagaatgcagcgcagatgacggcaacatacggtgaggactcctcaaaccagatttttgatatgggtgctgtctactactacctgatcgacaattctacttacgttgaagcgccggagactactgcagagacaacggaagcagagaatatcttagaagaagcagagactgttgcagaggaaagcgaaagcagtacggaagcaaaataatatggacaggaaatggtccggctattctgcaaagtgctgagcagagatgctgatagcagaaatgcgataagagaacaatatgaaaagaaaagcattattttttgacattgacggaacgctcttagtggatgcgtcgaaagagtttccgaagagcgcggcggctgcgatcaccgaggcgcgccgcgccggacatctgatattcatcaattccgggcggacgagatgcctgatgaaggacgttgaggggaaagtaccggtcgacggttacctctgcggatgcggaacctacatagaagcggaaggaaaagccctgcttcacagaaaaatctccgcgaagcgccggatggagctccagagagcgatcctcgcgtgcagactcgacgggatccttgagggaccgaaggtttgtacggtccaggtcggcgtctcccacatggaagagattgaacatgtgaagaatgtggtatataaaaaccagggacttgcgagtgcagactggaacacggaggaagtcgactttgacaagttctgtgtgctggcggatgagaatagtgatgcggagagcttcttaaagatcctagcgccggatatgactgcgatcgaccggggacacggactctatgagtgtgtgccgacaggctatgataaggcgacggcgatggaagtgatcctgaaacactatgggatcgcgagagaagattcttacgccttcggtgacagtatgaatgacctggcgatgatccgctatgccggaaacagtatcattatggaaaaacatgcgaaaggcctggaaccttacgcgacctttatcacgaaggacgtggaggacgacgggatcgcatgggcatttgaaaaacttcatatcatataaaagatgagttttgcggcagttttgcttttgagtgggactgtcgctttgcgttttcgaaagctgtcgaaacttgcgttcaaaaactacttttcaattctggaaaaatgtattatatatttaagaaaaaggaagcagacgcgggaaagggcggctgcggacgaggcgtaagggggacgaaaacaatgagcatggaacgacattacaaaagtgctctggaagaagaaaaccaaaggcttcgcgaagagaacgacaggctgatggacattgtggtacagatgaaaggtacactgaaccgcctggtaaaagcgtatattacagaaagtaaataggagaatgcggctgcacagaactgatcgggcagccgtggatagaaataaccgcggatggctgcgaaaggcagcaggtccgcggttatttcgcaggaattcaatgtcctgtttactggacgacaccggccgtatttacagtccagatcgttccgttcgcatctttgatatccttatatccgcgcccaagttccggtttttcggaagaagtggaggaagcggacgctttctgtacatttccggctgttccgacaaggtaggtggtgccgtttaagtccgccggtgcatatctctggtcggcagtggcgtcctgtctctttccgtatacatagaggatgccgtcgcggagtccatggtatccctgacctttcttgtcaccgtcggtgtggaagaaccagttctcggtctcacccgtctcctcattgaagatcgtctgttttcctgtcttcatgatgccgtcctcgccgaagcagaagttcgcgatctcatcgttcgccacattcacgatctgtcttccggtctgcatgatgccgagatcactgaaagcgtattttttcgcgttgatcgtgaagagagaattcccctttttcgtggaaacgtatggttttcctgctttaaagcagaaggtgtacatctcgtcggcttcgtggatcccggaaatcccctcaatggagtgaaaaccttcggcgcgttttccgtctccggccggcccgtagtactgataatctgtgacgttcgggacagctgcattgctgccggttgcgtcagcattgctcccggacggcatcaggacccagcctgtctgcatttttccgtcgatgaaggtgtagtaatttccatcgatcttcttgtcatactgggtcttcaccatctttccgtcggagttaaagtagtaccagctctcagaagatcccggcacatgactgttttcctccagacggatccatccggtcttcatcgccccgtctttttctgttccaagatagtaagtagctccgtcgatctccgtctttcctgtcgccatatggccggactcgtcaaaatagtaccatttagagtcaaattttacccatttggagacagcggactttccatccttttcaaagtagtaccagaaggtatcgggagtctccggggagtccggatcttcctcattctttaattctacccatgcactcgtcaccatttttccttcgctgtccacataatactcgtcgatcttcgcatcggtcacgatctgaccgttctcaccaagatagtaccagtcttccccgcgctttctccatgcatcggtggtgaggtacccgtcttcatcgtaatagaccttcgcatctccttctgtcacccatccgtgggatgcagcgtaagccggcagcccggagaccattgtcatgaatgctgctgcggataagacagcggcgatctttgtctgttttttcataatatccttctctcctttttgatatgaaatcatgctctcgtccggcaggtcagaagcttgtggacaggacggatcggcagcagctcctgagatcatgccgtacagttgtttttgtttaccggctgattataacagtctgtgatgacggaattccagtgtgggttcctggcatatctggaacaccgtggaaaggatttcaccaggtggaaaaaacggaaaacaaaggggaaaaaatgccccggggatcccctgaaaaccctgttaaaaacatgatttactggactgtatgcggtctgcatggtataatcgaaaaaggtatacccggcgcagactcagccatgtgtctgggggaaaaggaaggtcaatatggctggaatctgacagtttgagagaggagaaggtttcacttatgagaatgaaagtttctgattatattgcccagaagctggtagacgaggggatcaccgatgcatttatggtgaccggaggaggtgcgatgcacctggatgacggactcggacatcagccgggacttcactgctattttaaccaccatgaacaggcatgcgccatcgctgcggaggcgtatgcgagaatccacaacaagatcgccgcgctctgtgtgacgacaggccctggcggaacaaatgcgatcacgggcgttgtcggcggctggcttgactcgatcccgatgctcgttttatccggacaggtccgctacgacacgacggcccacagcacaggtctggggatccgcgcgatgggagatcaggaatttgagattacaaaggcgatcgactgtatgacaaagtacagtgagatggtgctggatccgatgcggatccgtttttgcctggaaaaggccctctatctggcacagacaggaagacctggtccgtgctggctggacatcccgttaaatgtccagggcgcgtatatcgagacggaatccttgctgggattcgataaagatgattacgaggcgggcggcaccggctggtccggacatggaaccggatgttccggatgcacgatctgcatgatgaataaaattgaaggaaaaccggcgatgatcccgtctgatgtgagcggacagggagaaaaacgcgtgaaacttccggaccctgtgacagtagaacaggcgagagagatcttaaagaaagtccgcgaggcaaaacgtccggtgatcaatgccggaaacgggatccggatcggaaaagcgtttgatgtatttacaagagtcgtgaaaaagctcgggatcccggttgttaccggctggaacagcatcgactgcatgtacgatacagatccgctctatgtgggacgtgccggacatatgggcgaccgcgccggaaactttgcggttcagaacagcgacctcttattatcgctgggaagccgtctttccatccgccaggttggctacaattatccgacatgggcgagagcagcgtatgtgatctacaatgacatcgacgcggaagagttaaagaaaccgacggtccacgttgatatgccggtccatgcggacgtgaaggatcttctcgagaagctggaactcgttctcgatgaggaagaatttgatccgaacggcggtgcaaaggacaaagaggcagtggacagctggatccgtcagtgccagacctggaaagaaaagtatccggtcgttctgccgaaacattatgaggccggagacgatgagccggcaaacgtctacgcggcgatcaaggagatcagcaaacgcgtggaggaggatgtgatcacggttgtgggcaacggctccgcgtgcgtggtaggcggacatgcctatgagatgaagaaaggacagcggtttatcagcaactctgcgatcgcttccatgggttacgatctcccggcggcgatcggtgcatgggtggcggaccatacaaaggatattatccttgtgaccggtgacggaagcatccagatgaaccttcaggaacttcagacgatcatccatcaccacatggggatcaagatcttcctgatcaacaacggcggctaccactccatccgtcagacccagaagacccatttccatgagccgctcatcggaatcggcgtggacagccatgacttaagcttcccgagtatggagaaacttgcctgggcttacggctatccgtatgtggcggcgcatcacaacagcgagcttggtgctgctgtggagaagacacttgcgacggaaggtccggtgatctgtgagatctttgttgatatgaagcagggatttgagccaaaggcatctgcgaagatgctgccggacggaacgatggtatctgtaccgcttgaggatcttgcgccgttccttccggaggaagaactcaaggagaatatgtatatcccgctggtggaaaataagtaggtttgtcagtaacgcaggtctgcgcacttgctgcgctgaccgtaataaaggatagacatgaaggcaaaaatcccatcggcgcagccgacccggaatggattttgctcgtagctgtgaaggtactgaacagttacgtttgtcagaggaaaggggcagcataatatgaatatcatcatgacaggcgcgacgagttttgtcggcgcggcgacagttcgggaactcttgcggagaggacatacggtgactgccatcgcgcgccccgcgtcctcaaaactcggcacgatccttgatgggaacgaggaggcgcttttatccgggcggcttctcgtgactgaaaacgatctctccgagccggaacagcttctggaaaaagtgacaaagccgcaggatgtcttctgccacttcggctggggcggttccggaagtgcgtcgagaacagaccgggcgcttcaggaaaaaaatctggagatctcccaggagacgatccggactgcgaaggcactgggatgtaaaaagttcctgttctccggatcccaggcagaatacggaatgcaccgggatctgatcacggaggagacggcctgcgagccgaaatccctctacggcgaagcgaagctcgcgatgtgcgaaaagggcgaaaagctctgcggggagctcggcctgcgttacattcacgcgcggatcttcagcgcctacggaccgggagaccacccgtggacgttagtcgaatcctgtctggacgcatttttgaacaacagggagatgtccctcggcgcctgtacgcagaactggaatttcctctatatcgatgatctggcgagaggaatggcggcgctctgcgaggcggaggaaacgacatttgaggggatctcaaatcctgtctttaacttcggaggcgcggagacaaaggtattaaaggatttcgtggaggagatccatacactctgcggcggaaagggcgaaacccgatacaatacccgcggggaaaatgcggaaggtctgatcaacctgatgccgtccattgagaaattaaaggcggtgacgggatggaagccggaagtcgactttaagaccggaattacccggatgatctcactcaggaaaaggaccgtatagagaggaaaaacggggaaactcgggcaggaccggctgcggcggtgcatagcggatccggatcgacaaaaaatgccgtgaacactgcccggtattgacaaaacagaaaaaatggttacaatgataaaagttaaagatcaggtaacaattatttaaggaagaagaaaatataacatgaaaaaaatcagcgttttgattccatgctataacgaggaggagaatgtcgttccgatcagtgaagcggttatcggcatcatcacaaaagagctgccgcagtacgactacgagctggtctttatcgacaatgactccacggataagacgagagaactgctcaggatgctctgtgcaaagaacccgaagatcaaggcgatcttcaatgcgagaaactttggacagttcaactccccatattatggaatccttcaggtaaccggtgactgcgtgatctccatggtcgcagatttccaggatccggtggaattgatcccgaagtatgtccatgaatgggagaatggctataagatcgttatcgggatcaagacgagcagcaaagaaaatccgctcatgtactggctcagaagctgctattacaaactgatccgtaaattgtctgatgtagagcagatcgaacatttcacgggatccggtctctatgacagacagtttatcgaagtgttaagaaatttggatgatccgactccgttccttcgcggaattgtcgcggagcttggatttaagagaaaagagatcccgtatgaacagccgaagcgccgcgcggggaagactcacaataacttctataaattatacgatgcggcgatgttaagcttcacctcctacacgaaagcgggactgcgccttgcgacattctttggcgcattttgcggcgggatcagttttcttgtcggaatggtatatctgatcatgaagctcctctactgggaccgctttgcggcaggtatggcgccgcttctgatcggaatgtgtttccttggttcggtccagatcttctttatcggactgctcggcgagtatatcatgagcatcaatacccgtgtgatgcaccgtccgcttgttgtcgaggaggagcggatcaattttgacacgccggctgcgcaggaggaaatatgaaatacagtgttgaagtgatgagagtccgtgagcagacgatccagttaaatggctgggctgtggaaaatgacccggattccgtgatcacataccggatcgaggacgaagcggggaatccggtggatgcgaagatcgttccgacaaggcgggacgacgtgagccagatctactacaaaaagatcatcgaccgcgatctcgggtttgatatccgtttcccatatgaacatggaaagatctactatcttgtaatctgcggggagaagaagacgacccgagtgaaatacagcgatatgatgatccgcaaaaagacaggagcggcgaaccgcaaagtccagaaactcatgaacctgatgaatatagagacggttcatgttgcctgggattttctgaaagagaatggtctgaaagccctgatcttaaaatcaaagcataagatccagggaatcgatgacgattacgactacgcagagtggtggaatctcacaaaaccgtcggaggaagagctggaagcgcagaaaaaagagacctttgagtatatgccgaagttctccatcgtgatcccggtctataagactccggagaagtttttaaaggaaatgctggattccatcgtggagcagacatacgcaaactgggaactctgcatcgcggacggcagtccgaccggagagagcgttgagaatgtattaaagaaatatgcggagaaggattccaggatccggtataaggtcctgggcgaaaatctcggaatttccggcaataccaacgcggctctcgagatggcggagggcgattttgttgtccttgcggaccatgatgaccgtctgacaccgaatgcgctcttcgagtgtgcgaaaaaactgaacgagaacagaacatgtgatgtcctctattccgatgaggataagctggatatggatggagatgaactgtttgatccgcattttaagccggatttcaatccggatcttctgacgagcgtcaactatatctgccatctgttcgtggtgaagaaagaacttcttgataaagtcggcggtttccgggcggagtatgacggagcccaggattatgactttatcttccgctgtacggagaatgcagagaagatctgccatatcccgaaggtcttataccactggcgctgccatccgaattccacggcgagcaacccggagagcaagctttacgccttcacagccggttcccacgcgatcatggaccactataagagagtggggatcgaggcggagaaagtggaaaaaggcgtggactacgggatctatcacacgacatttaagatcaagggggatccgcttgtctccgtgatcatcccgaacaaggaccacactgtcgatctcgacaactgtatccgcccgatgctgacggaagggacgtacaagaacctcgagtttgtcatcgtggagaacaacagcacagaacaggcgacatggacttactatgagaagatccagaaggaattcccgaatgtacacgttgtccgctgggagcgggagttcaactattccgcgatcaacaacttcggcgtacagcatgcaaagggcgaataccttctgttcatgaacaacgatatcgagctgattgcaaagaactttgtcgaggagatgctcggctttgcccagagagaggacgtcggaattgtcggcgcaagacttctctatgaggatgatacgatccagcatgccggcgttgtcatcggattcggaggcattgcgggacacacgtttatcgggctccacaaatccgagaacagctacttcaaccgggcaatgtgcgctcaggattacagcgccgtcacggcggcctgcatgatgagcaaacgctccgtatttgacgccgtgggcggatttacggaggaacttgccgtcgcattcaatgatatcgactactgcatgaaggtcagaaagctcggaaaactcgtggtctatgctccgtatgcggtgctgcatcattacgaatcgaagtcccgcggtcttgaggacactccggagaaagtggcgagattcaaccgcgagatcgcaaccttcgcgaaacgctggccggagatcttaaagaacggagatccttattacaacccgaacctgacgctgcggaaatcaaattttgctctgcgggacctgaaaaaggagaagatcggggaaccatataaactggaggtaccgttagacgaatgaagacaacgatcataattccgaattataacggactctcgtttatggaaccgtgctttgaggctctggatagacagacgacaaaggattttaagatccttgtggtggacaacggatccacggacggaagtgtggagtggctgaaggagaaacagatcccgtcgatctttcttccggagaacaccggcttttccggtgcggtcaatgtcgggatcaaggcggcggatactccgtatgtgatcctcctaaataacgatacgaaagtggctccgcactatgtggaagcgctggagcgggccatggaccggtcggagaagatcttttccgtcagcagcaagatgatccagatgtatcatccggatctcatggacgatgccggagatatgtacagcgttctcggctgggcattccagcgaggcgtcggacgtccggagtatctctataaaaaaagctgccgcgtgtttacggcctgtgccggcgcggcgatctaccgcagggaagtgtttgagacgatcggatacttcgatgagatgcacttcgcgtaccttgaggatatcgatgtgggatatcgtgcgaagctttacggatatgacaatgtgttctgtccggaagcagtggtgtaccatgtgggaagcgggaccagcggttccaagtataattctttcaaggtaaaacttgcggcgagaaacaatgtctatttaaattataagaatatgcgggggtggcagctgctcttgaattccccgtgtcttctggccggtacttttgtgaaattcctgttctttaagaagatgggattcggaaaagattatgtggccgggttccttgaggggatcagaacactgaaaaactgtaagcgtgttccttcctttaagggaagattaaagcgggagatcgggatccagatcgagctgatcgccggcaccgcagtttatatttatgagttttccaggagacaggcagcaaagctgaaagtcaaagcctgaattgcaattcaacggttgctgcagtgcgcgggcagggaatgtccgcgtactgtaaacgatattttacggaaatctcagattttcttaagaaaacgtttatttgcaaacaggaaaaatttatgtatactatgtatgcataattttacgatggcggtactatgctctgaccgggctgtcaccattacaatgctgcaggataaaaaactgacagcattttccttggaaaacagggtgaaatcatatgatcaaagacaatcaaaagagcctcaaccgttttcatgtggtgcttgatgcctgcgtgaccgcgttctcttatctgctcgcatggtttatcgtgatcggaagcgggtgggcgaaccagcttggaaaacggacacttgaggtcggattttattttggcgcgctgctcgttattattccggcgtatctgcttttgtactccttatttggactgtacaccccaaagcgtgtgcttgggcgcagaaacgaatttggaaagatctttaaggcaaactcgatcggatttttaattttcggtcttgtcctgtacctgggaagaaaagagccgcacctctacaacttctcccagaggctggttgtatatttctacgttctgaacgtggcatttatgacgatcgagcggaacgggatccggatcgtgctccggtccatgcgctcgaaaggatacaatcagaaacatatccttttggtaggatattcctccgcggcagaaggttttatcgaccgggtgaataagaatccggaatggggatacaagatccgcgggatcattgatgatacgaaggaacgcggaagtgagtataagggagttaaggtcatcggctgtgtcgaggaccttgattatattttagagcagaacagtcttgatgagatcgccgttacactgagccttggcgaatatgaaaagctccgccatattgttgcgctctgtgaaaaatccggcgtacacacaaaatttattccggattatgggaatattatcccgacgatcccctatatggaggatctccagggactaccggtgatccatatccgccgtgttccgctaaatgatccggtgaacgcagcactcaagagagctgtggacattgtaggtgcgatcgtgggtatcattctattttccccgatcatgctgatcgtggcgctgctcatcaaactgacatctccgggaccgatcattttctgtcaggagcgggtcggacttcacaaccgcccgtttaagatgtataagttccgttccatgacggtccaggatccaagtaaggaaaagagccgctggacgacaaagggagatgcccgtgtaactctcatcggaaaaatcatccgccgtacaagcatcgatgaggttccacagtttttcaatattctcatgggggatatgagtcttgtgggaccgagaccggaacggccgtttttcgttgaaaaatttaaggaagaaatcccgcgatatatgatcaaacatcaagtccgtcccggtcttaccggttgggcacaggtgaatggttatcgtggagatacctcgatcattaagcggatcgagcacgatctctactatatcgagaactggacgcttggtcttgatttcaagatcatgttcttaacagttttcaagggattcatcaataaaaacgcttactaatacgaggacaaatgacatgaattatgaagacgaattagaccgttcgcgcgcaagaaaaagcagacggcgtgagagcgaaagggagacagctgcaaagcatcattcccacgagacagaaaatctgtattccatgagtgcggatccgggaagccgggcagggcgcgcagcagcgaagagccatggcgcaggttcccataaccacaagagacgcaaaaacggaaacaaaaagaaaaagatcatcatcggtgttctgatcgcactgatcgttctggtgcttgggttctccggagctgtctacgcatatatccagcacaacttcggaaaaatgaacggacagaatgagttcgatctgaaagatgttctgaatgagaatatctctctggaaatgagggataagatggaaaaaggatactggaccatcgccgtgtttggtctggattcccgtgacggatcgaccggaaagggaagccagtccgacgttatcatgatcgcaaacttaaatcgtgagacaggtgagatcaaactggcatccgtattccgtgatacttacctgaatgtgaacgataagaacacatacaataagatcaatgcggcatacgcccagggcggtccggaacaggcggtcaaggcactgaataaaaacctggatctcaatatcacacactatgttgcattcaactggaaagcagtcgcgactgcaatcaatatccttggcggtgttgatatcgatatcagtaaatctgagttttattatatcaacgcatttatcacagagactgtaaaaggtaccggaatcggatctgttcagttgaagagcgccggtgtgaaccacttagacggtgtccaggccgttgcttacggacgtctccgtctgatggacagtgactacgcgcgtaccgagcgtcagagacttgtcatccagaaggcatttgagaaggcaaagaaagcagatttcgcgaccttaaacagccttgtgggaaatatgtccgcaatgtgtgcaacaaacatcaatgtcaatgatcttcttccgatggtgaagaatatcacaaagtatcatctcggcgacagcatgggattcccggcagcacgcggagagcagaagatcaagatcggaaaaaacaacgcggcctgcgttatcccgcagacgcttgtcagcaacgtgacaagtctccataacttcctctatgcggaggagaactacacgccgtcgagcactgttcagacgatcagcagcaagatcgcctcggctacaggactcagcaaggcaggcaaggagatcgaccatgtagcgactgaccagggctatatcccgaagggagcgacagagactacaacactttctgctgaggaagaaagcaagaaggagagtcaggaagagtcccagatggaatccatgctcaacgagtccagaaaagaatcggagagcacaaaggagactgagacgggaccggatggaaagccgatcgagacttcttccggaagtcatgagagcagcagcgcggcttatgagacggatgagcatggaaatatctatgtgaaaccgacggagagccatgcggcgagcccgacggatgaagcggagacctccacagaggcattccgtccgtcaaatccgcaggagacaacagcggaagcaccggtcggaccgggatatgagcattccaccgcggcagtaccggaggcgacaacgagcgccggtccggcatcccagtcagaagcacagagctccgtgacggttccgggcggtgcagtcgcaccgaaaggtccggcagcaggagtataaggagcgcaggagggccggaaatccgctcctgtaggatcatggtgatcgaatgactgcgggaagctgctatggcggaccgaagaatgtaaaaagttcaggatcataaagagaaaagacgcatcgtctgatgaagccggagtgaaaattccgggcggtcaggcggtgcgtttttttctgtatttacgcgaacaacgagccaaagtccgcgcttgcgcgagaccttggcgactgtcgcgataacaaggggaaactcgcgaagcgtgttttcacttgtttgagagaactggttttacccggctatatttttaaacgaaattttgaatttacaatttacatagattatacaaactagttaccgaatcatggtttttgcgttttttgtttcgtgataaaaatattactgtacagagaaagaaaaacaaaaacaaagaccttttgaggaggagaaagaaattatgaaaacagggaaagtaatggcacttgcaggtgcaggagttttagcagtcagcatgatgacaggatgcggaagcagcagtacagcatccacaacagcagcagcgacaacagcggaagcagacacgaccgcagcggcagcagatacaacggaagcaaccgaggcagcggctctcacaggttccatcacagcagcaggttcttccgcattaaaaccgctcgttgatgatgcagcagacatgttcattgaaaaatatccggacgtttccatcacgatcgacgccggtggatccggagaaggtttaaagcaggtttctgagggaaccgtaaacattggtaactccgatgtagaggcatccgcaaaacttgacgaggcacaggcaaaagagctggttgaccaccaggtatgcgttgtcacaatggcaccgatcgtaaacaacgatgtcaaagagggcggcgttgaggaccttacaaaacagcagctcatcgatatcttcacaggaaagacaacaaactggaaagaagtcggcggaccggatgagagcattgtccttgtaacaagaccgacatcctccggtacaagagcaaccttccagaaatatgcgcttgacggaaacgaggaagcttccaatacttccatggaaacagatgattccggtgtccttcttcagaacgtaaaggatacaaagggtgcgatcggatacgtagctctttcctatctgacaggcgatgcaggtgtttccacagtagcgatcgacggagcagagccgacacttgagaacacatacgctggaatatacccggtatggacattcgagcatatgtacacaaagggcgagccggatgaggttgtaaagacattccttgactacattatgtccgatgagtacggtgcaaagatggagtccttaggatacggcgtatcttccaagatgacaaacacagaacactaatccagacagagcggcaaaagccatgagccgatggcagaatgcagagaggacatggacagatagctgcaaagaggggcggggcagaaaaatctggcccgccccgaaatagttcagaagatattttccggctgaaacatcagctgaattgatagaaattgcttcgaatatcagaagcaggaggacttatgaagaatggtaaagaaaaaagcatgttcgtcagagaatatctgtggcgggatctgatgaccgtctgcggactgtttgtgatccttctgacgatcgtgatcggcgcattccttgtatacaagggatctgcgacattcctggtctataaacattcctttccggaatttttaggatccgcggactgggcgccggaggacaatatgacaggcggaggcagcatcggagtcctgatcttcatcgtgggatcactctgcacatgcggactggcacttctcatcgcgactccgttttcccttggttccgcgatctttattacggagatctctccgaagtttggtgagaagttctaccgcccggtggtcgagattttcgcaggaatcccgtctgttgtatacggctgggtaggactcacggtactcgttccggcgatcaagaacgtgtttgaccgtcaggtcggtcactcgatccttgcagccggtcttgtccttgcagtgatgatcttcccgacgatcacgagtgtggcggctgacgctcttcactccgtaccgaaggaatgcagaatggcggcatacggacttggctccacacgctggcagacgatctaccggatcgtcgttccggcagcggcacctggcatcatttccggaatcatcctgggacttgcgagagcgttcggcgaggcacttgcggtagcgatggtcatcggtcagacgacagcacttccgaccagcatcttctcgacaacaaaaacgctgacgaccgagatcgcagcccagatgggcaacgcgatggaaggcggcgagatgaaatgcgcactctggaccatggcactgctgttattcgcgatctccctgttcttcatcttcctgatccaccatgtgacagcagtgaaaccggagaaagaagaaaaacagtctgcggcaaagggggaaaagtaaacaatggaaaataagatcaaatgttcacgaagcgtggaccgcgttatgacagttgttttttacctggtcgcagttttcttcttcgcgctgctcattgggtttgccggtaaagtcatcatcggcggtctcatgggagcaacgccggaaatgttccggttcgcgagaaaaggcagcatcggaaatcagttattcaacacgatctaccttgtatttatttcacttcttgtatccgtaccgctcggcgtctgcgccgggatctacctggccatgtacgcaaagcagggaaagatgacaaagtttttaagaatgtgtatcgagacgctttcctcccttccgtccatcgttgtcggactgttcggatacctggtattcctcgtattcttcggaatgggaaagagcctgatggcaggcgcactttccgtttcaatcctgacacttccgctgatcacaacgactacggaggacgcgatcaagggacttccggcgggatattttcaagcaagtctcggtcttggagcaacaaagtggcagtccatcttccatgtgcttcttccggcatgtctcccgcgcatcatgaccggcgtcatcctggcggccggccgtggattcggtgaggcggcagcacttctctacacgacaggatccggaagcgacctgcgctggggcaactggaacctggcagctccgacctgtccgctcaatccgttccggccggcagagaccctgtcgatccagatctggaacctgcaggtaaacggtcaggacaaagcgctggcgaacgcagcttccgcagttctcatgatcctggtgctggcgttcagcatcggcgcaaatgtatggagccattacttaaagaagaagagctccggcgagacagcttaaaaggttccggctgcagagcatgccggaatgttacatgcgggatgatccgcttagagaggaaaatgatatgacagagacaactccgaaatttgatatcgaaaagctgaatctgcattatggtgcttttcatgcgttgaaagacattaacatgcagatcgatgaacataagatcaccgcgttcatcggtccgtccggctgtggaaaatccacatttttaaagacgctgaaccggatgaatgacctggtagaaaacgtaaagatcgatggaaaagtggaactggacggaaagaacatctttaaggacatggacgcgatcacgctgcgccacaaggtcggcatggtcttccagcagccgaatccgttcccaaagagcatctacgataatgttgcttacggtccgaggatctttggaatcacgaaaaaatcagatcttgatgagatcgtcgagagaagcttaaagcaggccgcgatctgggatgagttaaaggaccgcttaaataagagtgcccttggactttccggcggacagcagcagcgactctgtatcgcgaggaccctggccgtggagccggaagtcatcctgatggatgagccgacctccgccctggacccgatctccacatcgaagatcgaggacctcgcgatggaattgaaggacaaatatacgatcgtgatcgtcacccacaacatgcagcaggcggcgcgtatctcggacaagacagcgttcttcctgttaggtgaggtcattgagtataacaataccggggaactgtttgcgaacccgagggatgagcggacagaaagctatatcacagggaggtttggctgattatgagagatgcatttttaaaacagctggaggaactgcacaaaatgctcgcggagatgggaagtctctgcgaggacatgatcgacggaacatacgaggcactcatgaacatggaccgggatcaggctgcgaagatcctggcagcggacgcgaacgtagacttgaaggagcgcgacatcgagagcaagtgcttaaagcttctgcttgagcagcagccggtggcgagcgatctgagaacgatctcatccacactgaagatgatcacggatctcgagagaatcggggatcaggccggcgatatcgcagagatcatcaaaacgaccgatcttttacagccggtaaaggcgacaagactcggagagatggcaaaggctgtcgcatccatggtgcgggagagcatcgagagctttgcaaatgcagacctgaagaagacaaaggaagtcatcgcctatgatgatgtgatcgacggactgtttgatgaggtcaagaaagagcttgcagatggaatcttaaacggagaggcgactcaggagcagatcctggatactctgatgatcgcaaagtattacgagaggatcggggatcatgcgaccaatatcgcagagtggtctgagtatgcgatcacaggcgttcaccggaacagtgagctggaagaacaccagtaaaagttttcgaagatcgtgaaaatttatcaaaagtaaaaatatgtgagcgggacacctggatgaaggaggttccgcttatttatgtcatgtacgttacttttcgcaggtaggaattttcagaactgaaaattccgtatgataccgtaacacatgtacatgcctgaatgtccgtaacagacaaacatatacttgcatttgtccggaaaatatgctaagatttttacgcacacatgtttctctggggcgcacacatagtaacgtgacagagtaaaaaaagacaggatgcatccgcagcgggataccggaatgaccggatgactgcgggaaaacttatggagcttgcgaggtcttagattatggagaagaaaaacaaatattatgtagttcgtgataaagcactgccggaagttcttcagaaagtggttgaggtgaaacgtctgctagaggcggacaaaaacctgacagtacaggaggcggcggaacaggttggtttaagccgcagttccttctataaatacaaagatgatattcttccgttttccgataatacgagaggaaagacggtgactctggtgacccagatgatcgatgagccggggctcctgtccgatctgcttcatattgtcgcggactatcgtgccaatattctgacgatccaccagacgatcccggtaaacggaaacgcaacggtaaccctgagtgtggaagtcctctctgatacgggaaatatggccggtatggtggaggagatcgagcacttaaagggtgtacagaacgtgaaaatcttaggagtggagaaataggcagatgaaagcagcgattatgggatacggaaccatcggttccggtgtatatgaggtccttgaccgaaactgtaaaattgtagagaaaaaggccggcgagccgatcaaggtaaaatatatcctggatctcagagagttcccgggaactccgatcgaaaaacttgtgatccacgacgtgaaaacgattgtggatgatccggagatcgggatcgttgtggagacgatgggaggaaccacaccggcctatgagtttgtgaagagctgcctgcttgccggaaagcacgttgtgacttccaacaaggcactcgtcgctgctcatggaaccgagctgatccggatcgctgcagaaaagaacgtgagcttcttatttgaggcgagtgtcggcggcggtatcccgatcatccgcccgcttgtcgagtgcctcggcggagaggagatcgaggagatctccggaatcctgaacggtacgacaaactatatcctgacaaagatgaatgaagagggatggagttttgaggaagcattaaagtgtgcccaggagttaggctacgcggagcgcaatccggaggcggatgttgaaggctacgacacctgcagaaagatcgcgatcctgaccgcagttgctaccggaaaagaagtcgattacgagaagatcccgacggagggaattacaaagatcaccgggctggattccagctatgcggcctgcatgggagcggcgatcaagctcttcggaacgagtataaaccgtgacggaaaggtgtatcttgaggttgcaccggtccttgtggatgccaaagatccgctgtacgctgtgaccgatgtatttaacgggatcaaggtagtcggaaacatgctcggaacctccatgttctacggaagcggagccggaaagctcccgaccgccagcgcggttgtcggcgacatggtctccgcggtccgttttggcgatgagccggagaagatcggctggggaagcgaagaacttgaggtacacaaagcttccgagattccgagaaaatattttgcgagatttgagggatccagatcggagaagaaggagatcgtggaggaaaatctcggaaaagtgaagtggatggtcctggaaggaaaagatgaattcgcggtgctgactggtcagatgaccggagatgcattcgatgcggcggctgaaaagatcggcggactgcgccagaaactcgcagccagagtatgatcattccggcgttccggataccgtgcctctttcagctgatgaccgggctctactgtccgggctgcggaggaacgcgggcggtaaaagcgctccttgccggacatccggtactgagttttctgtatcatccgctggtcctctgtacggcggtgacggcggctgtctttgccgtctcctggggactctatttcctgaccgggaaggaaaaattccgcttggaaccggatgaccgctatgcttacgcggcggcggggatcgtgatcttaaattttatcataaaaaacggacttctggtgtttgccgggatcgatgtgatcgggcggctgccgggggtgtgagaaaaagttacttttcatgggtaggaattttctgaactgaaaattccgtaatataccgttatggtcgcggattttgccgattcggaatgcgaagcatcggcaaaatcctgttacagtaagcgggcatggagtgcccgtgtactgtgacgagaaaaagcctggtatgggtatcgagagatatctgtgccgggctttttgtttaacatgaaattccgagggaacttcatgttaaacaaaaaggcattgcgtgcctaagatgcgcactcgcgcgaaggtgaaggttgtcgcaagcgaccgcgcgggcgctcgcaggggacccgtccctgatcctcgcggatgagccgacgggagctctggattccagaaccggccgggaagtgctcgactttttaaagaaactcaatgaagaaggaaacacgatcgtcatgatcacgcacgacagctcgatcgctttggaggcaaaacgggtggtgcggatccatgacggaaagatcaatttcgacggggatgtgaaagagtatgctgcaatcatttaaaatggcgttaaaaagtatctggggaaacaaaatgcgctccttcctgaccatgctcgggatcatcattggcgtcgcgtcggtgatcatcctggtcagcatcgtaaacggatatatgtcctacatggtggagagtttttcttccatgggtgtgaaccagatcacggcgcggtacacgccgctgccgtcgagatcgatcgatgtggatgaagtctacgatttctatgaggaacacagcgatctttatgaaaatatgtccccgaccgtgtcggtgagcgtcacggtcaaacatgacaatgacacgatggattcgaccgaggtcggcggatacagtgaggattacctggcaatcaaggattatcagatcgcatatggaagaaatcttctgtactcggacatggaggcgagaagaaaagtcgcggtgatcggctcttatgtggcgtctgagctctacggaggttcccagaatgcggtcggcgatacgatcaagctcaacggggagagctatacgatcgtcggagttgtggagcagcagacggagaacagtttcgatcttgaggatggctgtacggacgattttgtctggatcccgtactcgagagccgtgaagatggcgagaaatgccgtgatcaacagctatgtattcacgtcccgggatatcaacgagacagaaacctgtacacaggagttaaaaacattcctgtatgaaaagatgaagagtgacagcctctatacggtgactgcgatgagttctctcctcgactccttaaatgatcagatcaatatgatgagtatgatgcttggcggaattgccgggatctccctgctcgttgcgggcgtcggagtcatgaatatcatgctggtctccgtgacggagcgcaccagggagatcgggatccgcaaagcgctcggtgcaaagaagagtgtgatcatgcagcagttcgtgatcgaggcgcttgtgacgagtgccatcggcgggatcatcgggatcgtgatcggtgcagtcgcgagcaccgggattggcaagctcatggggatcgaagcgcctccgaccatgacggcggtcgtgatctcattctcggtctctgtggcgatcggactgatcttcggatatatgccggcgagccgggcagcaaagctgaatccgatcgacgcgctgagaacggactaaggtgggcgcacctattacaccaggaaaagaaaggatatgtgtggcagtcatgccacggatttgccccgaaaagacagaatatcttaagttgacggaaaggattgagtaaccttataataaagataaagaaaaaatcattgaagaagaatgatttcacaaaatggcatgaaaagattgtaaatatgcgatatgaatttttgaaaaattacgataatttcaaaaaataaaatattcgcaaaaccacaatataattgtgccggaaatttatctatgggggaggcagtcctatggcagaaagaaaatggaaaaaagcaggagcctggatgatcgcctggatcatggccgttgtatttgcgatatccggtacagagcagacgtttgcgtcaacgagttatgtcagcagcgtcaacatcacgctggatgttacaccaaccgtcggggaatcccttccggatctcgatgtgggatatacatccgacaactgcgaggtcatgatcccgagcaatgacaagtatgatattgtctcggcaaaatggtcctcgacaaaaaatgatgtgaagatcggcggaacttatacgatgaagataaccttaaagacgttgaatgattataaattcagcagcagctcctatacttcttcgaaagtcaaggtgaaaaacggaactttcgtgagtgcatcgagaagttcagccactcagctcgtcgttaccgtaaaaacaaaaccagcgaaaggcgacctggatgcgccgggtgaggcatactggcagacaacaaagtccggaagctccgatctcggactcgcaaaatgggaagcagtcgaggacgcctcttacgaagcatacctgtatcgcgggagcaaggttgtccacaagagcggtgagatccatgtgagcaattatgatttcttcccgtatatgacctcaaaaggaacctatacgttccgtgtccgttcgctcccgtcaaacgatgaagtgtcgaaatacgcgtcaaagagtgaatggacagtctctgatgaagtttatatcgagcagagtgatgcggatcgcgcggcaaagaagaagccatcgaacagtactaatacgggctccggaaatacgaacagcggaaacagtggagccagcggaaataacggaaattctcagccggcaccttccggcacaaatgcggtcggctggatccttgatggaaaccgctggtattaccgttacccggatggaacgtatctgaaaaacggctggggatcgatcggaggagtctggtatctgtttgacgcaaacggcatgatgctcacgggctggcagctgaaaaacggcgtgtattattatatgaacggcgacggaaagatgcagaccgggtggatcaattacaacaatacctggtattatctcgctgatagcggtgcgatggcgaccgggtggatcactctgtcagacaagacgtattatcttggcggtgacggcgcgatgctgaccggctggcagagcatcgacggacagatttactatctgtacccggatggacataaggcggtcaacgaagtgatcgataccttctatgtggaccagaacggcgtctggaagaaaccacagtaggatagaaaaaagtcctggaatccagtattaaacgaaaaattggcatggcggctttccggacagagtaacctgggaggtccggcatgccgttttgcttagagaaaggagcttgttatgaaacatcgaaatctcagaaagtcagtctttgcagcaggagctgtggcggcgatgctggttttaacagcaattccggcatttgcagcccagacggtcagttccatgcggatcacgtttaccaacaaatatgaagatccgggcgtgatcgaggaaccggaaatcacctgcagtacttccggtgtggagatcgagtcagttgagtggagcaaagacattgaaaaatggaaacccggaacaaaggtgacggcgacactgatcctgtctgcagacggaaaagaattttccaatacctatggttcaaaattctgccagatttccggaggaacactcggaaaagcggtgaaagaggatgaaaatctgaaagtaacggtctcctacactccggtcgtatggctggaatccccggagacggccggatggtccgcctcaaaccataacaaagcggtctggaaaaaggtggactatgcgaccggatatcagatccgactgtatcgggatgacagctatctccggacgatcgatgtgacaggaacgagcaaagaactttcggagtatatgggcagggaaggaaattactactatgaagtacgcgcggtcggaaagacaacgaacgacgcgaaataccggaagagcagtgattatacaacatcctcggacgtctatctagatgacctcggagacacggaaggcaactggaaaaactacgaacagggaaagaaatatgtgagcgagaccggagaaactgttacctcccagtggtaccggatcctcggcacctggtactattttgatgagaatggctacatggcgaccggctggagaaaagtaaatgaccgctggtattaccttgaaagcgacggaaagatggcaaccggctggaaacagcttggcggtaaatggtattatcttgacgcagacggatcgatggcgaccggatggcgtcagacgaatccgggccagtggtattacctgaatccggacggatcgatggcatcgtcgacggtgatcaatggatatcagctggacgcgtcgggagtctgggtgaactaaagaatagaaaaaacgtccttccccttgacttaaagtaaacttgaagtgctatactaaaagcgaacattcaggcccatagggcgggaaatccgtcacttttcacgggtaggacttttctgaactgaaaattccgtatgataccgttgcagtcgcggattttgccgattcggaatgcgaagcatcggcaaaagccattgcaaagatcttaaaggaagcggagccggaatcctccgttgcatcctgggcagtacgttttacagctaacctggaaggcgtgatcacggttctttctggtatgagcaacgtggagcagatgaaggacaatctttcctataggaaggactttgcaggactcggcgagaaggaaaaagcgaccttaaagaaggcacaggacgaattaaagcgcatcccgctgatcccgtgcaccacatgcaactactgtgcaaaagtctgtccgatgcagatcggtatttccggatcctttacggcgatgaactatctgactctttacaaggacaaaagaatggcacagcaccaggagaactggctggtcggcggccatggaagaaaacgtgcggacgagtgtatcaagtgcggaaaatgtgaggcggtatgtccgcagcacatcaagatccgcgagaatcttgagaccgtctgtgagaaacttctgaagtaaacgatgtgataacagaaaaacgaatttgaggcgcagcctggggtttagaaatgaatcccgggctgcgcttttatcgttgatatttttccacaggacagaatcacatgaatctctgtgatctgccggttcatgccgatggccatccaatacaaagcatcggcaaaatcccgctgcagtgtgcggacatggagtgcccgtgtactgcaacaaaatacttgacttagcataagatatcaactaaaatttagaaacgtgtaaacaattgtcgcggcagcagcattgtgcggcgtcgcagtcacctgaagtttcgcagtccacggacaggtacttaaaaaagagagacctgctgctgtctgcgcagcgcgtgaactgtaatctttcaaaaacacgagaaaggatttctatgggaatcattaaagcagtaaacctgatcttcgattatatcaggcatgatgaagaggaagacaaggatgagatcagccatgcattaaaaggcgtctctctggacatcaaagaaggagattttgtggcgatcctgggacataacgggtccggtaaatcgaccttcgcgaaactgatgaacggaatcttgcttccaacagacggaaccgtatatatttccaatatgaagacggacgatgaggaacatctctgggatgtcagaaagacagcgggaatggtattccagaacccggataaccagatcatcggaaacgtcgtcgaggaggacgttggattcggcccggagaacatgggcgttccgaccgacgagatctgggcgagagtcgataagagcctggaggcagtcggaatgacagcgtaccggcttcagtccccgaataagctttctggcggacagaaacagcgagtggcgatcgccggagtgatggcgatgaagccccggtgtattgttctggacgagcctacagcgatgctggacccgaacggccggcgtgaggtcatcaagacggtccatgagctgaaccggaaggaggggatcacagtactcctgatcactcactacatggaagaggtcatcgacgcggaccgcgtggtcgttatcgacggcggacatgtcgtgatggacggaaccccgaaggaagtcttctccagggtaaaggaactgaaaaaatacagcctcgatgtcccgcaggtgacagagcttgcggatgacttgaaggaagccggaatggatcttccatacggaattctctccatcgatgagctggtggataaacttgttccgatcctgaagtaaaacagttacaaaaacaactgtaatttgactcgtaactgctgccaggcatcttgtttaagatgaaaaacggaacagttaccgtggaggaaatatgtcaatcgaaattaaacacctgaatcatatatacgggcagggaacgatcttcgaacagtatgcgttaaaagacgtgaatctcacgatccatgacggcgagtttatcggactcatcgggcataccggctccggaaaatcaacactgacccagcacttaaacggacttttaaaggcgacgagcggagatatcctctataatggggagagcatctaccgggaaggttattccatgaaggagctccgcagccatgtcggactggtattccagtatccggaacaccagctgtttgaggtggacgtcttctcggatgtctgctttggaccgaaaaacctcggtcttcagaaggatgagatcgagaaacgcgcaaaagaagcgctccagatggtcggactcgatgagagcttttataaacaatccccatttgacctctccggaggtcagaagcgccgagtggccatcgcaggcgttctggcgatgaaaccggaggtcctgatcttagatgagccgacagccggtctcgacccgaaaggacgcgacgacattttaggactcgtacaaaagctccataacgagcaggggttgacgatcattctcgtctcccacagcatggaggatgtggcgcgatatgtgtcccgtcttgtggtcatgaaccacggcgagaaggtcttcgacggaactccgaaggaggtattccgccattataaagagctggaagccatcggccttgcggcgccgcagatcacctatgtggtgcacaagctgatcgacaaggggatcccgctggatccggatatcacgacggtggaagaggcgaagaatgcaatccttaagatctggcgcgaaaagtatggaaaaagttccggaaatgcagcgcaggtaagcgcagccggagcggattccgagaacgcagatcatgggaacgccactggaacagcctctgagaaggcagacagcacagaaaagacagccggggaggaaacgacatgttaagagatatcacgcttggacagtactacccggtagattcccttcttcacaggctggatccgcgaacaaaactctttggaacgcttgtatacattgtaacattatttattgcggacaatatctgggcataccttgcggcaacaatctttctgatcactgccatcaagctctccaatgtcccggtaaaattcatggtgcggggcttaaaatccatcgtgttcctgcttctcatcagcgtcagcttcaacctgttcctgacgccgggtaccccgatctttaagatcggtttcctgcagatgacctgggaaggtctccggtttgcggcatttatggcgatccgtcttgtttacctcgttatgggatccacgattctgacgctcacaacgacaccgaaccagctgacagacggtctggaaaagagccttggctttttaaagaaggtcggtgttccggtccatgaggtgtccatgatgatgtccattgcgctccggtttatcccgatcctgatcgaggagacagataagatcatgaaagcgcagatggcaagaggcgctgatttcgagagcggaaacctgatccagaaggcgaaatccatggtaccgctccttgtaccgctgttcgtatccgcgtttcgccgtgccacagacctcgcgatggccatggaggcgagatgttaccgcggcggcgagggcagaacaaagatgaaaccgcttaagtacgcgaagagggaccgtatggtttatggggcgtatctggtgtattttgcggcggcgatcgtgctgaaggttttgctgtagaagatgattaactccggtttcgatgaaaagcagcgctaaagcccggatatgacggggaacagcaccgcgtggaaaatggtcgaaatcgggaacttgatattcagagaaatagaattgcccggattttccggacagcagaaggaaaacaataaagctatgagacgaatcaaactgacggtggcctacgacggcaccgcatacaagggctggcagctccagcccaacggcgttaccatagaggagatgttaaataaggctctttcggatcttctgaaagagcctgtctgcgtcattggggcgagcaggacggactccggtgtccatgcgcgcggtaatgtggcggtctttgacacggagagccggatcccgggagataaattctgttacgcggtaaaccgcggactcccggaggatatccgtgtggtggaatccgaggaagttccaacagattggcatccgagaaagcagaactgcgtaaagacctacgagtatcagatcttaaactgtaagatcgagatcccgacgcgacgcctttacgcccatttctgctattacccgttaaacgtggaaaagatgaatgaggccgcaaaatacctcatcggggaacatgatttcatcagcttctgtgctgcaaaccaccaggcggaggagacggtccgaacgatctacggggccgaggtgaaaaagaatgatgaggatatcgtaacgatccgcctttgcggaagcggattcctctacaacatggtgcggatcatcgcgggaaccctgttaaaagtcggaaccggcgagtgggagccggaacatgtgaaagaggtactggaggcaagaaaccgcaaagaggcgggacagactgctccggcgaagggcctgacacttgtgggaatcgagtatgagagggagatcccaaaggagaccacctcgagaaatgaacattgggacgctgttctggaccagagtaaactggaatccgacggaatctcctgcgtccggatcaggttctccgaaccggaagaactcccccgactgatccgccgtatggtgcaccaggcataccggaatggggcgaaggaagttttcgtcacggtcccggatgggtatgaggtatcggagacggaaagttatgggtattaccgactccgcaggctggatgacggcagctacggaacggagtatacggggaggacgctatgaatcgggtactgatccagctgatctattttgtgatctattccattgtgttcctgatcatcggaaagctctctttttcggaaagtgattctctctccaagtttttcgtcggtgagagaaagaatgacgaaaaacgcctgtttttcacatttgtcggaacctgggtctctgcggcgacgattctgggatttacgggaaacgtgtatcacagcggactctccgtcatcgcgtcgtcagtcatcccgtggtttatcggcgcgggtctcctgtatctgatgacggaccggctatacgagaatgatgtcctgtcgatcccacagctgattggaaaaaagcatgattcaaaatttctgcaggcagcatcggccatttttatgatctgcggctatattttctatctgatgatccagatcaagggatttggcatcgcggtatccagcctgctgaatatcaattacaaggtggctgtctttcttgtttatctctttatcctctattcgagctttggcggctttaactccgtcacgaagtcggactgcctgaatctgatcatgctttctgtgagcatcggagttctgtatctgattattgtaaaaaacgttccgggacattggtttttgacagatcagacggtgcatgaactcataaagagcaagggcgtcttcgaaaagcaggcagcggagatcggaatctttgtatatatctccatgttcttcggctggggaatgggactggcgtcgaatccccaatatatggtcaggatcctggcggcgaaggataaaaagactgcaaaacatatgatcctgcatgcactgatattcctgtgcgtgctgtactttgcactgacccagatcggtctcggactgcggatcctctttccacagctgaaaaattactgctccgcggatgacgtatttatctatgcagtggtcaatctcatgaacacaccgttcagcggtttcttcctgatcagcgtgatcggcgcctgtgtctcaacggcgaactcccagcttcacctgatcggctgcatgctgtcctacgatgtggctgcccagctcacaaaaaagaagatgtcggaggagcagattctcaccctggcgcgggtatgtatcttcatgggaggcacggctgcactgatcttatccgtaaatccgccgaaggacatgctgtccttcggggcggatatctggggattattctcggcagcgcttgcccctctgatctacgggggactgtactggaaacagagaacgaaagccggggcggtgggagcgttctttacgggacttatctgctctgtcctgttctggaaaatggatctccggatatactgggcatttccggcaacactgtgcgcggcggcagtctatgttgtgatcccgatgtttgagaagaaaagaggggcagaagaatgagcggaaagaaaaaacagctgtttcgatcatggttctgcaggatcgagcatgaggtcatgctgccgttcatcatggtagggatcctggtggtctgtgcattctgtgctatttcggtgtgtaatggatatacagaaaagcttaaggacagaaaagagtacgcgaggactgcgatccgcagcatggaggcggatatctactatctgcatggaaaactgagtgaagaggagatccggcagaagtataagttctatcatgatccggcggtgcggatcctggctgccgacggcacgatcatcacgggggacgaggagatcccggacggaaatatggaactcctgtacgcggacagtggaaattccctggggtggcgtctggaatactggatggataaaaagtcattcgagaacgcgatcctggaagaacagaattacgtcattgtgggcgctgtggccagtctcctgatcatcgtccaggtcagcgtgttcctcgcctggagtctcacaaaaccgatccgcagcatgggcgcggcgtgtaaaaagctcgatgagaacaaggacgggttccgggagtacagctttccggagacagcgagaaaggacgagatcggccagctggcgagaacttttgagaatcttctgaaaaaccttgataattacacaaaaatggagtatacgagccggatgtcatcggcgctggcccacgagatcaaaaatccgctggccgggatccgttccgggatccaggtcctgggcggacgggcggtgaaggagaatgaaaagcttctctgcgacagcatgctccatgagatcgaccgggtgaccgggctgatcaatgacctgtttacgctgtcggtgaagaaggaaaaccacagacatgtttttcaggcggatgtgctgctgcgggaggtggcatccatctatgcgaaggagtgcgaacagcagaatgtcgcgttcaagacagactgcgcggcgtgtgaagtgtttgccgatgagaatgaaatgcgccagatgctgtacaatcttctgacgaacagcatgcgggcggtcagccgggacggcacggggaagatccgtctctcagtgtcttccgacggaggcatgactacattctgcgtctccgacaacggaaaaggaatgaatgaagaggaactgaaacgtgcaagagaaccgttctacacgaagagcattaacggcgtcgggcttggtctggcgatcgtaaaccggctgatcgagcagaaccacggcaaaatggaaatggaaagcgctccgggctgcggaacaacggtgcgcctgatttttgaaagcagggatgaacatgaaaaaggtactgatcgttgatgacgaatttctgatccggtttacgctggaggaaggactgaaggaccggggatacgagacccagtcggcggaaacggtgaaggacgctctcgagaagatgaaaacgttccacccgcaggtgatccttctggataaccgcctgcaggacagcctcgggatcgacgagatatccacgttccgttccgccgatgaggaggttcaggtgatcctgatgacggcgtacggctctgtcgcccaggcggtggaggcgacgaagcgcggcgcttacgactatattttaaagccctttgatattgacgagatcgaccggatcgccagccgctgcattggccagatgcaggatcgggaatccctggagttcctaaagggaaaaacgcaggaatttatcggagtcagcgacgccgcgatgcggatccggcgccacatcgaacttctcggaaagaattccacggtgaatgttctgatccggggcgagaccggaacgggaaaagaggttgcggcgtccctgatccatgcctgcagcgaccggagggaccacctgatggtccgcatcaactgcagcgcaattccggaacatctgatggagagcgagctctttggctatgagcggggggcctttgcgggcgcgatgaagacgaagaaaggcctgatcgagctggcagcaggcggaaccgtgttcttggatgagatcggggaactcccgctgtccatgcagacaaagatcctaacgttcctggaccataagaagttcaagcgtgtgggtggtctggaggacatcgaagtggatgcccgggtgatcgcggcgacaaaccggaatctggaacatgccgtaaagcagggggaattccgggaagatcttttctaccggatcaatgtcatggagcttgtgatcccgccgttgagggatcggagagaggatattccggcgctatgcgattattacctgaaatattataacggcatgtttggaaagaatatcacccatgtggattctgattttatgcgggaactgcttttgtatgactggaaagggaatgttcgggaactgaaaaatattttcgagcgctgcttcttattctgtcagggggacgtgcttgaaaaacatgtggaattaaagcgggtagactggaaagatgatacccggacaggagagccgtttgcgttaaaggatcttcggaaaggaccgatcagtctcgatcaggaggtctccatgctggaacagatctacatggaccaggccctgaagctctgcggaaacaacgtgacaaaagcggcggcccttttggggatcacgagattctccatgaagagaagacttgataaggaagactgaaatcttacggcccgcacggcaaggtggcagacctgctgaacaattgaaaacgtgcaaaaattcacatcgtgcgaaatcgctcgctaaaactgagcggattcgcacgatttttttgaaaatttcaaaaagatttttcaaaactgaaaaatatagttgaatatcgctaaaaagtcagataaaatcaaggcatcagttgtagaaaagatacgaaaggggtactcatttatgggggaaaagaaaaaacacagcaacatgacgaccttgatgggagctgcgttcctgatggcgacatccgcgatcggaccgggattcttgacacagacttccacatttacggctcagtataaaagcgttttcgcgcttgtgatcgtctgtacgatcctgttggatgtgacgacacagttaaatatctggtcggtgatcggtgtgtccggcatgcgcggacaggatattgcaaataaagtccttccgggactcgggtattttatcgcattcatggttgcgcttggcggtctggcattcaacatcggaaatgtcggaggcggcgccctgggacttaacgtattgttcggaattccgacgacggttggaacctttatcgcgggaatcattggaatcctgatcttcctctccaaggacgcgaagaccagcatggataagctgacaaaataccttggaagtatcatgatcatcgtagttctctatgtggcgatcaaatccaaacctccggtaggggacgctgtgagcagtattttccatccgggcgatgtgggtgctcttgttcttccgctcatcacgcttctcggaggaagctgcggcggatatatcacattctccggtgcgcaccgtcttcttgacgccggatattccggaaagaaagatcttccgcatgtacgccagtccgttttaatgggtgtcagcgtttccggaatcatgagaatcctgctgttccttgcggttctcggtgtcgtgacagcaaatccagatgtgacacttgacgcttcaaacccggcagcagacgcgttccgtctcggagcgggcgtgatcggatataagatctttggtcttgtccttttcttcgccgctaccacatccgtcatcggcgctgcttatacatccgtttccttcttaaagactcttcatccgtttatcatgaagaacgaaaagtggttcgtgattggatttatcacagcctccacactgatcatggcgatcctcggaaagccggcagcacttctcgtacttgctggcgcgttgaacggactgatccttccgctgaccctcttaacgatccttctcgcgagcagaaacaagaagatcgtcggcgaggattacaagcatccgacgatcctcatcgttttaggtgtatgcgtggtactgctcacaggattctccggaatcaaagctcttccgggaatcttaaagatgttcggctaaggctaattatgtattgagattgtgatgcaagtcgtttaaaatagtaggtagaagattgaaaatactggcagcgaaagcaaggaggaaatattatgtaccgtgtagatttaaacagtgaccttggagaaagctttggaaattatacgatcggaatggacgaggagatcttaaagtacgtctcctccgcaaacgtggcctgtggctggcacgcaggtgacgcgatggtgatggaaaagacagttgctctggcgaaagagttcggaacagccgtcggcgcacacccgggattcccggatcttgtgggattcggacgccgcaatatggcagtgacaccggaggaggcaaaggcgtatgtccgctaccagcttggcgctctcatggcgttctgtaccgcccacggcgtaaagatccagcatgtaaaaccgcacggcgctctttacaatatggcagctgttgacgagaagttagccatcgcgatgtgtgaggcagtttatgaggtagataaggacatcatcttcatgggccttgcaggttccaagatgatcacggcagcagaaaaagtcggtctccgcgctgcaagtgaggtcttcgctgaccgcgcttacaacgatgacggaactctcgtatcaagaaagcttccgggtgcagtgatcaaggacaaagacctcgcgattaaacgtgtgatccgtatggtaaaagaaggaaaagtcgagtccatcaacggaaacgatatcgcgatcaaggcagactctatctgcgttcacggagataacccaaaggcattggagttcgtaaagaatatccgtgagacactgatcgcggaaggcgtcgagatcaaaaatttaagtttatagggaaaagagtgcagctgtttgacatcttacaaatgtcaaacagccgcaaatgtatagagaggagactcgctgtgggaaatgtaagatatctggtttccggcgactgtgcagtcaccgtggaatttggaaatgagatcagtccggagatcaaccggaagatccgcgcgttcaagatcgcgttagagaaagaacagatcgaaggaatcgtagagactgtgccgacctaccgttcccttcttgttgtatacaagccggaagtgatccggttctcagcactgacagaaaaatttgagaagatcctgtcctccatgggcagcatccagatcccgccgccaaccgtgatcgagattccggtgctttatggcggggagatgggaccggatcttgcgaatgtggcaaaacataacggtcttacggaggaagaagtcgtaaagatccattcctctgaagaatatctgatctatatgttaggcttcatcgctggcttcccgtatctcggcggtatggacaagcgcatcgcgactccgcgtttaaagagtccgcgtgtaaagatcgagggcggctccgtgggaatcgccggagagcagactggaatttatccggtggcatccccgggcggctggcagctcatcggaagaactccgttaaagctctatgattccgagcgggaaaaaccggtgctccttgagtccggacagtacattaaattccgcccggtgacggaagaagagtacaaagccatcgaaaaacaggtggagaacaatacatatcagtatgtagtatatgataaggaggcggagtgatgggcattcagatcataaacggcggattcctgacaacgattcaggatatgggacgttacggatatcaggagactggaatgtctgtatctggtgtcatggataccagggcagcgtcactcgccaatatccttgtcggaaatgatatgaacgaggcggtcatcgagatcacgatgatgggcccgacgatgaagtttacagaagatgagatcatcgcggtgacaggcggcgacctcggggcaaagatcgacggaaaaccggtggagagataccgtgcggtcctggtaaaagcgggccagacgttgagcttcatgggcatgtacggcggaagccgtgcgtatatcgcttttgcgggcggacttgatatcccggtcgttatgggaagcagatccacgaacctgaaatcaaaggtcggcggatacgagggaagaaaattaggaaccggagatgagatcgctttccgcgctcctgcatcctggctcccgcatatggccgagcgtgtatacggacttccgtcttatggtgcaaaggaatggacactcagagtcgttatgggcccgcaggacgactgttttacagataagggaatcaacaccttcttaaacagcacctacacgatctccaacgagtacgaccgcatgggctgccgcatggaaggcgatgtgatcgagcataaaaacggcggcgacatcatcactgacggcatcagcttcggcgctgttcaggttccgtcccacggaaatcctatcgtcatgatggcggaccatcagaccacaggcggctacacaaagatcgccaatgtgatctctgtggaccttccggtgcttgcccagtgcatgccgggaatgaagatccattttgagaaagtcacggtggatgaggcgcaggatctctattgtaaggaaaaagaagagtttgacgcgcttgcgaagagactgaataccccggtggaaccggcggatgatgagcaggcggtggcgatcgcagcggcatccgaggcgaacaagaccgcatgggtaaaggcgggaacctataagatctccgtaaatggaaaagagtttcttgtggagcttgaaaaagaggttgtgagattccggtaaaaaatatggggatgcagaccggaaaatgacctgatcggcgaagcgtttcagcagaatgggtcgcgggaaacaggaaacttaagatgccggaaatgaaaagaacggcataggagaaaggggtaacgtaaaatgggagattacagaacgacaagaccggaagagatctggaaaaagatccgtgacggcgagatcacagaaccgacggccggaatgtgcgggggatacgcacaggcaaaccttgtgatcctgccgaaaaaatatgcggaggattttaaaaagtttgcggagcgcaatccgaaaccgtgtccaatcctcgagatcatggacggctccccgctggtccatgatatgggcgagggagcgaatatcgtcaccgatattccgcggtactttatctataaaaacggcgtgaaggtcgatgaagtgacagatgcttccgaatactggcaggatgatttcgttggttttcttatcggctgcagcttctcctttgaggaggcgctcttacaggcaggaattgatgtgcgtcatatctccatgggaagaaacgtgccgatgtacaagacgaacatcgaatgcgagaaagccggtgtgtttgaaggtccgcttgtatgcagcatgcgcccgatgacgccggagaacgcaaagaaagcggcggagatcacggagaagttcccaaatgttcacggtggtcctgtccacatgggcgatccggaaaagatcggcatcaaggatatcgaccatccggactatggagatccagtggagatccgcgagggcgagatcccggtattctgggcctgcggcgtgaccccacaggcagccgtcgagcgggcgaagccgccgatcgtcatcacccacgctccgggtcatatgtttatcacgaatgtgaagaacgcggagttaaatgattatctggagaaaaagaagcaaggtacgaaatcgctgtgaaacagaaggaatcgcagcatcgcagatgcgtgatcagctgtcagcatcggacatggcagattttgctggacagatgcggaagtgagatgttcgggccctcgcgagtgagaggttcgggtcaccgagtcttcgggctccggatagttgacagaatccgaaatctatgttattctaccagacgttaaaactcgtgtggatttttagagaagaacttttttcgccacacaatcacctaaaagctttatgggtggttgtgtggtttttttatgtaacaggaaattccaaggaattccctgttacataaaaaggcactgacgtgccaaagatgcgcactcgcgcgaagatgtagactgtcgcaagcgaccgcgcgaggcgcgagaatgtgccaaggcacattcttttttagttgggaggaagaaacattgatccagatcgaacatgtaagcaaaaccttttcaggaaaatacggaaccgtccacgcgctggacgatgtgagtatccatgtggaaaaaggtgatatctgcggcatcatcggattttccggagccggaaagtctacgctgatccgcctggtaaacggccttgaaacggcagacagcggaaaagtcactgtctgtggaaaggagctttccgcactgaaaaagccggagctcagggctttgagaagaaagatcggaatggtcttccagcagtttaacttactggaatccaagacggtgtaccacaacatcgcacttccactgattttagcgaagactccgaaggcagagatcgataagaaggtcatggaagtattaaagatcgttgaactggaagataagaaagatacctatatcagccagctgtccggcggacagaaacagcgtgtcgggattgcgagagcgctgacgaccgacccggagcttctcctttgcgacgaggcgacaagtgccctggatccgcagacgacagagtcgatcttaaagcttttaaagcggatcaaccgggagatgggcgtcacgatccttctcatcacacaccagatgcaggtcgttcagatgatctgcaacaaggtagccgtcatggagagcggaaagatcgtggaatccggaagtgttcttgaggtattcggatctcctaagatgccggtcacaaagcggtttgtccagacggtcatccgtgaccagatcccggacagcatcgtgagtctcgtaaaggaacagaaagaaaatttccgcgtcgaacgcctgaaattcatcggttccagcgtgaaacgtccggtgatctccgatatctgcaagacggacggtgtcgtggtcaatatcctcggcgcagcggtccaggaactggaagacagcgttatgtgcgtctttatcttacagctcatcggtgacgatgagagtatccggaaggcggaagagcagatcgataaaaatggcgtcttaagagaacggatggaggtggagtaagatggaagaactcatgaaaacaaagatctttaaggtcacagtggaacgtctcctgttaaatggaggacagactctctacatggtcggctggtcgctccttgttggaacgatcattggtatgatcctggccctgatcctggtgctttgcagaaaaggcggacttgcggagaaccgaccgttatactggatcgtgagcgcttatatcaatgtggtgcgaagcattccgttcgtaattttgcttgtaacgatcatgccgatcacacgcgcgatcgtcggaacaacgatcggaagtacggcggcgctggtcccgttagttgtttacataagtccgtatcttgcaagactgatggaaaacagcctgcttgagatcaatccgggaatcctggaggcggctgaggccatgggcgcgacaacctggcaggtcatccgctatttcctggttccggaaaccctgggttccatggtgcttgcacttacaacaggaaccatcggacttctcggagcgtccgcgatggctggttatgtcggcggaggcggagtcggtgacctggcgctgacatatggttatgagaagatgaacaccccgctcatgatcctcacggtcgtgatcctggtcgttctggtacagatattgcagattcttggaaatacgatttccggaaagttaagacagcataaataaaagaagaggagagaaagaattatgagaaaagtgattgcaggagtactgatgggagcggcagttttaagccttgccgcatgcggaaagacagagacagcagctacaacagcggcacaggctgctgagagccaggacacacaggcagacagcacagaggcagcagcggacaccaccggcgacaagaaagagatcgtctatggtaagtcccagggaccgtacacagagctttttgaggcggcgatcgttccgatcctcgagaaagagggatataccgtaaagggagttgacttctccgaccttcagacagcagatatcggactgaatgacggcgacgtcgatgtcaacgtagagcagcacaccgcatatatggaaaacttcaacgcgaactataatgcggatctcgttgcattaagcccgatcccgacagtaccggcaggcgtatattccgcaaaatataaatctgtcgatgagatcccggacggagcaaaggttgcagttccgaatgacgcatccaacaccgcaagatgctacctgatgcttcagaagatcggctggatcaagcttgctgatgatgtggatccgtccgcagtaacccaggatgacatcgttgagaacccgcacaacatcgagttcacagagatgaagagcttaacgatcccggcagcaattcaggactttgactatgtagcgatcaccggcagcgttgtatataacgcaggcattgacccgtccacagcacttgcaactgaggatatccaggatcatcttgttcttcaggttgttgtaaaggaagagaacaaggatgctgagtgggcaaaagcgatcgtggatgcttatcattccgacgagttcaagcagtacatggaagagaacaacgatggattatggtggatcccggacgagttaaagtaagatttaagtttggaattgatcgagaaaaactgatagggtgagaatgagccaggggcgcatgtgaatgtggttcctggctcatttgtttacgaaaaaatatctccgacacggaaaaaactggcgtcggagatattttgttctttgcacaaagcaataagcagtggttagggacttgcttatatcagaagtgggcagaccatttagataagctgcgaagcagctatttggttatgaagttcgggagaaagcagcctgctgattttcatgaccggcttaattctgttatgcttctgctggcgttccctgcagcatccgtgtgacttttttcacacaatagaagcaggtcggagcgatgtagcagcaggcagcgacccacgcggtctggtcggcgaagcagatcgcgttgtagccgaactgaccgacaaagcagaggctgacgatcgtgcgggcaaacatctctgtcactccggagaaaaatgctcttccggaatatccgaggccctgcgtcaccattctggtgatgtttaagatcccaagtgtccagtaaaagaatcccatgcagcgcagatactgggcggaggcgtcgagaacacctgcggcatctttgctcacaaagatcatggagagcggacgtccgaagaagatcaggatcagtcctgcgaagactccgtagccaatcccgagggcgattccctctttcagaccttttttgattcgggctgactgaccggcgccgaggttctggctgcagaagacagaaacagcggttccgatcgcatcgaacggacacagggtgaactgttttagcttcacacctgcggtaaagccggagacatagtcaccgccgagtccgttgtttgcggactgcatgaccatgctgccgatcgctgtgatggaaaactggagaccggtcgggagtcccatctggagaagctctgcgatcgcgtcttttttgattacgcggttttctttcgagagccataagatcttcatgcgccggataatgacgaacaggcagagaattccgctgattgcctgggatgcgatcgttgcgaaggcagctccggcacatccccactttgcgacaacgataaagaagaggtcgaggaagatgttgagcactgcggagaatgtcaggaagataaaaggtgtccggctgtcaccgacggcgcgcaggatgctggataagtagttgtagagcaaggtgaacgggatcccgaggaaaatgatcatcagatagatatacgcatttgcgtagatatcgctctggacggaaagcatgtgaaggatccacggacacagaacggcgcagagcgtggtcacgatgactgcgatcactgcggtgaggatcgctccgttgaagatgaaatctttcatgcgtttgtggtcgccggcgccgaaatattttgcaaccggaatgccgaagccggtacaacttcccatacagaagccgaggacgagaaactggacgctggtgctggctccgacgctcgcgagtgcctgtgcgccgagtacctggccgacgatcgcggcgtcgatgatgttgtaagtctgctgcaggaggttgccgactaagaggggcagtgcgaactgcagcatggattttaggggactgcccttgatcatggaagttgccatgtagagattaccttctttcgaaatgggaaattttttgataaaacgaacgtgaattatcttatcatagagagaaaaaattgtatacaggcatatgcgacaaaatgtagatggaatttgggtggggatttttgctgttttttagaggaaccagattctcgaatcaaggcactcctgttcggctcctcaccgctagggattggtgggacgaatagtaaactttaacgtgaaaatggttgacatctggcagaatctaccatataattgtaaactataacgtaacaaaagagtttacaatcaaacttgggcagatgtgagagaaatgagaaaaatcctacaaaaaaagtgggaaaatctgctctggaattacaacgaaataatacatctgctgactgtaaaagaggtttgcggcaggcaggataagatcaggaaaaggagaacattatggacgcactgacactggcacaggagattatcgacggaagaagaatcacaagagaggatgacctgaatttctttctgacatgcgatctgaaggagctctgtgagggagcagaccggatccgcaaggcatgtgtgggagataaggtagacctttgttctattatcaacggacggagcggacgatgtccagaggattgcaagtactgcgcacagtctgctcatcatcatacaaactgcgaggtttatgatttccttccggaggaagagatcgtgaagatgtgccgtgtcaatgaggcggaaggtgttgaccgtttctctatcgtgacatccggaaaggcactgaccggagaagagtttgagaaagcgatccatgcttatgagacgatgaagaaggaatgtaagatcggtctctgcgcatccatgggatttgtgagtgcggagcagctccacagacttcacgaggctggtgttacaagctatcatcacaatattgagacatccagaagaaatttcccgaacatctgcacgacgcatacttatgatatgaagatcaatactttaaagatgatcaaggcagagggaatgtgtgcatgttccggcggtatcatcggaatgggagagacctgggaggaccgtctcgacatggcggtaagccttgcagagcttggaatcgattccatcccgttaaatgcgctgatgccgatcccgggaactccgcttgagcatttggagcgcatctccgaggatgatattctccgcacggttgcactcttccgctacatcaatccggaggcaaacatccgtctcggcgcaggccgcgcacttctcacaaacgacggcgagactgcattcaagtccggagtatccgcaacgatcacaggaaatatgctgacaacggttgcatgtgcgacgatccgcagtgacaagaagatgttagaggatctcggaagagatgtgacaccggagtatatgaaataataccaggatcaggagattggaatcatacgttgtccaaaagtagaaagtacagattagaaaaggctgccctgcattatgtgcgggcagccttttgcgatatcaaggaaagttctttttcacagcaccagtaatccacaccatgatatacacattcaccgaccatggaaaactgcagcttttggtacgcgcggagcgccttttcgttcgtctttgcgacgagataatgggcggaacgaaaaccacgctttttggcttcctccatagcgcaggtaaaaagctttccggcaatcccgcagccctgataattcagggagacagcgacccgggcaaattcaacggacggaacgagttctttcgaccagcagtccaggatatcggtctccggatcggcgtcgaaggagatcactccggcgagatcatgcccggtctttgtctttaagcagaacagggaattcctggcgagatcgaaacggatcgtatcagcagacggatagtcatccgtccaggcgcagaactctctgccgatgtgggaccggtagagggaaaggatcgcggatgcatcatccgggagcgcaggtgaaaagaaaaattgtttcacaattccgtttacggagatcagaatctcctgatcctggatcaaattcatggacaacgctcctttaccctgccatgatctcactcagtgttttcacaaagaagatcacgaggaccaccagcatcagcggttttacgaattttgcaccgcctttatcgaaacactttgcaccgagatagtttcctgcgatactgaagaggccggcagtaagaccgaggagaaagatcactttcccatttatcaggtagacagcaagcgctgtcaggtttgttgtcaggttgatcgctttcgtgatcccgttcgcttctttgaggcccatgtgggcaacgccggtgaggagaagaaggaggaaggttcctgttccaggaccgtaaaagccgtcatagatgccgatgacaaaggcaataaatgcgctgaagaggatcattttgcggagcgggaatgcttctttttctccgatgaatggttttccgaacatgaggtagagagcggtacacggcaggatcacaaggatcaggcgtttaaagtagtaatcatctaaccgaagggcaagctttgcgccgatagaagagccgatcagagcagtgatgatacagagaactgcgttcttccaggcaatgtagccgtttttggcatattttgcggttgcgatcagagttcccatgccggagctcagcttattcgttccaatcgcgaagtggaccggaaaacccgcgatcagataggcaggaagcgagatcagaccgccgcctccggctaccgcgtcgacaaatccggcgagaaatacgagcgggcagatgatcagaaagtggatcagatgtaattccatagcagtaattccccttagaaagtaaatattgtagatctttcgccaaatatagcataaaatgtcttaaaatgcaatgaaggaaaatgacagaagaaaagcctcttgcttttgcctttatgattcggtaaaatagaatcaggcagaacgatccccctgaagattcaggagggaaacatatgaaagataataagaagaaaattctggcggctgcggcttttctgatcgcagccggacttttgtttgggatgacaaagaaagagaacgggagcagagagctggatgattccggggcggtcgtcatgagcgggtcgcagaaggagctcatgggatccaaagagaagcgtggttctgaaaaaaatgttgggctgctcccggatccatcaggctctgacggagaaaaaaatccgcagactgaaagtgagagcggcgtcggggaatcccgggaagccggaaatgaaaccgggacggggaaaagtccttcagaaacgcaggtggaagtggataactcgaaggcagcagggatctatgtgtatatctgcggggaggttgcaaatcccggcgtgtatgagctttccgaggacagccggatctacgaggcggtggatgccgcaggcggatttacggagaatgcggcgcgtgagagcatcaacctcgcgtcgaaggtcagtgacgggatgcagatcacgatctataataaggaagaagctgcatcgcttccggcaggcggtacgtcagcaggtaaaaattccgggcaggatcagatgtcgggatcttcttcacttgtcaacctgaatacagcgacgaaagaggaactgatgaccttaaagggcatcggggagtcgaaggcggaggatatcatccgctaccgcgaaaagagcgggggatttaagaagatcgaagatatcatgaagatctccgggatcaaggaagccggattccagaagatcaaagacagtattacagtatagtataactgaaaaaacatcataaagagagacagcagatcagaaaaacaggtttgcggatcctgcattgggaaaggaaaatggcagatccggttacagggattgatgagagctgctatcgatcacagcataacatggaggagtaagatggcaagagttctggtagttgatgatgaaaaactgatcgtgaagggaatccgcttcagtctggaacaggatggatatgaggtggactgcgcctacgacggcgatgaggcgctcgagagggcaaaagagcgggagtacgatgtggtacttctggacgtcatgcttccgggacacgatggatttgaggtctgccagacgatccgggaattttccgagatgccgatcatcatgctgacggcaaagggagacgatatggataagatcctgggtctggagtatggagcagacgattatatcacgaaaccgttcaatattcttgaggtaaaagcgcggatcaaggcgatcatccggagaaataataagaagaacggcggcgcgaaacgccaggaatcgagtgtggtgacagaaggcgacttaaagctcgacagagagagccgcagagtcttcatcaaggacaaggagatcaacctaactgcgaaggaattcgatcttctggaacttcttgtcacgaatccgaacaaggtctacagccgtgagacgctgttagagtacgtatggggcaataaggccatggtaaacggagatgtccgcaccgtggacgtacatgtgagaagactccgcgaaaagatcgaaccaagcccgagcgaccccaaatacgtccacaccaagtggggcgtggggtacttctttcgcgcatagcgatgtccgtgcatagcaatgagcagtgcagggacagctcgcataatttttgcgttgtgcttgcacaaaagcaaaaattatgcgagctggacctatagggcgaatgcccgcgagccctgagtcggggcttgccccgattcagggctcccactgcggcccagccagcaagtgttgtgcttgcacgaaaatcatgcggcccagccaacaaatttaagttgtatcaaaaaggagaaaaacatctatgacatacacaattcgcccggtccgtccgtcggaccttgcggcagtcaccgaggtggaggcgatttgctttcctgccgcggaggcagcgactggagaatcttttaaagcccgtattgcggcattcccggaatgctttttcgttgcggaatcagagggaaagatcatcggcttcatcaacggctgtgccacggattctaaaacgatctgtgacgagatgtacgaaaattccgcctgccacaagacggatggagcataccagtccatcttcggtctggacgtgctcccggattaccagcgtcaggggatcgcggcagatctcatgaaccacatgatcggggatgcgaaaaataagggaagaaaaggtctgatcctcacatgcaaggaccgcctgatccactattacgcgaaattcggatataaaaatatgggcgtgtccgagtctgtccatggcggggcagtctggtatgacatgatcctggaattcggagcgcaggaatcatgaagatcatactgatcacggtcggaaagatcaaggaaaaattcttccaggatgcgattgcggaatattccaaacgcttgagtcggtactgcaagctggagatcatccaggttgcggatgagaagacgccggacggtgccagcgaggcagtggagacgcagatcaaagaaaaagaaggcgaacggatcctttccaatatcaaggacggaagttttgtcgttgctctcgcgatcaatggaaatatgctggattctgaggagcttgcggcaaaaatagaaaaatggggtgtgtccgggatcagccagatcgtgtttatcatcggcggatcgttaggtctttcaaaccaggtcctggtacgggccgattacaagctgagcttttcaaagatgacattcccgcaccagctcatgcgggtcattcttctggagcagatctaccggagttaccggatcattcagggagaaccttaccataaatagcgtgtatttgttacttttcacggggaggatattccgaaccgaaaattccgcatgagacagcagtgattgcggattgaaacaaggaggcaaaaacgagtgacagaggaacagaacgcagggaagatccttcttttctgtaaggaaccttcaccggagcagatcatgaaatgcctgcgggacgcatttgacgttccgggcagtgttcatgatgcggacctgaaacttcataacggggatctggacgtgacgatccgggtatattgtgagagtgcgggaggcgaagaacaggagcttgtccgtggctggtcagaccggtcgcgtgggcatttttccagagttgagactgccgcggtggatgtgaagacgaatcttctttatcagttggagggaaccgagagcatcgtttcggtggattatacatttgagggggaggagtccgaattcctgacagaggaagaggaatctgcaaagagaaatatggagcagacgctgttcggcgttctttctactcttcgggctgtcatggcgttccggggtgaaaagagaggattttactgtctggacgcatccgggatggagaagctgatcctggatggaaacggaaacagtgagatggaacggtttctgccctacaagtcggttggatatgtcccgggaaatgatatcgaggcagagcagttgaacaggagagagggaaaccgcagggaatttgaggctcatggagtgtatgttccggtattttatccacttctggaaacagaggcggaggcggactgccggacaccttatgagatcgcggcccgtgcggtagcacttcttctcgtggcggcattctccgaagcgatgcttgctgcgaagatggaccagaaagaggcgcttgaatttatcggaaaaaggatccgtgagttcggtgcggaggactttttctcgccgaaagaatggaaatatctgcatgatgaggagccgaaggaatcggagaagatctcttactcctggcagtacgaaaatctgcatgtgatggagtgggcgctggggctgatcgagggaccgcttgatttcccggatcatttctgtgacgtggcggaagctgcgcggatcctgacatcgttccattcaatgcgggagatcctggatgcggcaaaaccgagatctccgaaggagcttctcgatgcctgtgacatgatcttctgcctggactgggcctgcaccgatacgcggatgcgggatcttccgacgccggcaggaatggacggcggcgtggtctttgagcgccataaagctttgaactggctcgtgggggtcggggaaaaggcggactgggatcatgtgccggtggatacatgataaagagagcgaactgtgggcgtgaaaagtaacgaaacgagtgcattgcaggaaactgtgatgcgctttttttcttgctttttttagcacgttgtagtataattacggcactgtgataaagacaaatgtccacgctgcacggtcatgaagcggaagcgaaacagaaacgctgccgataccggatcctgtatccggaccgaagaaagatgtggaaagaaaaccggagacttttctgatcgctggtcagggaaaggaagaccgggataaaggagaaaaataccatgggagagaaaaaggtgatcaaagcggcgctcctcggtgccggaacggttggaagcggagtgtatgcgctctctgagatgttaaaggatgagatgtttcagaaaacaggagctaatctggagatcaagaaggtcctggtgaggaacacaaaaaaagagcgcccgggaatcccgaaggaggtactgacggacaactggaaggaaatcctggaagacgatgaaatccagctggtcatcgaactgatgggcggcgtggagccggcgagaacttatatcgtggaggcgcttgagacaggaaagcaggttgtcacggcaaacaaggatgtgctcgcggagtacggacaggagatcctgacacttgcggaaaataatggatgcgatatccagtttgaggctgccgttgccggtgcgatcccgatcatccggccgttaaagcagagtcttgcaggaagtatgctgacggagatcatgggaatcgtcaacgggaccacgaactacattctgacgaagatgtcggaagagggaatggattatcaggaagcgctcgcgaaggcgatggaacttggctacgcggaggcggatccgacggctgatgtggaaggttacgatgcgggccgaaagatcgcgatcatgtcctccctggcattcaactccaaggtgacattcaaagatgtctacatggaagggatcacaaagatcacctccgatgatatccgctatgcaaaggaattcggctatgtgatcaaacttctcggtgtcacaaagctggtgaacaatgagatcgaggtcaaggttcacccgatgctgatcccggagcagcatccgctcgcgacagtccgcgattcgttcaacgcagtgtttgtccatggtgaggcctgcgatgacgcgatgttcatgggacgcggtgcaggaaagatgccgacggccagcgctgtcatgggtgatatcattattgtcatgagaaatatcgtccacgataactgtggatggaacggcggtgttgcatataagaattatccggtaaaaccgatcgaggagacgagatcgagatatttcctccgccttcaggttgcgaacaagccgggcgctctggcgaatatcgcgggagttctcggaaacaacgatgtcagcatcgcccaggtcgtacagaaacgtgcgcgggacggtgtggcggagctcgttgtgatcacggattccgtgctggagagacatttcaacgatgcgctgatgatcgtgaaaggaatgtccgtattgcgggaagtttccgggatcatccgtgtatacggagattaagaaagaacaggatgttgattgtaaaaaggcagatctgcctggttggaaatacttctgaccggtagatctgctttttttatcagaagacagtaattttctcccccaaactgcggacttttagagcaaaacgcaattttctccccaaaattgcggactttcagaacaagatcgaccaagtcatatttccggacttgtctcatatgatgtatcacagaatggaagggaggatggcggattgaaggctgaaatggtccagagatttctggagcaggtgatcacggagaaagaaccaatacgggaaatcaggatacggattggaaagccggtgttcgttctggattcggagggggaaaaaatcctgaattttgatgaaaaaagtggaaatccagaattactgcggatagaagatgagaaagaaaattcaggaatcgagaatgggagtatggcggattccgagctgatccgagctctcatggaaatctttgcaagacattccctctatgcctacgagcgggagatcagccagggatttctcacgatccgcggcggacatcggatcgggatcacgggaaaagcagtggtggagtccggacatgtaaaaacagtccgggatatctcatccttaaacatccgcatcgcccacgagataaaaggatgcgcgaaatctgtgctgccgcatcttctgtcaggggaagagtttcttgatacgctggtgatctccccgccgggagccggaaagactacccttttgcgtgatctgatccgggaactttccagcgggggatcatggggatccgggaaaaacgtgtccgtggtggacgagcgttcggagatcgcggcctgttttggcggggtcccgcagtgtgacctcggtccccggacggatgtgatggacggctgtccgaaagccgtgggcatgctcatgatgctgcgctccatggcaccgcaggtactggcggtcgacgaagcgggcggggaggaggagatccgggcgatgaaatacgcgatgaaatgcgggtgccggatccttgccacggtccatggagcggacatggaggacatcatgaaacgtccggcgtggaaaaacatcgtgggcgaaaagatattttcccgatatgtggtcctcactggggtaccgacacctggaactgtggcggagatctatgatgaatctgtatgtcaatgcagagagaaaagcacctgtgaagacaggtatgcagcggcagtattcagttaccgatctcagctgaggatgaccggaaaatgggagaatgaaaagatatgaaatatgtgggacttttatgcatggcggcagcggtggtggcgggcggttttctgatggcgggggagtgggaagcgcgggtgaagatcttgttgctcttccgtcagatgatggtctatctgaagagccggatcctctactcgaatgagacgcttccggaggctctgaaggaagtaggaacacgatttgcggacgagaaaagcgggatggaagcggaagcagggctttttttcctgagagtggaaaaacggatggaggaagaacgcggaaaatcattttctgagatatggaaagaggagctggacagacttccggaggatctgccgatgagaaacgaggatcttcaggcactccggtcgctgggggaaaatctcggatatgcggacaaaacgacccaggagcggacgatccttttctatctggaacaggcggatgactcgcttgatttcctgaaaaaggagacggagagccggacgaaactttaccggtcgcttggaatggcagcgggacttttcattctggtgctctttgtgtaaaggaggggaaacatgggggtaaatctgatctttaagatcgcggcggtggggatcctggtttcggtgatgtgccaggttttaaagcacagcgggcgggaggaccaggcatttctcacgagtctcgcgggtctgattctggtcctgttctggattgtaccgtatatttatgaattgtttgagacgatcaaaaacctgttttcactgtgagggggaatgactatgtctgtggtacaggcagcgcttttggggcttacggcgatcctgtttgcggctcagctgaagccgttgaagccggagtacgcggtctatctcgttctggcggcatccatcgggatcggatttctgggacttgcaaagctcggagtccttctcgatactttgcgggagatcggaaacgggatccggatccggcatgtgtatttgacaacacttctccggatggcggggatcacttacatcgcggagttcacgtctgggatctgtaaggatgcgggatattcggcggtggggacacaggtggagatggtgggaaaactcgcgatcctggcggtgagcgcgccggtcgttctgtcactcgtggagtcattgaaggtgtttatggaatgaaaagatcgggaaaacgtaggggatctgcggtgctgatccggttcatgctcatgatcatggggcttcttgcggggagcttttttaggacaattcccgcatttgcggcggagccgggggatcccgggcaggaagtatggacacaggatgcggggagtacggctcttgatctttcagagatcgagaattatctggaccggatcggggaacagaaaacggcgggaatgacatttggggaactgatgaacatgatccgggcaggggacatggagaaaatctttttgtatggaagagacaggatcgcctccgcgttattttcggaaatcaggacaaacgcgtcatttctcgcggagatcctgatcctgtccctgtgcggggcggcctgctccggtttctttgggatctttggctccgaccagctgtcggagacgggattttatgtgatctgcatctgtgtgcagacctttctggcggctggctttttttccagcatccggatcgcggaggagacgacgggggagatcctgggattcatgaaagtgctgctcccggcctactttcttgcagtgacgatggcgggcggggcggtgacatccgcctcggtctgcgggtttacgatcggagccatcggagtgatccagacggtagtctccggattccttctgccggtcatgaaactttacatggtgatttccctggtcggaaatctgttccgggaggagatgttctcggtgatgacggagcttctgggaaaggttgtggggtggacggtgaagaccatgttcgggatcgttgtgggatttcatctgatccaggggctggtacttccacaggcggatgccatgaaaaacgcggcggtcatgcgggcggtcgaggcagtccccggggtcggcgcaggggccggagtggtttctgatcttcttctgggatcggcggttctgatcaagaatacagccggagcagcggcagtggcagtcctgctttttctggcagcagttccgatggtgaagcttgcagtccttatggtgctttactatctggcggcagccgtgatgcagcccgtgtgcgacaaacggctgacggcatgtataacgcagaatgccgccggacatgggatgctgctgaagatcgtcgggtactcgctggcgctgttcgtcgtgacgatcgcggtgatcagctattcgacgaacgcggtgtattatgctggatgaacaaaatgagaatgtggagttttgaagatgcggagcgggtatggaagtctgaaaaatcagacggatgttttggaagtggtgtgagcagcggtagaaaagtgaggtgaacggcatgaaagcagtggaaaactgggtgcgtgacatcgtattttacatgatctttgtgacgatggtcatgaaccttctgccggatccgaaatatgagaaatatctgcggctgtttgctggcgcggtcatgatccttctggcgtttggaccggtattacggatcacggggatggagacggcgatggcgggaatctttgaaaagatcacatttgagaatgatgtccggacgctgaaggaagaactgggggcggcagatgagcgccggatcagggaattttatgggcgataccgggcagcagcggaggcggatatccggtcgatggcggagcaagacgggctggaatgtgagagtgtttcggtcgatgtggcggaagccgggaatatcagccatgtgaagctggtgatcagaggcaggcaggatcaggccggggcggggatcgcctcggtgagaagaaagataggagcgtattatggagtggaagaacaggacattgaggtcgatgttaaaaggaaataaggagaaggtgctctttttattctgttccggactgcttttgtttgtgatctcgcttccggacagcggaaagacggatcccgggtggaagaatcgtgcggcggaggtcctggccgatgtgggggatgagagtgcggcggatcccagcgccggttcggagacggcagcaaaggcggagagtgtttcctacgaggcggagctggagcggcggatccgggaacttttaaggagtgtggacggcgtcggggaggcggatgtgatggtagtcttaaaatcctcggaggagagagtttggcatgtggataagagcagcacctcctcggtgacggaggagagcggggcggattccgggagttccaggatcatacgggaggaagatcagtcggagagcacggtgcttgacgggaagagccagtcgccggtgatggaaaaggaggtgaagccggaactctcagggatcatcatcagcgcggacgggggaggaagcgcggtgatccgggcggagatcacggaggccatggaggcgctcctcgggcttccggcaaacaagatcaaggtgatgaagcgggcggcaggggaatcctgagaagaaattctccggggcgggatccggctgtggaactttcggatgtccggaatgagtgcatagtgccgggaaaatagatcggtattctgccgggactgcatattttaggcgtggaatcatagaatggaagtatgaaagtatgggaaagaaggagttttgcgatgaaacggatcttcagaaggaatcagatcattatcacgacactggcagtcatgatcgcggcggcgggatacctgaattactcgtcgaagaaggaagtggcgggggcagaggtgtacgaggcgggaatgatggacatttccgattcggacattctggcggagaatcaggcgaagagcggagtggatgatggaagtctcacggagatcgcaagtctggacggagacggcgaggagaagattccggatggaaatgaggtggctgcggtgccggagagtgcggaggtttctggatctgaggctgcaggggaggagaccgcggcagcggggatccagaatccgggcgaggcggtgctcacaggcggaacagggatctctgagtacatagcgggggttcagcttggaagggagcagatccgggcgaagaacaaggagacattgatgcagatcatcaacagtgaccagatttcggaggaggagaagcagacggcgatccagaacctgatcggtctgacggaggtttcggagaaggagaatgcggcggagacacttctcaaggcgaagggctttgtggacccggtggtcagcattacggacgggaaggcggacgtcgttgtgaatgcggcatcgctcacggaccaggagcgggcgcagatcgaggatatcgtgaagagaaagacggagatcggggcggacgggatcgtgatcacgctgctggatgcggaggagtgatgggaacatggcagaggatgagaaaaagaactatgcaaagagaggagaaaatggtataataactgtatctttgatatacaggaggtaattgttgtggcagcggaaacagagagaagcagtcataaggtttatgagaaggacaaaattggagaagtccggattgcggatgaagtcgtggcaattattgccggcctggcagcaactgaagttgacggcgtggactccatggcgggaaatattacgaacgagctggttggaaagcttggaatgaagaacctttccaaaggcgttaaggtggaagttacggaggagcatgtaagcgtaaatatggctctgaatctgaaatatggatatagtattccggacgtctgcgagaaggtgcaggagaaggttaagaacgcgatcgagaacatgacgggacttatggtacttgatgtgaatattaagattgccggagtcagcttggaagaaaagtaaagattgtgactgcgtgagggcaggattcccgggagactggggatcttgccctttttggcaaactcattctatttcgatggtgtagttatagctgtaggtatggacgtaaagcatatgatcttgatacacgaggagatcaggctgtttttttagtttcaggctggagaggatttcgccggtgtgaagatcaagctgatagaggtagtcgtcctcggaggtgaagccgtatccgcagatgatcacattgtcttttatgataaagttcatggagttataagtctggtcagcgcttcgccagaggagtttattatcttccagatcataggcgaacatgaaacaggtatccggctgggcatagccgtttgtcacgctggctccatagaagattccgtcccttagacaggcgttatttccgttgatgtaccatttgtcggtgggataggttaagacatacaggcagtttccggtaccgttctcaaaaatataaagatcttcgccggaccagaggtactggtagttgtcatcataaaagctgttccagtcggtgccggtcatggggagggataatcctttactgtcgtaccattcgtttgcaaaatcgataccgttttcttcttcggatacgatctttaaatcaaaaggagcggcggcatcactggtgggatgtgtctccttgactgtggacaggtcgatggtaatgtattttgtctcagattcagagctgctttctgccgttgtttctgtagcatttttagaactgtcttccgtctctgtttttaattcgatttcagaagtttgtatcgctgtttctgtgggagtctctgttgaaatcgtgtttttctcagcgccgcatcctgataatagcatgcacaggatgatgaacggcagacattttactttgtccattgtattattttcctttctgaggggaatttggaattctgaagggatcagaaagagtataccatattataaggataaaaaaaacatctctcacataaggacttgtgaaagtatacattttcatgtataatcctaaattaggagtactctgttctgcgctcacatctgcagaagctgcaaaaggcagtttttcgggatacatggcggcaaaaagagcagttcagagagaatgacaatcagagcagcacggactgtcggaaaagaccgtcggtccgttcagataaacggaggtagaaaagtgaccagaagggaagccagagaacattgttttaaaatgctgttctgccaggatttttacccggcagaggagaaggaagagcagttagagagatattttgaagcgccgaaggaggatgtgaccggcgaagacggaaaagatgagatccttcatgatccgtttgagaaagaagaggatcgcgcatacctcgaaaaacgcgtcgagaagatcatggagctgatcccggagatcgatgagaagatcaacgagatcgcggaaggctggagaacaagacgtatgggtaaagtcgagcttacgatcctgcgtcttgctgtgtttgagatgaaatatgacgaggagatcccggagaaggttgccatcaacgaagcagtcgaactcgcaaagaaattcggcggagatgaagctccggcgtttgtaaacggtatccttgcaaaattgatccagaaaggcaattaaacgatggcaggtgtttactctgttacacaggtaaattcatacatcaaaaatatgtttgcacaggacttccttcttcgccgcctgtcggtgaagggggaagtttccaactgtaagtatcacagttccggacatatctatttcacgctgaaagacggaggcggaacacttcaggctgtcatgttcgcaagccagcgacgcggcctcaactttaagcttgccgagggacagcaggtcgttgtaaaaggaaccgtggatgtctacgagcgggacggaaaataccagctctacgcgtcagaaatcgaactttccgggcgcggggacctgtatctgagatttgaaaaactcttaaaagagctggaagagatggggatgtttgacccgcagtataagcggccgatcccgcggtttgcgaagacggtcgggatcgtgacggctccgacgggggcggcgatccgtgatatcatgaacatcgcacaccggagaaatccgtatgtccagctgatcttatacccggctctggttcagggagacggggcgaaggacagtatcgtgaaggggatccggacgctcgatgcgatgggactggacgtcctgatcgtcgggcgcggcggcggttcgatcgaggatctgtgggcatttaacgaggaggaggtcgcgagagcgatctttgcgtgcaatacgcctgtgatctcggcggtcggtcacgagacggatgtgacgatcgcggactatgcggcggatcttcgggcgccgacaccatcggcggcggctgagcttgcggtgtttgactatttccagttccagatggatctgaacgcgagaaagcagcgtctgatgaaggagatggcgacatgtctggaccggacgaagaacaggctgaggcaggatatgctgacgcttcggttttatgatccgaagagccagttaaatgagaagaaaaagcggttggcagatgcggaggatacattgctccggctgatcgcgcagaggcagcaggaggcaagaagagatctccagaatgctgagacgctgcttcagagagagatgaaggaccgacttgccgcggacaagagaaatcttgcggtgaagagtgccagactctggggactttccccgttaaagaagatcagcgatggttttggatttatcacggacggagacggaaagcgtctggagaccgtggaacaggcagtacctggaagccggatcacagtccgtgtgaaggacggacggatcggagcgaccgtgaacaacgtggaaaactatgacatcaggacatcaggacaggaaaaactgtcgcagtgaggaaagactatggatgacgagacaagaaaaaagatgaatgtagaggagacgtttgcggcgatcgataagatcatcggaaggctggaaaagggagacggatccctggaagaagcttttgcggactatgaagaaggtatgaagctcgtaaagagctgcaatgaaaagatcgaaatgatcgagaagaggatccttgttttgagcggagatcaggcggagggaacgaaagatgacggacagttttaaggaaaagttcagacaggcggtcgcagagaccgaggcagtcgtatattcttatcttccggaggagaccgggcaccagaagacgatctttgaggcgatgaattacagcgtgaaggcgggcggaaagcgtttgagaccgctgctgatgcgggaagtataccgtttattcggagggaacggaccggagatcgggccgttcatggcggcgatggagatgatccacacgtcctcactgatccacgatgatcttccgtgtatggacaatgacgagtaccgccgcggaaagctgacgacctggaaagcgtacggatatgatatggcggtcctcgcgggcgatgcactgatgatctacgcgtttgaggtggcttcaaaggcattcacgatgggagcggaccctgcgaaggtcggacgtgcgatcgggatccttgcggagaagaccgggatctacggtatgatcggtggacagaccgtcgatgtggagctgaccggaaaggcggtcccgagggagaaacttgactttatctaccgcttaaagacaggagctcttttagaggcctccatgatgatcggcgcagtccttgccggtgcatccgatgaggagatccgggaagtcgagacaatggcgtccgaggttggacttgcattccagatccaggatgatatcctcgatgtgacgagcacccaggaagagcttggaaagcctgttttaagcgatgagaagaatcagaagaccacatatgtgacgctggaaggtcttgagaaggcaaaacaggatgtcaaagagatttccgaccgggcagcgggaagacttgccggtctgccgggaaagaatgaatttctgtatgacattattgaaatgctcgtaaacaggaaaaactaaggaagaaaaatatgtaagggagtagtctggaaacatgctgcttgatcatataaaacagtcttcggacatcaaaaaactgaaagaagaccagtatccggagctcgcgagggagattcgccagttcctgatcgaaaagataagtaagaccggaggtcatctcgcctcaaaccttggcgttgtggagcttacgatagcgctgcatctggcgttcgatctgccgaaggacaagatcgtctgggatgtgggacatcaggcttacacgcacaagcttttaagcggaagaaaggccggattcgacgatctgcgccagttcggcgggatgagcgggttcccgaagcgaaaagagagcccgtacgatgcgttcgacacgggacacagttccacttcgatttccgcagggcttgggatcgcccaggcacgggagatcacgggcgaagaatattcggtgatctctgtgatcggagacggcgcgctgaccggcggaatggcctacgaggcattaaataatgctgcccagatcaaaaagaactttatcatcgtgctgaacgacaacgagatgtcgatctctaagaacgtcggcggtatgtcacggtatctgagcagtgtccgcacgaaggaaggctatgcggagctgaaactcaaggtggaacggggactttcctcgatcccggtgatcggaaagccgatggcatatgggctttaccagttaaagaacgggatcaagcagtttctcgtcccgggaatgctgtttgaggatatgggtatcacctacctgggacctgttgacggacatgatgtgaaaacgatgatccgcgtgtttaaggaagcaaagcgggtccagcatgcagtcctggtccatgtgatcacgaaaaagggaaaaggttacaagccggcggaggaaaatccggcgagattccacggtgtggagccgttcgatatcaagaccggaaagccgcttaagaaaaaagaattcccgagttataccgatatcttttctgagaagatctgtgaacttgcgaagaagaacgagaagctcgttgcgctgacggcggcaatgccggacggaacgggactcacgaagttttcgaaggaattcccgaagcggttctttgatgtggggatcgcggaggcacatgaggtgacgtccgcggctggtatggcgtcggccgggctgaaaccggttgtcgctgtgtattcctcgtttttacagcgcggttatgatcaggtgctccatgacgtctgtatccagaaccttccggtcttattcgcgatcgaccgggccggtcttgtgggaagcgacggggagacccaccagggaatctttgatatctcgtttctgagtcttgttccggggatgaacatcatggcgccgaagaatctctgggagcttcaggacatgctggagttcggcgtgaagttcgacgcaccgctcgcgatccgctatccgagaggtcaggcgtaccgcggactggaggagttccgggcgccgatcgagtacggaaaggcggagatgctctatgaggagtctgacattgctctttttgctctcggaagcatggtgagcaccggagagcatgtccgggaaaaactgaaggcaaaaggacatgcatgtaccctggtaaatgcgcggtttgtgaagccgctcgacaccgatatgatcgatcatctgtgcaaagatcataagctcatcgtcacgatggaggaaaatgtgctccgcggcggcatgggcatgtatgtcacaaagtatattcatgaattttatccggagatccgggtgatccagatcgcacttccggatgcatatgtggaacacggaaatgtgtccgtgcttcgggaaatgctggggatcgacagcgattcggtcctgaagcggatcgagcaggaactggattcctggaaataaagacagtctgggaggcgaagatcccgggaaggagaaaaagcccatgaaggaacgtttggatgttcttctggtaaagagaaacctggcggagtccagggagaaggcgaaggcggtcatcatgtccggcatcgtctatgtagatggacagaaagaagacaaggcgggttccatgttcgatgagactgcgaacgtggaggtgcgcggaacgactttaaaatatgtgagccgcggaggtctgaaattagagaaggcgatgacgcactttggcgtgacgctggaaggaaagatctgtatggatgtcggcgcgtccaccggcggatttacggactgtatgctccagaacggagcggtgaaggtttactccgtcgatgttggacatggacagctcgcatggaaacttcggaacgatgagcgcgtggtctgcatggaaaagacgaatatccgctatgtgactccggaggagatcccggaccggatccagtttgtatccattgatgtatcctttatctccctgacgaaagttctgggacctgtgaaggcgctcatggagccggatggtgaggttgtctgcctgatcaagccgcagtttgaggccggacgtgagaaggttggaaagaagggtgttgtccgtgaaaaatccgttcatctcgaggtcatcgagatggtagcatcatttgccggaagcatcggttttgaggcgctgcatctggaattttcaccgatcaaaggaccggaaggaaacatcgagtacctgcttcatttaagaaactgtactgatggcagcaccttcgcaaacgacgcgatcggagcttccgggatcgtcgacaaggcacacgagacactggataaataggacagaatatatgaagaaattttacatcgttgcgaatcctgacaaagaaaatacgaagaacatgcagacagcggtcgaggagtatctgacgacccgcggcgcaaaagtctccgccggaaaaagtgcttccggacatggaaatccctatacggatcctgaggatgttccgggagatacggaatgtgtcatcacactcggcggcgacggaaccctgatccaggcggcgcgggatctcgcagggcgtgatcttccgatgatcgggatcaacctcggcggtctcgggtatctcacccagatcgggcgggaaggcgatgtgaaggagcttctggatgcgcttttggaggattcttaccagatccaggagcgcatgatgttaaagggctgcgtttaccgggacggaagaccggtgaaggagagtatcgcgttaaatgatatcgtcctgacaagggacggggatccgcgcgttctgaaattaaagctgtacgtggacggacagtttttaaacgaattcagcgccgatggcatgatcgttgcgacacctacgggatcgacagcctacaatctgtcggcgggcgggccgatcgcacagccggacggacagctcatgatcttgacgccgatctgcccgcacacgctgacatcgagaacgatcgttttcggtgccggaagccggatcaggatcgagatcccggcgacgaaccgcggcagccaggtggcggcgtttgacggtgacacgctggttcgcctggaaaacggggattatattgagatcacaaaggcagagaccgtgaccagggtagtgaagctggatcaccggtccttcctggatattttgaaaatgaaaatgtatgatgcgtagtgcgcgggatagtgtacgcagaaaggggcagcggaagacatgaaggttgacagacatagtaagatcgttgagctcattgggaaatatcagatagagacgcaggaggagctggcggaatacctgaaaaaggccggataccatgtgacgcaggcgacggtatcgagagatatccgcgaattaaagctcacaaaagcaccggggaaaaacggacgccagtgctacgcagtcatgcagcatcagaaggatttcggagaaaaatacatccgcatcttccgtgactgctatgtctccatggatatggcacagaatattctcgtgatcaagaccgtttccggtatggcgatggcggtcgctgaggcgctcgatgtgatcggattccatgagatcgtcggctgcgtggccggtgacaacacgatcatgtgtgccgtgcggacggtggatgacacgatcatcctgatggataagctgaagaagatcgtggaaggaaaatagaagagagccgtttgttgaagaaaacggagtgaatgatagagacagaccgtctgctttttggcaggcggtctgttgtccttctggatggtcttattgtgggtccagacatccaggcggcgctctgtgagccagggcagggcggcatccggctgttttgcgagagctgttgcaaaataccatgcccgcatcatattcagatagtattcttcggtatgtatttcggctgcccacataagatattccggacggaagtaacaagagtgtcaagggagttatctgggaggaacaaggactgaaaatttacttctgcatacagtggttgtcacaaattttgcgaccaccactgtattatctaatttacgcgaataacgtgcaaaagtccgcgcttgcgagaccttggcgattgtcgcgataacaaggggaaactcgcgaagcgtgtttttgcttgttgttaatgccccagcatattctccataaaaattccgtatcctcttgtcggatcgttgatgaaaacgtgggtgacagctccgatgagctttccgtcctggatgatcgggctgccggacatgccctggacgatcccgccggtgagatttaagaggtcctcgtctacgactttgagaaccagccctttatttttttgtacacttccataatccactttttgaatttcgatctcatagtctttcacctccccggataccttgctccggatgtacgcgcgcccgcgttggatgtcctggcggaatccgatggggatcgcgtcggcctggagcgagtcaagaaaatgtcggtttacagttccatagattccttccgttgtgttttcggtcacatctcccaactttgtcccttttccgtagtagatcacgccagacatcacaccgggctttcctgtctggcctttttcaattcccaggatctgggtctcgtagagctcgccgccgtcgatatccacgagtgctccggtatcgctgtcactgatcccgtgacccagagcgccgaagcagccgttcatgtcaacatacgtcatcgttccgatcccctgggtatcatcccggacccaggcgccgagcttgtagtgaccgtcatctgccaggacaggcgtcatgttcacgtcgatttcccgcccatcccgcctgatcccgagaagcatggcttttcctccggacgcgttcacggcatcgaccagagcgtccttatcttctaaagtctcaccgttgatggtctgaatgtagtccccggacttcaaaagcccgtatgccggttccaccacatttcccgtcttatttgtcacctggccggtaccgatcaccatgacgcctttggaactcaggtagatcccgacaggagttccgcaggggatcgcacaggaactgtcgacgacatcaacctggatctccttcatgcggatcagaccgagaagtttcattccgacaaggtaactgccctcagtttttccgcacatggagacggaatccgggcggtcgatccggatcatcccatctggaatatcggaggagtttttcaggatgacttcctcactgtcactctcaaaggtgattccgggcggaagagaaaaatggaagacttcctcctcgttgacgaccagattcagcttatccggcaccgcataccggatatagatccaggaaaatcccagagtgaagatcagagaacaccagaatacccggatcaggatcctgcgaaacgattcttttttcatcatggcagcttcctccttgtctgtttctgtcagcagtacaggcgcggagatcatccggctgcgatccgaaacacagatcagaccggagaaaccgcctatttgatgcactgcatatattgaggctgccagtacctttttagtatcaccgtttttcaaaaggattattcaggaaggtccagatcggaaaaggtgagaaaaaggagagacagcttttttgtctctcctagtatgtgatacattctgaaattcaccctgtcagttttttctcattctgtcgattcatcccggttataaaaatataagatgcgtcgttacttttcacgggtaggaattttctgaactgaaaattccgtatgataccgttgcgtctgaagattcagccggctgccggaagcatagaaacgtcattggagacaacagaacaatcccgggaatcgagatgggtttttgtctcttttgccagccgcttcatttcctccgcattttcaaggactttttccgtgatctccgcgccgccgagaagtctcgcaagctcgccggtctgttcctgttcattcagcttttggatcttagtggaagtcattccgttctgcaccgatttcctgatttcaaagtgcgtatcagccatcgcggcgatctgaggaaggtgggtgatgcagagaacctgatgctttcttccgatgtaagacaggcgttccgatactttctgggcagttcttccgctgatgccggtgtcaatctcatcgaagatcagggtagggatatcgtccgtatcggcgaggacggtcttgatcgccagcatgatccttgagagctcaccgccggatgcgacttcaccgagcggtcttggcgggatacttccagggtttgtggagatcagaaactccacttcgtcggagccggaggccgtgtagtggtctgtgcggtggacatcgacctgaaattccacatggaggaaattcagatccctgagttcctcggaaatccggttttcgagaacttttgcggcttttttccgctcttcggacaggcgcccgcagagaagagcgaggacatgtttctgttcttcgaagactgcctttgcggcgcgggccagttcttcataattttcaagttcttccaggcgctttttctttgcatcaagacttcgcaggactgcctcctcggttgagccatatttcgcagtcatctggcggatcagatcgagacgctcttccgtctgctgaaagtcttccccggaaaattccatctcatccagatagccggagatcgaacggcagagatcggacaggatactttctgcatcggagagaccggatgcgatcccgctcagccgttcatcgtaggaggagacattttctacctcgtggcaggcccggccgatcatatcgctgtcaagaacctggtatgcggcctgaagactttccatgatcttctggctgtgggcatatttgcggaactttgcggccagttcttcttcttcccccggtcttaaagcggcgttctcgatctcagtaatctcgaaacggataaagtcgagttcccgcttccggctctcgtcatccagagaaaatccgtcaagttttccttttaattccagatatttccggtagctttccgcgacttctcttctcagcatccctgtttctttccgggaatattcgtcgaggatctccagatgtttctgcctgtgaaggagagactggtgctcatgctggccgtggatatctaaaagttttccggttacagcctttaagcgggctgtcgttacggtttcatcattgatccggctgatacttctcgtcggagtgatcttttttgagataatgagaagtccgtcatcatccggatatacatccatcgactttaattcttcacgttttttctcatcgtcgacggagaaggtaagctcgatataggcatagtcctcaccgcggcggatcatgtcctttgatgcttttgcacccagcgcgagagcgacagagccgataataattgattttccggctccggtctcaccggtcagaatatttaaaccgtttccaaattctacatctgcctgttcgatcagggcaagattctttacatgtaatccaatcagcatccggattccccgctttctgtaagtctatgaaaaatcaatagaaacatttgttcgatttcgtaaaacgagtatagcacacatctgttcgattgtccagtaaaaatcgaacatttgttcctaaaaaatactccggtaaaaaatcgcagctttgccagctttgccgtaagttttgccgttgttttttgcagatgggaatttcccagagtaaaaattctatataacgcgcagatctcgcgaagtctgctgatccggaatacagaacctcggcaaaattcggctcggaaaaatcctgtcccgggttcttgccccggcatattcaaggtgatagaatgaaaaaaatgatacatgaggaggaaaagcatgaaaatcgcacctgcgcagatgcgtatgaccggaaatgtacaggaaaacctggagaaaagcctgaaattttgtgatctggcagaggactgtgatcttctttttttcccggagatccagttgtccccgttttttccgcaatatgaaaagcaggatgctgaaatgtatgtcatggaaaaaaacgggcaggagatcgcggaacttgccggtaaagcaaaagaacatcagtattacctttcgccgaatgtctatttaaaacttgaaaaccctatgaaaaactcccgccgccggatgtgccatgtccggggacgggagcttttcattttttatgcaagcgtttttaaaaaggtgctcagcaggtttgcggggatctgtccgggtgcggatgcctttccggccgttccgaaggtcacgcaggagccgacaagctgaccgcagatacggctgatgacgccggtggggctcatggacatggtgatcaccggggtatcactgtgctcctccttcatggtcaacgttgcgtcaagcagagtcaggacatcccgctcacactgcggcatcaccgcgaatttcacgatatcagcgcccagggactgcatcaggcagagattgcttatgatgatgttcttatccggcgttgcggtaaagtcgtggcgggaagcgacgactttcacgccaaccctgtgggctgccgcaatgatcgttttcatcgtctcttccccacgggagagttccacgtcaacgaggtcgatgagaccgctgtcgatcacggcaaggatcgtcttcgtgtaggtctccgtatcgatctccatcattccgccttccactctggtacggatcgtgaagagcactggaatatttcctaaagcattccggaataaggtcattgccttggtccggacttcgggatcttccataccggtgtagaagtccgcgcgccattcgatcaggtcgaacggagtattccggatcagatttacagattttttcaggtcatcgagatttgtatccgtaaccggaatgcagatcttcggcattccgtctcccaattttacatttcttacttttacaattgctcccataagcggttactcccctgtttctatatgattgatgtaatatccggtcatgcgttatataacgcacatctcgcagaaagaatgccggtgctttgtattccaaatcggcaaagcctgcgaggcgtgatccgctatgtccatagtataaagacaggagagagaaaagtcaacacttacgcgcgttaaagtttaaaaaattaaagcaatatatt

SEQ ID NO: 2074 - DNA, 268 bp, Unknown
  gut microbiota DNA sequence
cccccaagcgacatcgtcttcaactcaccgattgtgctatacacgcacaaggccgtggcggacgggctcgtgaacggcggacttgtgaccaaggacgattctggcgcgtaccacatggatatggccaaagccgtggacgcgatggtcgccaacacaacatggccgacgtcggatacacggcaggctacgggcagttccgcatcgactcgaccgatccggtgaagtcgaactcaggcaacgaatacgcggcgcttcttgccacggtgct

SEQ ID NO: 2075 - DNA, 27949 bp, Unknown
  gut microbiota DNA sequence
aattttaggtttatttttaataataaatcccatgtttgtttttatatatccctattttcccaataaagctctatggatagtattgttcttgataatagatccatttctaatttactcattgggtctctcgctaaccaaacctaattaaacgtttactttaccttcaacaaatcgtatagaagagttattcctatggcactgagagtcaacgtatttccaatattttcattattaagctgggttattctttctaaatatgaattttcgtaagtcataacggttaatgcacatccaccagcaaatgaaataaaccatgttattatcttagtcaaatcagatcttgatgctatgctgcttaatggtccaaaagcgatagatgcaatgaacgaaacaaatgatgatattaatataacttgttttagtgaaaaaagtatacccactgttaaagctgtcaaataaatacacaagataatctttgttacaattctttcttttgtagtatatgatttgtctttaacagtatctgtaatttcttcaactgtaacgaaatatgtttttttcatggataatctcctttgcacctataattttacttctgcttctgattatatcataaagaaaaaatatttcattacaatcctaaaactataaaacggatttttataaaaattcagttatagatttggttttctaatgagttatagatagaaaatcaattcatttcacccataattaactggttttcaataaaatcatttttgcaattttgatgtatatcatatgcaattccgatattagttagagaatgctctctcctgcttctgccgcttgctctgtcatctgttatgtctgcgacatgcagctattcttattttgatcttcattgctttagcttctctggctatttcagcttctgctttccgttttataagagttttaatgcctctgcggccgtttctgtgtttcttaatctaaaacctcgcaaatctctttcagaggcttttcatgggcagatcagtggtagcagcagtttataataaaaaaagattctaagtttccttagaatctttgacactttttatgataacagcgacatttttcaactgatcagcacacttttattttacagggcaagtaccccaaagtatagtatacaaaaaaaattttcaaaatgcaaccgtaagaaatcacaaatcgaacatattttcggttccggattttctacctgtgggaaacaacgttttcttccatcatcctgtttaatctcccgatcgcgtcccggatcccgccttccccgtcgataaggccgcactccaccgcctcttttccgacaagtacggtcccgagatcctttgtcagcatttttgtattgtgcatgagctttttcagtttttccctgtcgatccggctgtgctccgacacaaaacttatgatccggtcctcaatcatctcaaaatattcatacgtctgtgccgttccgatcaccatcccgctcatgcgcaccggatgcaccagcatcgttccggtcggcacaataaaagaataatccgatgccaccgcaagcggaactccgatcgaatggctgtccccgatgacaagagacaccgtcggtttgcttaaggaggcgatcatctccgccagtgccagtccgcagctcacatccccgccgatcgtgttgacaaggatcaggacaccgccaatcgtctcatcgctctccaccttggcgagctccggcaggatatgttcatatttcgtcgtctttgtgcttcccgacaggttctcatgtccctcgatctccccgatgatcgacaaaagatggatccgctttccgttctcctcaagcgtcgcctgaccattctcccggatccgttcctcctccgcctttatctccttctgttccttttcattcatatcaaaaaactcctttccgacataccaggtatccccagtatgcacagaaaggagttttcctatccattccatttcaggaaatcatattctgttttgagtcattctccgttttaagaacggtttccgatcacatccacgatacagatcggtgtgcggtaattccaggtcgagatcttgatcccgctccggcggctcgccgcattgatgacctgcccgtttccgatatacattgcaacatgattgatctttccacggctgtttccgtagaataccagatcacccggacgcatctcgctcgacttgatccgttttccgctctttgcctgggatccggaataatgcggaagggagattccgaagttcttcatgacggacatcgtaaatccggagcagtccgctccctttgtgaggctcgttccgccccatacatacggatttccaaggaatttcatcgcgtagtttacgatccggctccttaaggacgcgctctcctccgtcggcgagaacttgatcgcctcggaaagggcataccgtacctccacgaactcggaagatacataagccgccgagatctcatcatctccgtctccctcgccgctctcatcaaattcgatctttacccagccgtcaagctgttctgcgacatggtagcgctcgttctcagagatctgtgtccagatcttcgcatcggtggacggctccgttcttgcattcagtcggtccgcatggacgatcgccattaactccgcgtggttcatcgccgcctgctttgcctcgtctccggtgaggatataatcgctctttacatatccggtgatcccgcccgaactgatcttgtaccagccgttcgcatccttcaggatctcgcatccggcatagctcgggagttttccgatgatcttctcattttccccggcaccggcacggatattcaagtagtttgagacattggaaacgccgggacggtcatagaaatttagcaccatcgccttcatatccagcttgttcgcctcattcatacagaagcgtttctccgcataatccgcagagatgtaaccgccggagatcttataccagccattctcttccccgacgatctcgtggagctctccctgcaggcattttccgacgatctgtccgtctgtggacggagtctcacggatattcaggttatccgccgtaatataggcgcgctccttcacgaggtccttcgcagcctctttcgcctcatccccggtgaggatgtattcggagcttgcatatccctcaacttccccggagctgatctttacccagccatccagagtctctaaaatctcacaggcacttccgtccgagagcgttccgacgacattcgccgctccgtccgggtcttttctgatattcaggtatcctgtcaccttcgcgatcccgagatttgaataggaatcgatcacttcctggatcttcgcatctctcgcctcagactctgattcgatctcagcgcggctctcctcttccgccgcaagggaagactcctccgcactctcgctctccgccgccgactcggaagccgcctgtgctgccgccatctttgagcggaccgcagtcacagcctttcctccgaacaataccgccagagcgatcaccgcaagaactgctgcgccgatcactaggatcccgtagtgttcccagaaagacggttttcttctccgctttctgctcgctttattgattgaatccatatagtttaccgtatctttatcatcattcatatgtttctctccatgctgtttccgatttccgctccccgtctgtcacgttccgtcagacgaagcagagcgttttatgggcagggacaattgtccctgtcatgcacatacaaacattagtgtaacatatctgtaatcaaaaagcaaaaaattttctattaaaaaattgtgaacatggcgtcacccggtgactgtacacggtgctccatccccgggcactgtcgccagccggaaaacagatcctgtattttttcttgcacaagcgacatttataattgaaaacattgctaaatttttgtataatatccttaattatttgtccatattgtctaaagttacaaaagtcatgacttttccggcatatggaatcggatcttctgaacgctttcacgttgtatataagtctgatgctttttaccggccggacgcagccgggatcttatcagactgagataaattcacccaggaggtaccccacatgaaacattacaccagcccacggatccagcgggcacagctttttctcatgaaagtctcctcttatcttgagatcgcctgtgccctgatcctgatcgtcgcgatctgtatcgcgttcataccggtcccgcaaaacctgtacagtctgtatcttgacaacggctttgatctctcagactttatgaagaaaagttttgatctcgtcatcggtgtcgagcttctgaagatgttctgccgccatgatatcgactctatcgtcgaagttcttctcttctctgtcgcaagacaaatggtcatcgagcaccttgccataaaagaggcgctcatcggctgtattgccgtcgcgatcctctttgctgtccgcagatttctctttgtgccgatccttgacaatccggacgaagcggaacgaaaactggaaaaggatcagtacattagagaacggatcgctgaggccatctccgcttacaaaaaagaaaatgcctcagtaagtctcagggaacgcgcggaagcatccgtcaatacagcctctgcagatccgctcagtgataagagcggaaacgaataacagggtcttttgcgtcacaggatttcaacaagtgaaaacaaaatggagcagatcttctctgctccattttttcgtctgattctttttacatcagcggtgcaatgagccgcatcgcctttccgcagaacttatggagtgtcggaagcgcgtccacactctccttcgtcatacggacacatttctttaacgtctcatcaaagtcataccggatatccttcacgaccggattctcatagatataaacaccacattcaaaattcaggtactggctcctgaagtccatgtttacagatccgacgactgccttctccccatcactgacgaatgtcttggaatggacaaagcccggaagatactcatatacctttacaccggcctcaatcagctccgtatagtaggaatgtgccagcatgaacgccgatttcttgtccgggatatgcggcatgatgatcactgtatccacaccgcgctttgccgcataagtgagcgccgtgatcatatcgtcatccagaaccagatacggagtcatgatgtacacatattttctcgcctggtagatgatgtccaggtagagctggtgtccgaccggctccccgtcgatcgggctgtcggaaaacggaatggaaaagccgtccatgttgagctccggggcgtggaaataatcgccggtgtccagatatctgctgtaatcgaaatcggagtccagctttttcacacagacgtcccacatctggagaaacatcacggtaaaattattcaccgcatcgccctttaagcggatcgcattgtccttccagtgtccaaagcggactttccggttgatatactcatccgcaagattcactcctccggtatatgccgtatggccgtcgatcacgaggatctttctgtgatcgcggttattctggcttgtcgagatcgccgggcggatcggattaaagatccggcagtggatcccctttgcctccagctccttcggatagtcatgaggcagatttgagaaggagttcattccgtcgtagaggatccgcacctcgacgccttccttcaccttctgctccaggatcttcacgatggagtcccacataactccctttgcgataataaaatactcgataaaaatatagcgcttcgccttctgaagctcccggagaacatcttcatagaagtcatctcccagcgggaaatacttgaaattcgtccggtcccaggtaggatagccgccgctctccttcatataatggctgagattagaattgctccggctcctgagttccagtctcttacaaacatccgggtcctgatcaaggtaatggtccgtcttctttttcacttgttcgatccgtctcgcaaagatcttcgtctctgtctggagctggacgaacacataaaacagggctccgaataccgggaacaggaggaccgggaccagccaggccatcttaaagctcgcattctgcttttcattcaggatatggatcgtgaggatcgcgctgatcacagcaaaggaaccatatccccatgcctggtatcgcttgtccagccacacatagacccagtacagcactgccagctgcagcgctataaataagaggaagaacgcagttcgtccgaatacgactctcaaaagtccgcgttttccctttcccttcatttcatccatttccatcatatattatgcctcaacttatctcgtccatatcagtctccgatcagttggctgatctgcaaaactgtttttaatcttccagtgcctgtcttaaatcttcgataatgtcatccacatcctcgatcccgacgctcaagcggatcagggacggatcaactccggcctccacaagctgctcatcggtcagctggcggtgggtatggctcgccggatgaaggatgcacgttctcgcgtcagcgacatgggtaacgatcgcaacgaatttcagtttgtccataaattcgcctgctgcctgtcttccgccctttaagccgaaggagatcacgccgcagcttccgttcggcatatatttctccgcgagcgcatggtacttgttgtctttgagtcccggatagttgacccaggcaacatcctctctcgcaagcagccactctgctaccttctgtgcattctcacagtgtctcggcattctgaggtgtaaagtctccagtccgacatttaagaggaaggaattcatcggggacgggatcgatccgaggtcacgcatcagctgggctgtcgcctttgtgatgtacgctttctttccaaaacgctctgtatacacgattccatggtaagactcatccggtgtcgtaagtcccgggaatttgtccgcatgggcattccagtcgaagtttccgctgtcaacgatacagccgccgacagtcatcgcatggccatccatatattttgtcgtggagtgtgtcacgatatctgctccccactcgaacgggcggcagttaatcggagttgcgaacgtgttgtccacgatcagcggtacgccgtgtttatgcgcaaggcgggcaaacttctcgatatcgagaacgactaacgccgggtttgcgatcgtctcgccgaataccatctttgtgttcgggcggaacgccttctcgatctcctcctccggtgcatccggatcaacgagtgtcacgtcgatcccctgttttttcatcgtaacagtaaacaggttggaggttcctccgtagatcgttgccgcgctgatgatatggtcacctgcgttgcagatattgaaggctgcgtagtagtttgcagcctgtccggaggaagtcagcatcgcagcgacaccgccttccagctcgcagatcttttctgcgactgcgtcgttcgtcgggtttgcgagtcttgtatagaaatatccgtcctcttccagatcgaacagacgccccatctgctcgctcgtctcatatttaaaggtcgtgctctgatagatcgggagaactctcggctccccgttcttcggcttccagccgctctggatacagatcgttgctggttttctcttctctcccataatagttcctctctttccccggactgtggtccgatgtgtaaactgtctattatcatagcacactttctcttccgcttcaacctaccaaagtcgttacgctgccagcataatgattgacttctcccacaaaaaagactaaaataaagataatatccagcgtctgttctcacacagccgctcactatccatattcagaaaggagtctattgcatatggcattttttacagatatgaagcgcagtctcacggaggccggaaaacaggtcgctcagaaaacgaaggaagtttccgacaccgttcagttaaaaacacagatctccagagaaaaagaggcggtgaaccgccagtacgcccagatcggcaagaaagtcttcgaagccgcaaacacagccgacgcggaagcttactctgctgagtttgccctgatccgtgaaagcttaaagacgatcgacgaactccaggacaagctctccaccctggaaggatttatccactgtccggaatgcggtgcaaggatcgagaagaccgccgctttctgcagcaagtgcggtgctaagatcgcggaagtgatgccggaggatgcccctgtcgacgttgtcgatactgctgaaacagctgagacagccgaaaacgaaacatccgatgatacctgcgcctgcgaagcggttccggatgagaaatccgaagacggatccgccgagactacggcaaatgtgaccgaagatcacgaataaaccatctgacagaaagaaaaccggcgatgtctgcaggaatccctttccacggatccctgctgcagcgccggttttcttttattatttttctcccacaaacaccgtcacaaacgcacccgcgcccatgagaacgatcccgaataagatctcccagatggacagggaaccaagcttcgatacgagacccgtgttgataaaaatcgcgatcggggatgagatcacaagtcccaggattgcacagaatgtctgaaccccgtatttttcaaagaggaacgtgatcagctttgcgatcaggaaaatcccgaggatcacgccgatcccgaacggagccagaagcaggatcccgtccttcattcccatgagatcaaacgcacggagattgtcgaggaatgtcttgatcgtattgatgatcgcgtaataatatccgaagatcatgagcatcatggatccggatactcccgggatcaccattgtcgcggaagccacaactccgagaataaataagatcaccatattcaccggagtcactgcgatcacggtcagagcgtccttgctctcctttaagagcggcattccaccggagatcacgaaggcgatcacaaacgccaggatcccgaacacgccgatcccgccggaagtcatctttgacttcatggaggaaatgatcgcaggaagtccgccgaggatcagacccacaaacgccatacatgtcacaaatgtgtgcttgtcgagcagatattcgatcgcataggtaaatcccacgatcccgatcccgcagccgatgatgatcgggatcaggaatgcgatgctcttcttaaactccttaaacagaccggaaaccgcaccgatcagccgatcgtagatgccaagggaaaccgccatcgttcctccggaaacgccgggaatgatgtttgcgatcccgatcatgactccctttatgatattgccaaaaaattccatgataaacctccataaatcttttgtccggatgatcccattctccatttccacacagcgcagcgatctgccgggaacgtccgggtgtctcatgcgcccgacagaccaggcagctgccgatgtatccggcgcctctgcctggtctgtggtaaatcctgtttcattcagacgatctgattatacacgatacgttccattccatcaatcactttcgctgactccgatcccctggtttacagatttattcacgatctgatcgtaatttaacgtctgatccaggaattccgggattgtcgttccaacgaaccggtacaggcgttcttccggagttccggtcagaacctcatttcccgacggtttcagttccacatagatctcgatcccgatctcatatgtgcagaggcggtttctctggagaaggttatccgaggcactcgccgaaaggacctctccgatcttctttctgttttcctccgatccatcgtttacgatcgtgatcacccggtaattgtcatcgtacgttctcgtcgcgatcgccattccttcgtccgaagaaacttccgcctgcaccgcgctctcgtcagccaccatatctgccgctaagacagactctcctgtctgaggatctgtcccggtctgctccgtctcatagtccaccggatacaggatctttacagcagccacttcatccacggagattctctgctccacatcgagacccgcctgttttaaaagggcaatcgtctttgtaaaggacggatagaccgggaagaagtttacattattcatatcatcaaggcggaatccagaggaagtatttccgcgctgtttgctgatcacggtgaggtattcctgctcagccgtggtgaggaagcgcagcgcagccaccggtgcatttaccgctctctcatttaacgtcagacctgcaagctcatcctggtaggcggataagatctccgccttcatggaatcgtccgtcctgagctccgagatgtctccatccgtcatccagtagatccccgtgatattctccggtgtgtaggacatgaccggataaatgccctctttgtactctctcgatgcgtagagttcatcgagactgcttccgagtaccgagcgcgggatcgtgtaggagcggtaaacggttttgccgtttttcatatggaagccgacctgtgcatagatcattctctcgctgtcatcatagatggaagtcgaatttcctttgatcttcgcctccctctgcagcttcgcctcttccacgccgtgctccgcgaaggtgaggactttcgcgtaatcggtaagtttcatattctcatccgcataatttccgtaatccagatacttccatccgtaggaggttccgttccggtacggaagcccgtaatcgagatcgtcgagatgggcattgatcgatgcatagttaaagttcttctcgttcggaagatacgaatcataaccgatcgcatccgtccagaagatcccgatcagcagaagggcaaggactccccctgctgctgtctgggcaggattcgaaaagagcttcgagaaatcgaaatgatagatgatctcgatcatgcagctcatgaggacaagtcccaggataaagccgatagctgcccaggacaggctgtagtaaatactccacagcaggatcgtcgctgccgttgtgaccggcacaaggagcaggactttgatcggggcctgcgtctttttgaaggccatcgcttttccggcagactctgacgggcggagcttatagaggatcagcgccaggacggtgaggagcaccgcagcaaggaggccgatcacacagagcttatagagtcccatgcccgttcccgtgcttccgatactcatctggatcctggaatatccataatcgatatcatcaaaaaactgatctgaatggaagatccggagtcccgcttccatcagttttgcataatatccgatcggggatccgtactccgcaatccatcccatatcgctgtttcttccggtcgtcacaaagaaaaattccttcaggacactgagtaaaagggaaatggccggagcatagccgtacagaacacctgcaccgaggatcgagatgaacaggtttcccgtgagcaggaccgcgatcaccatcacagcatagatcagtaaaaatcctaccatatgagtggcgaacgcagagagcatcatcttcacgatgctgcctccctggatcccgtttccgcagaagattgcaaatgcagtgatcatgttgatcaaatatgccgcaaagaggatcaggaagccgtccagaaacttcacagcaaacaactgctctcttttgaccgggagacagttgtaaaagtcaacctgctttttggaatgcagatacagaaatccggtcagcccgaggatcatagccgctgccgccactaaaacgcacaggaacgcattctcaaatccaagaacttctccgacgaggcgcaggatcttcgtgtgtttcagggcatctgccccgatctccgcatatccggtcccgttcacgagccagttttcatactcttttccgatgctcgcgatccccatggccgccgccatcggcattgcaaagaagaatgtgagcagggaaaaagcgaccgcccagagtcttcgtttcatgtcctctttcataagtttaaaaaataagctttttgatgtcatatcctgccacctccgtttcactgataaagatctcttccagtgagagcgggatcagttcaaagaacagcggttcacacgccgccatctgctgctccacattctctctcgttccgcgcaccgtgatcgtcgccaggctgccccggtactctgtcttcaagatatcgagactggtaaggtcctccaccttcactcccggttttaagacgcactggatcttatggatattcagtttcatgtcatcaagatcctttgagagcaggatcccgcccttgtggagaagtccgacatggtcacagatatcttccagctccctcaggttgtgggaggcgatgatcggtgtcaggttccgctccgccatatcgttcgcgaacaggctctttaccgcctggcgcatcaccggatctagaccgtcgaaggtctcgtcacagaaaatatagtccgttcccgcgcagatcccgtagatgatcgagagctgctttttcatcccttttgagaacgtggagatctttctcttctttccaaggtcgaaggactccaggagatggaaaaatctcggctcatcaaacgccgggtagatcgtcttgtagaacttcatgagttccacaggggttccgttcgcgaaaaaatactggtcgtcggagatatagaaaaacttcgactttaccttcggattctcatagacgttctccccgtcgatcagaacggttccctcgtccggttttaagatcccgctgaccatcctgagaaatgtgctttttccggcgccattcgtcccgatcagcccgaacacgctgccctctttgatcttcgcatcgatatggtccaccgctgtgatgtcatcaaatcgtttggtcagtccgcttgtctcgatcattcgtctccacctccgttctttcttgccgcctcatactggatctccaccatgtttttgatctcctctcccgggatcccgacacggatcgcctcatcgatcatatcgctcaccttcaggagaacctctttcttcttattctctttcattgcctgattgtctgccacaaaacttccctttcccttcactgtatagatgtatccctgccgttccagctccacatacgcgcgctggatcgtattcggattgatcgaaagttccatcgcaaagctgcgcacggacggcagcggttcattctctttcatcacgccgagcagcatcagctcctcgagtttcgcgaccacctgttcatagatcggccgccggtctttgtagtctaacaggatcataagcctcctcctttcccgagtctctgcgtgatacactcctgatttccgggccctggggcagaaaaaatttctgtccgtttattctttctaagtgtatcaacactcttaatacagttagtatagagaaaaagacctgtgaaatcaaggaatatcacaggtcttttttcttacgatttatttacgatgaagcggaagccgctgcaaatgcagcgcactgcaaaaagatcccgggaaacagccgaagctgttcccgggatctcaatacgatctgattcaattttgcagattactgctcgttgtcatcgtaaagctttactaacttctcaaggtaagcgtacttatctttcgcgttctgctcagccttagcaaacagcttctcagctcttgccgggttcttcagtgcgagggatgtgtaacgaacctcacccttaatgaactcctgataatcaacggtagccggcttgcagtcaaggctgaacttcttgccctcagctgccgggttgaatctgaagaggttccagtaaccagactgaacagcaagtttctcctctgtctgagcctttgccatacctttcttgataccgtggttgatacacggagcgtaagcgatgatcagggacggtcccggatatgcctcagcctcagcgattgccttgatggtctggttcatatcagcgcccatggagatctgtgcaacgtatacatagccgtagctcatagcgattgcagcaaggtctttctgcttaacttctttaccgcctgcagcgaactgagcaacagcacctgtcggagtagccttggaggactgtccgcctgtgttggagtaaacctcagtgttgaataccatgatgttgatatccttgccgcttgcaagtacgtggtcaacgccgttgaatccgatatcgtaagcccaaccgtcaccaccgaagatccactgggacttcttagccaggaaatctttgttcttgacgatgtccttgcatgtcgggcagtcaacgttctcaagagcagctacgagtttgtcagttgcagcaccgtttgtagcaccgacactgaatgtgtctaaccactcctggcatgcagcttttacttctgctgttgcgttctcgtttgcagcaacttcctcaactttagcctttaagccatcgcggattgcctgctgagcgagtaacataccataaccaaactcagcgttatcctcgaacagggagttagaccaagccggtcctttgcctgccttgtttgctgtgtaaggtgtggacggtgaagagttaccccagatagaagtacatcctgttgcgtttgcgatgtacattctgtcaccgaataactgtgtgatcagttttgcgtacggcggctcaccacaaccagcacatgcgccggagaactcaaggagcggctgtttgaactggctgccctttacagttgtctctttgaatttatcgattacatcctgcttgatgtcaagtttctgaccgtagttgaatacttcctgctctgctgcgttgccttcaagcggaaccatagtaagagccttctcacccttcttgcccgggcagacgttagcacaggaaccacaaccggtacagtcaagtgcggagatcgtcatagcgaacttgtactccggcatacctgtcatcgggattgtctttgtaccagccggtgcgttagcagcctcagcctctgtcatagctaccggacggattactgcgtgcgggcagacataagaacagaagttacactggatacagttgtccggattccaaaccggtacgtttactgcgataccacgtttctcgtatgcagcagaaccggacggagttgtaccgtcaacatactctttgaatgcggataccgggaggttgttaccttcctgagcgtttacagcagcctggatgttgtttacgaagttgataacatcctcgcggccctctgtagcgtgaaccatgtcaagaccttcgtctgcgcagttcttccagctctccggaactttaacttctacaagtcccttagcgcctgcatcgatcgctgcccagttcttcataacaacgtcttcacccttacgaccgtaagtagcctttgcagctgctttcataagctcgtttgctttgtcagccgggatgatctttgtcagctcgaagaatgcggactgaaggatcgtgttgatacgggtcgggcccatgcctgtctcgataccaagtttaacaccgtcgatggtgtagaatttgatgttgtggtcagcgatgaacttcttaacctgtcccggtaagtgtttctcaagaccctcagcatcccacgggcagttgaggaggaatgtaccgccgtcaacaagctcctgaaccatgttgtacttgcggatgtatgccgggttgtggcatgcaacgaagtttgctttgtggatcaggtatgtggacttgatcggagtatgtccgaaacgtaagtgggacattgtaacaccgccggatttcttggagtcataatcgaagtaagcctgagcgtacatgtctgtgttgtcaccgatgatcttgatggagttcttgttagcacctacagtaccatcagcaccaagaccccagaacttacagtttgttgttccttccggagttgtaacgagcggagcacctaactttaaggaaaggtgtgtcacatcatcgttgataccgatcgtgaatctctgcttctctgtgttctcgtatacagcaacgatctgtgccggtgttgtatccttggaaccgagaccgtaacgacctgtgaataccggaaccttatcgaacttggagccctttaatgctgcaacaacatcaaggtataacggctcgccgatggaacccggctcttttgttctgtcgagtacggagatctgcttaactgtatccgggattgtgttgataagagcctctgtgcagaacggtctgtacagacgaaccttaacaacgccgaccttcttgccctgttttgcaaggtagtcgatcgtctcttcgattgtatcgtttacggaacccatagcgatgataacgtgctcagcatcagcagctccgtagtagttgaacagtttgtaatctgtaccgatcttagcgtttactttgtccatgtactcctgtacgattgccggaagagcatcgtagtacgggttacatgcctctcttgcctggaagaagatatccgggttctgagcggaacctctctgtaccggatggttcgggttcagagcgttcttacggaatgcatcaatggcgtccatatcagccatttcttttaaatcctcgtaatcccatgtctcgatcttctggatctcgtgggaagtacggaaaccatcaaagaagttgatgaacggaactttaccctttaatgctgcaaggtgtgcaaccggtgttaagtccataacctcctgtacgctggattcgcagagcattgcgcatccggtctgacgacaggcgtaaacgtcggagtggtcaccgaagatatttaaagcgtgagttgctacacaacgagcggatacgttgaatacgcccgggagctgctcaccagcgatcttatagagatccgggatcataagaagaagaccctgagaagctgtataagttgttgttaatgcacctgctgcaagggagccatgtacggcgccggcagcacctgcctcggactgcatctcggtgatctgtaccggctgtccgaacatgtttgttcttccatcagttgcccattcatcggtagcttccgccatcggagaagaaggggtaatcgggtagatggctgctacatccgtaaatgcataggaagcatgagcggctgcatggttaccatccatggttttcatttttcttgccatagttgatttcctcctgtaaagtgtataaatatgtaaatatttattaaacttatgtgttccgcgtttatcagaacatctataaattattatagcaatttttccctaaaatgcaaatcaaaaacggcagaatcatgtaccaaatcataaacaatattaaaatttttgcattatcttttcacattatggaatgttatccgcattgtgagaatgcgcatttggttagttttgacaaacttctgttccggagcacttctctcttttacagataatgatttcttttaaataaaaagcggtgaggcaggaaatcattttgattcctgttcaccgcttttttatataaagtattctttttattggtccgaccattccccgctctcaagcaggaccttcgctgctgtcctggagtaggagatccgctactgtccgttcggagcgatcagccccatatcggacggagcctggttcgtctccgcatgcgctgccgttgtctccggcgtatatcccggtccgtagttagatccggcggacggtgctgccgttgtcggcgctgctgttgtctccgctgccgttgtcggtgctgctgtctctgcagccgtcgtctccgctgccgttgactccccagcagattcagacggtgctgccgctgactctgtggacggcgtttcagttgccgcaaccgttccggaagtatttctcttgatcgtagccgcctttcctttataagtgctgttgtggagaaggacatcgctcacgacctgcccgttctttttcgtgatcaggttcgtctgccatctgcttcccggtgttgccgcctttgcgacaacttcggtacccggctggagagtcgggtcttcgacataagtcggtgccggcgcgtcgagttccttgatcttttcggaatgcatcgacacggtcacgccgtcctctaagatcgggtttccgtaaatggaaaccgtcagggtctgaccggagatggacgctttgatgccgatcgctgtctttccgttattcacaaaccgcagatccggacccgcatatccgtcatagcttaccatcgcatcctcgcccggtgtgacataggaaggttcatatgtgtgtgcatggcgttccgtcgtcttgagtccggcaaatacgaccgcattgtagagagttgaggatacctggcagacaccgccgcccggctcctgaaccacaacgccgttggagtacgcacccgctggtttgtatcctttttctgtggtacggttgcctgtcatcttattaaaggagaattctcctcccggctgaaggatcgtgccgttgatcgccgcgcaggcgagacggatattttcgtttctgtccttatttgtcgttgtcgttgtcgtatatgttccgatctttttgaaattgtcgcgggcctgagcttccgtgatctccggctgtacctcgttcgccgtcgccgtgatcgtcttgtcgtactctcccgctttcatcgccgccgtgatatcggaggcaagtttttcctgatcgatcttctttccggtctgggcgcccgcgaatgtaaatttttcggtcgatttatcataggaagcgatcgaaccattcttcggctcaacatcccactttgcggccagcgcttttacctcgacctggaccgcgtcatcaaggccatccgtctgaacagtatagtcgccggattccttctttgcgagtgcctcttcgatcaccgcatctacatttgcttccataaggttcggaagttcttccgtgctgtcaccgaaggtcaccttcatcttccatcccatatctgcaaggaccttctccatcgcctcggattttgtgagaccgtggatctgaatcccgtttaccgtgatctccgcttcaatctctgtctccggctccgtcgttgtctcctccgtggatgtttcggatcccgcgtcctgtctcccagaccttgcacagctctggagtccgactgccacgcagatcagaaagatcaagacgccgatcgcgatcaggacgatctttgccatatccggtccctgacctcttcctcttccccggccccgtcttcttccggagcctcctcttcttgccccggttcccttattccgggcattctgtaccgccatgatgcggtctgccgcgctggactggcgggatcttccgcccgctctgctgtttctgaatgtgtcactcattgctctcaccttttatttttgttttcaggacggatcttctctctatccatccgtttttctgaatccgaatccgcgcgaagcttccggctcttacaggcagccgatcccggtacagaaaatgtatcgggacatcgtttccgcaaaacgcgcagatatacaggtagtagtatagcataatttaagaaaaatggtataacagaaatcttaaattttattcacaattttgtctcagatatgttaaaataaggtaacagtctgctgttgtcattgatgtacagcatcgcaattacagatcaagaaaggaacttccgatatatgaaactcatcgatcttcacgttcactctaccgcctccgacggctccttaactcccaccgaggtcgtaaaccgtgcagccggtctcgggctcaccgccatggctctcacggaccacgatacggtctccgggatcgacgaggcgttaaaagccgcaaaggacctcgatatggaggtcattcccgggatcgaggtctcctgtatctataaagaaaaagagatccatatcctgggtctctacattgatcatacgaacccggagcttctctcctttttaaaagaagcttcccggaaacgatatgaccgcaatatggaaatgctcgccgccttccggaaggacggtttcgcgctcaccgaggaggatcttttctgtgggaatccgaagacggtcgtcacccgcgcccactttgcgagagcacttttaaaacacggatatgtgacaagtgtggatcaggcgtttaaaaaatacctgaacccggatcgcccatactaccgctcccgggagctcatcactccggaggaagttctcacggtactcctcggtgccggcggtttcccggtactcgcccatcctctcctctataagctgggctgggcggaaacggaggcactgatcgcgatgttaacggatcacgggctccgcggtcttgaatgcttccattcgtccaacaaccaggacgagagcggaaagctccggaaacttgcaaaaaaatacgccctcgccccgaccggcggctccgattttcacggcgccgcaaagccggatatcgagatcggttccgggcgcggcggtctgcgggtgtcggcgctgtacctggatgatattaaattagcgatgtttcttggcgggacaatgcatgcataagtgaaatatggctaagcaaaaagattcaggaaagttaagttatacgatcacctttcctgaatctttcatattctgcctcaaacaaagattgctggctaccgatccagcaccttccggatctccccggccagttctgcagcctttttgtggtcgctgccgccggacgtaatcccgatgaccgactctccctttttcgcaatcccggggaaatagaaatcgcactggtcccggtcggacgcattgttgaccgggatctttttttcgcggcagtcgcagacgacaagcttgttgaccggggccgtggcagcggcaaggacgaagaaaaatccatgactttttctgccgtgatctccgacatctgccacagatccgaatctctctcctgtttccagatctccaacatctgccgcagattccggcgtttcttccatttccagatccccggcgtcatacatttttttcttccatctcacgcaggcttcggaaacatctccgttcctcttttcttcttcgcacatttctcttaaatccccgcacacttccggcgagacgaccgtgatctcacagccgaactccagaagtgtccggatccgcctagccgcgatcactccgccgccgaccacgaggacatgctttcctgcaagatcgacaaacattggaaaatatgccatttttccgctcctcccctgcattttatactcctgcacaccagatcttccaatcgcaggtgctttccacacactcagatttcctctccgtaaattccggacgtccctttcgccgttttttataacattttcgacagttccgtcgggattgttcaaccattccccataatttccataaaaaaccagtttagattgttaaatttttatctaatccgtcgattgtttttttcctactcatctggtagaattcaagtcgttaaaagataaacgaagtaaatcaatcacacagcggcagaaaattcccagaacacaagggaaccgctgcgatcacctttgaggaggtaacaatcatgaaattaaaaatgaaaaacatttccaatcttgatacattatttaaagtcatcaaccagtgtgacggcgcggttgagttaagtcttccggaaggcggaagtgtaaacttaaaatcaaaactcagccagtatttctcgatggcaactgtattttcaaacgggaacatcaaggaattagaccttacgacccacaacgacagtgattccagacgcctgatccagtacatggtccagggctgctgatctgatccggatgatccgcttccctccgcagatccccacacgcctttccgggcgcatgatgtcccgttcagaaaggcgtgtctgcagaaagcataaagcagtcatcaggccataacgaatcctttcgcggccagactggcgatcaggttctctttctccgtaaagaaggttccctgtgccatctggctgcttcccccgcctctcccggagagttccccatttaattccttcgagagagcgcgcatgtcctcgctctggctccccagaacataagagaatcccccattcacactttctgacagggcgaggacaattttccccctctttccttcgagtgcgaagttcacaaagtgacggagctccgtcatatcaagatcatctccgagataacagatcttatcatttccctcttttagctggtccgcctggaatttcataagttttcttgaagtctcagacaattttgcctgggtctgcatcagctcatttttcagtttttccacggcatccgcagtctttccggcttttacggacaggaatacggaaattttctgaagttcttcccttttcttctcataatccatcacggcctcttccccgcagagcagagagatcctgacaccgcccttatagtggatcatggttaaaaatttcacgagcccgatctcaccggttttcgccacatgtgtcccgcagcaggcgcaggtgtcgccgttcgggatgctgacgatccggatgtccccggtcagctcctttttgctccggtagtccatctttgcaagctcctccggggatgggaagcccgcgtagatctccagattctcccagatcatccggttcgctttcttttcgatctccagaagctcgtcccatgtaagtgtcccgttcagatcgatcgtgatctcctccgatcccatatggaatcccacattatcatatccatatttcgcatggatcagtccggagacaagatgctcgccggaatgtccctgcatattccgaaatcttctctcccagtcgatctcaccagtcacggtctcgccgacggtaagcggtgcgtccgtatagtggacgatctcccctttcacatcatggaccgccgtcacatgcgccccgccgaggattcccgtatcatacggctgtccgccgccctccgggtaaaacgccgtctggtccagaataacctcataccccttttttccctccgtacaggaaaggactttcgcctcgaatgtgcggatatatgctgaatcgtaatataattttttcattgctctatatctcctgtcactatttttctatcatcgaaatatcacatagatttacactatgtctattatacgcacaggagacaggtatggcaagcggagactttctgcaatcgtttatgatcagatcatacccatgccccatcaccattcacatgatacccatccggagtaaccgtatttacaaaaaatgttccatcggcacccgcatagtaccagataccgtcgactgtaaaccacccggtcttcgcatatccatcggcatctaaatagctccaggtcccgtttgtgttcttccactcgttggaatgccagtttccgtcctcctccatataccaccagccgtttgcgtccttataccatccgtaagcgatctccgtgctgcggatttttttcgcctttttcttcgacttcttctccgcttccagagctttcgcctcaatggcatccattctctccttcgcgctctcgcccggtgtgctgagtgcgtcaaaggtcagatagatgcggactccgcggacatcgtcctcttccagctcatcctttttgatccactcacatttctcgtaggcacagtcaagcccgcggatccggatcttatccactgtctctttcgacagacggtaaccggaattgtagtagagctccaccataagctccggcgtatcccttctgtcccatttgacccggtcatttacataatcatacttatggatcgtgtacttctccccggatgtggtgatctccggaagtgtatcatccagaaactgtcccggctttgcctgctccccctcaagataaagggagatcttctggatccgtccggctgcggctgccggaaatgcggacagtcccatgcagaggaccgttcctgtgataagaaccgcccgtctgattctgcgctctgattttttcatatctgcctcctgttttttcaatgtgacgatcttttttcctgatgtcacaaaattcatttctcttatttcatgatttcctgcgaaattctgacatgccatcccgcatatactgaaagtgtaaagaagatttccggaggaaataacatgagtgatttagctgctacaaactgtggatgtgggtgtgactccccggcaccgggctgcggcggtgggtgtggctgcaacaacaatatgatctggatcatcctgctcttatgctgctgtggcggatgcggacataacggctgcggcggtggctgcggcaacagcttcgacaacagctgtatctggatcattctccttctctgctgctgcggtggatggggaaatggatgcggcaacggttgcggtttcggctgctaagcaatctgcgggctatttcagggggcggtctttccgccccttattttgtaccgccggtgttctcaccgtcaacctgccgtttctgttcctccttcttccgctcgcattcctcatcgatctcgtaaacgctgtttccatctatcacaagtcgtcccataaaaccccactcaaatttttctgtcgtcttactgtcattttattcccgcggaccagctttcgtgaagatttcccgcatgagaaaccccttctcctcatatattgtcacatacaggaggtccaaaatatgagcgaaaaagaattaaagctaaccgacctggattacgccaccggcgatcaccatcttcagatgatgaaggcggcgctcccctatctggatatcagcagacagcgcaccctgtccatgtttatcaaagccgatgaactgatgcgcacgatggagtttttccgggagaacgatgacggaatgctgagtgtctgtgatctgaacacggatcatccatccccggaggccatgctcgctgccgtccgcccctacgcaaataaacaggaacaggacaccattgacatgatgacccgttttctaaacagccgaaaaggccggagcagcgccgggatcacgacggaccagcttctcgcgatcctgccgccggatgtgcaggcacaatttgagaccctgcagatggtgatccagagcttcgcgccgggaggtacccatgatggaatataacggaaacacccggaacagccagagcaaaaactggcgatccgacccgcggcttcacaacatggatcccgcaaagatcgccctcttggcctcctttgcggatgaacttatgaaaacgccggataaccggaagatgcaggcctttctctccctgaaccagaagatgcgggaaaaatccatcttcttttccgggaacgagcaggaactcctgttcgaggtcctgacagaaagcctttccccggcagatcgtcaaaaagcagagatgatccgccggcttgccggcaggcttcagaatccgccgtaataccgatacaccggatcccttcgtctctgtaatctctgattcgtctgccccaaaataccttccggaaaaaaggaggctgcccggacgtgttctctgtcgccatgtccctgcagcctccttctcaatttacgcagacattgaaccaagacctgcacttgtacgggaccttgaaagctgccgcgacatcaatgagccagacacgactatgagatccatgctcctgctgtcccgtcggatccgtttccaaagcggtacacagttccgtcaatggtacgctctccggtcaccatcgctcctaatccatccatataataccaggttccatacggatcctgataccagccggtcaccatatagctgttctcatcgaaccggtaccagattccgcctatctccttccactgatccttacaataggacaagccccgggcactcgtgacgtaacgccacttcccggttccatcctcctggatccaggcaccggagaaggtctgtccggaatcactttttccatcctcggagacaaaccgggttccggtatagaccattcccggtccctcgacggtcttgctcttttttccatcgctgttgaccgctgttaccataaacgtatataactttccttccttcatctcagaagaaaagtctttggtgcagccctttaaggtctcgtttgtttttttctttccattctcgtataacgtcacgctgtagctcagtctcggatccggctgtactctcagcttcgctgcgttttcaactgcctcgtcatgccgatgattccgccgacgtaggaacctgaggctgccgttacctgatagcggaagaggctgccactcggcatatcctccatggaagtatacttgaccgcgcctccctctgcctcaacatgcttcacagttccggtgttgtagccgataagaccgccgatgtaattcatggaagccgtggtagacacattgatgttcttgagtctgatattcgtcacacttccgctgtttgacccgatcatacccacctgggatgcctgataaccgctcagccggatattctcaaactcacagttatcgatcgtaccctgatttgacgcgacgaggccgaagtttgttccggctttcgttccgttatccaacgtgatattcgcaaacctaaggttcctgatcccaccggagatcgccgtaaacatggactccgccggagaggacgtactgtaggatacgtttccgctggagatcgtatacttttctccgccgctctttgaaccgccagtcagggagttgatttttaatcccatcggggattcctgtgtccttttttctgccatctcaaagttcaggccttcacattcgatgtgatccagaaggaagccgtttccgccgttttctgcaaggacttccacgatatactttccggagaactcaaagatccgtgcctgcgtcacttttaatttgacacatagcagttatagatcttgatgccttttccatagccggtgagtcctcctacggaaagtgctttgcctccatagaccgccgttgtgatcgaaacgtcttccgtgcggcagtcttccatcgtactgtattccagatacgatacgagtccgccgacatggttcggcatatcggacagttttacatggaaagcccggatattctttaaggtactgttgtttaaaacttttccgaagattccggcttctaaggacttcgccttattatcattggaatcattggtgatgagttccacgttttcaaagttcagatccttcacttccgcgccggaaaggaccgacaggacggaggagccgaccccgctgatattccgtatcgtgtggccgtccccgtagagctttccggtaaacggatcacggtcggaaccgatctgcatactggagatactctttccggaaaaatcaagatcactcacaagaatgttccgatactgcttttcgcatgaagttccttctcgatcttgatggagaaattttcgatcacgccggatttccggtttgtgaaggctacaaagccctcactgtagttcggacggatatttccaagcttcaccgtcatgacgagattccggatcgttccgaagtttgcacacacgaaagtggaggtatcgagaatccgggaacaccaagatataagaaagataaaatgccgattacctatatgcaaaatggtattcaacatgaaaacggctcttttaatgtaagactttctttacaaaaaagctgaaggaatatatggctcatacctataatattcgtgctgcatacctttatttgaaaaatcctgttttttcaaacatggatatcataaaacagataaaaatatatcctccggcaaatgacggaaccagcaggatccttgttatttatgaggtggaagatgttttgccagaagagcacaatggacattatctgtcgattgatctgggcttgcataatcttatgacttgttatgataatgtagggaaaacttttattattggaagggaatatctttctctttcttatttttataacaagg

SEQ ID NO: 2076 - DNA, 38147 bp, Unknown
  gut microbiota DNA sequence
tcataagatgacacgatatatcacgaactattgtgtaaagaatgatattcatacggttgtaattggaaatataaaggggatttgtaaagagagaaacgtggggaggaaaaccaaccagaagcttcacggtttgccatatgcccgtatctatatgcagttagaatataagcttaaaatgaaagggatttgcctgataagataggaagaaagctattccagtcaatgttcgccgcagtcagaagaagtatcgcgcatttatgcagagaaaaggaatcgaaaaaagcgtggcatctacattgtagataccatgatctacaatgcagatgcagtaggagcttataacattttgagaaagtatcatgccgtattcggcaaagaaattgatatgcccgtaaccgggctgagcagcacaaaaacaataaaagtagctgtgtaacccatctgggtagcagtacgggtatcatggacacacctctgaagctacggagctatgctttgtaatcagatgctcggtaattcaattgccgatgtagttcacttcaccataccttccagatcttccacttctccggcgatcatgattctggtcccggaatccatagactggatcagcattctcacataggactgggcaagctggatcccgcagagagatctattcttcgaaccggactgctgacagtttacaaccagagccggatagccttccgcaccctcctccggttttaatatcattccaaagttagaaaaagcacgcattgcttccagattgacaaactgagccgccagaagtccctccggcttctttccagtgatcacgccgaaaccgtctgcttccggatccgtgatccagtaatcattttccgtaagtttccggtacggtgcaaggctgcccggatcattttcgcttccgaaggtgctttccaaacggtaaacgccatacacctcggaatcatcctcctggccgccggaaacatagcagttgaccgaaaaattttcctgccagccactatccgttcttgagaggtagagaagtctcgagttccccggaagctgttttctcttcgcgcggacaaccttctcgctggaggtaagatcttttgttgtttttactgtatccgcttcggtatccagattattgatgatcaggagcaggctgtttacatcgtcaccaatccccatcttatcgatccagcgtcctttatcctgctgggtcttccagccgagatctaccgctacctcatcatcgggcatctctgcgtccatcgtgatcgtatcgacctgcgcagatcttactgcgccagacgcagtgccgccgaaaatcccgatcgccgctgtcagcgcaagaactatcgcaaataagcgtttccgcatgcaaaaatctccttctctgatccggtcccgcctcaaagcttactgctttcgcattcccacagggatcacgtttttcgaaaaccggatataaaatcgaattccttccgggatctataaagacagacccacgcttatatgtatcgtaccatactttacaccgcttgtcaccgaaaaatcaggactgacgaaattttgccacaaaaattccatattaaggcctgtccgctccacttaaaagcctgtcatacttccaaattcatcaatataaaaaggcctgctaataaacagagatgcaatgatagaatcatttccgttttctcagccaaaaaggctgccctttcggacagcctctttgctttaatataaattgttgacttttctgttgtctgccatcttacttcaaatacttctcaaaccactccatcatctccgtcattctgcggattctgtgtttcggtttaccgcttcttgagagttcgtggttctcgccatggaagaggcacatgcgggcttcaacgccgaagtattttaacgcggaaaacatctggatcgcgtcgcccatccagcagcggtagtcttcatctgactggataaagagggtcggagttttcgccatgttcgcgtatttgagcggtgagtgctgccacatcttctcctggctgttccacggatccgccttgatctgatccatattgaagtaatagccgatatcggtagtcatgcacttggatacccagttggagatacttctctgggagcaggccgctgcgaatcgtgtggtgtttccgatcacccagtttgtcataaatccgccgtagcttccgcccatgacaccgaggtgtttctcatcgacctgcggatagcgctttaacacctcatcggtcactgccatacagcactcaaagtcgatcccgccgtgttttccggtgatgtctgcgaactcatttccgcgtccgtcacttccgagcgggttcgtaaagaatacgaaatatccggcattcgcaaatacctcgctctcgtggaagaacgtcggtccgaaagtcgcgcgcggaccgccgtggatcgttaagattcccggatatgtcttattcgggtcaaagttcaccggtttgatcacatagccgtcaagctccagatccttatatgtaaatgtgaactcctcaaccgggcatacactgcgctctgccatcacagcatcgttgaaggaagtgagcttcgtctcctcttttccgtcaaacgcgtagcactcggtgagtcccatatcacgcataccggtaaagtacacggtatcgccggacttcgccagtgtgtggacactgccctgacggtccaggatcgtctccatattgccctcagcatcgaaggtccggatcacactctgttttcttaaggtcgcgataaagtagatcttatcctcgtcatgaactgcagaagcaccatccgcgaatttacagtcacagcagatggagttgtggatgctgtcatcgtaatcggaaaggagctccactttgccgtcctctactgtatacagtttgtcattctcgttgaaaccgtattccttcatgtaggaaccaaagaaggtcacttttcctttgaggatgcacgcatagtcgatgctcatgtccttctgctccacaagggtcttgagctctccggtggagatcgtatactgctttaagccctgatatacgtcctttttatcggtataaaggctggagacatagaggatcgtatcgtctccctctacccaggaattctccacattttcataatccggtgtcacgatctcacaggaaccattatccggatcgtaaaccgccagtctcgttctcttcttgtttacgattccctgaccgttcgcccagaacggaagctcatcgaatacttcataatctttctcttccttccaggccttgagagcggctttcttctcctcgccctcttccatatgggagagatccggcttattgtaatcatattttaccgtgaggacaagtttctttccggcttttttcatcttcactgccttatacggaacagcgaaagcgaactgtgcctcgccaccatggatattcagggtgtagaagcaggtccagtcttcctcattcttcgccttttcctgataagtcttctcacggtccgcaataaagaggacagtctcggaatccatccagatgaaggtgcgctctttctttccacctgtcagtctggaagttttctttgtctccatatcatagagccataagcaggactcatagcagttgtctttctcattggcatccaccactgccatcaccgcatgttttccatccggtgccggggtaaagatcgtaggataatgataatttgtaaagtctctgatatcgatctgtttcatggttccaggtcctctctttcctatttatatatgtagttttatcgcaggatcatttccctgtcaaatttaatatacttacgtatctgttcgataccatcacagccctgcacagcatatcacgtcagctctgtcggcagttccgattgcagagcaaacaatcatttaaaacagtatacccccgccagataccggcgggggcatataaatgtctccttatttgccttccgtcagatggcatgccacgaaatgattcggttcgatctcgcggagtaccggttcctcgcttctgcagcggtctgtcgcatacggacagcgggcagcaaaacggcagccaggtttcgggttgatcggagatgtgatctcaccttttaaaatgatacgctctctcttctttttcaggcttggtaccggaattgcggagagcagagcctgtgtatacggatgggtcggcttatcgaaaagcagctcagacggagctttctcgatgagctgtccaagatacataactgcaatatcatccgcaaagtggttgacaacggaaaggtcgtgtgtgatgaagatataggttaatcccatctgttcctgaagatcctgcatcaggtttaagatctgcgcctgaatggatacgtcaagggcagaaaccggctcgtcgcagacgatcagcttcggtttcatcgcaagtgctctcgcgataccgatacgctgacggcggccaccgtcaagctcatgcgggtatgtattgatcaggcggtctgcaagacctacgacctgcatcagctcacgcactcggtccatacgggctttcgggtccgtaataagcttctggagctttaacggctcagcaatgatctcactgactgtctttctcgggtcaagggacgcgtacgggtcctggaagatcaactgcatgtcacgtcttaagagacggagctcatttttattctttttacatacatcctcaccatcgaagatgacctcaccggaggtcggctcgatgagacgtaaaatcgaacgtcctgtggtggacttaccgcatccggactcacctacgataccgagggtttttccgcgttccagagtgaagttcacgtcatcgaccgcatggagcagtccctttggagtgttgaaatattttttcaggtgttttacttcaaggatcgtatctgccattactgctcactcctttcaatggaaaatcccggctcttcgtagcggacgcagcgcacatagtgcgtatcgctcgcccacttcttttccggtctgtcttttttgcacgcttctgtgcagtacttacatctcggggagaacgggcagcccttcggaaggtttgtcggatccggcatcaagcccggaatcggctgaagtcttgccttgcggtcctcaatgttcggaagagaaccgaaaagaccttctgtgtatgggtgcatggtgtggttgaagatatcttccagagttccatgctctacgatctgtccggcatagacaacggacacctcatcacagacctctgcgataattcccagatcatgggtgatcatgatcatcgcggaaccaaatttctttcttaaatccttcatcgtctcgaggacctgtgcctgaatcgtcacatcgagagcggttgtcggctcatcggcaagaaggagcttcgggttgcaggcaagcgccatagcgataacgacacgctgcttcataccaccggagaactggtgcgggtactcgccgaaacgttctctcgggatacctacgacctccagcatatcgccggctttctgctcagcctctttctcactgatcttatcatgaagcttgataacctcggcgatctgatcaccgacagtgagcactgggtttaaggatgtcatcggatcctggaagatcatggaaacggtatttccacggatcgcctccagctccttctgcggcatatttaagatatcttttccgtcaagaaggatggaaccgtttttaataactcccggcgggtccggaacaagacgcaggatcgaaagagcggtcgttgtctttccggatccggtctctcctaccagtcctaaggtttttccgtgctctaactggatatcgatgccgtttaccgcctctacaacgccgtcatcggtctcataatggatcacaagatccttgatatcaagaattaagtttttgttatcttccaatattttgtcctccctacttcttcagtttcgggtctaacgcatcacgaagaccatcgcctaacaggttcagggaaaggatcgtaatgatgatcgcaatacccgggaatacggtcaggtgcggagcgtttcttaagtaagcacgtccgccggaaagcattgcgccccactccggtgtcggagcctttacgccgaggccaaggaagcttaagccggatgtggaaaggatcgcggatgcaacctttaaagatacctgaacgatgatcggtgccatgcagttcgggagaatatgggaggaaatgatctcgaagttgtttgctccgatacatttcgccgcctctacgaattcctgatcctttacagtaaggacggaagcccggacgattcgcgcgtagccaggcacagaagagatcgcgatggcgagcattaagttgaagatgctcggtccaagtgcggatacgatcgtgatggaaagaagaaggctcggtaccgcaaggaagatatccatgatacgcatgatcacgttatcgatctttccgccgtagaagcctgcgatcgctcctaaggatccaccgatcagaagtgcgatggatacggctacaacgccaacgcttaaggatactcttgatccgtgaacgagacgtgccagaatatcacgtccgaactcatctgttccgagccagtgagccgcgctcggagtctggagacggatggctgtgttctgtttgataacaacggtattgtaatcgaacaggaaatctgcaaagatggagatcagtacgaggaaaacgacgattccaagaccgatcattgccattttattctttttcaagcggcgccagatctctttgaactggccgcgcttctttacagtcgcgccggacgccgcttcctgattctttgatgttcccatacgctttcctccttattttttcttatactgcgctttgatacgcgggtcaatgaaagcgtagagaatgtccacgcaaaggtttacgatactgaaggtaatggtcatcatgataacgccgccgaggactaacggggcatctttactcttgatggagtctaccaggagacggccaacgcccggccatgcaaatacggtctcggtaagagtcgcgccgccaagaagggaaccgaactgaaggccgataacggtaacgaccgggatcagcgcattctttaacgcgtgtttccggatcaccattttctccggcacacccttcgctctcgcggtacggatataatcctgacggatgacctcaagcatggaagaacgtgtcatacgacagatcagcgccgcatcgccggtaccgagtgtgatcgccggcatgatgtagttcttccaggatcccataccgccggatggaagccatccaaggtttaaggagaatacgatgataagcatcaggcccagccagaagtttggcgtcgcgacacccaatagggcggcgaccattccgacattatcgatcgcgctgtactgcctcgtcgcactgatgataccgattgggagtgcgatcgctactgctaccaggatcgaccagaacgcaagctttgctgtgttcgggaaagctgccatgatcgtcgggaaaacgtcacgttttgtcttgtaagatttacccatatcgccgtgaagaagattcagcatatattttccgtactgaacgataaccggctgatcaagtccgaggtcttttcttgtcgcctcgatcgtctccgcatcggcactctcacctgcaatcatcgctgccgtatcacctggtgaaaggcttaagatgaaataaaccatgaatgtcacgccgatcagtaccgggatcagcatcgcaagtctctttaacacatatttgctcatgcacaccatccaatctaccgcatcctgcggctgtttttttgtgtttccgaaacccgtctgtcggggccgaagttccggatccttgtctcagggtttctggaatgttttccgggctttcaccggattctggaaataggtacggatcccttttcgtgacccgtaccctgtttttgcatggactctgtcctttttgggaatcagatattatttttcgtaatggcagttgccaaggtaatgctgtgcgcctttgtgaagcttgaagcccttcaagtctgcacggacaccgacgttatcgtatttgtagtataacgggcaccacggggagatctcgtggagacgatcctgaagctccttgtagagttccatacgtttggtatcatcgctttccttctgagcggcgataatgagttcgtcgaccttctcatctgttaagaatgcacggttgccggtcgtaccatggttctcggagtagaataactggtaggtgcttccgtctgcgtcaaagcttgtgttggaccatccgaggatgaacatctcatgatcacctgcatttaaggaatcaagcaatgcgccccactcatatgtagaaatatcaacagtgattccaacttcagcgagctgtgcctgaacgatctgagcggaacgtgtacgaacgtcaccgtttacatagaggctgcactcaaatccattcggataacctgcttctgcaaggagctcttttgccttttccggatcatacggataagcttcttcctcttcagaccagcccgggatcgtggagttgatatagctgtttgctacagttccgcgtccctcaatgatcgtatcaacgaaggtctgtttatccagcgcgtagttgactgcctgacggactctctcatcggagaatttctcttttgtcgtattcattccaaggtactcgatggaagaagacggctgggaaagaagcgctacgtcggagtttgcttccacgttcgcacaatctgtcgggtcaacgttccatacaagatcgacctctcctgcctcaagagcgatggttcttgcacttccctccgggattacgcggacagtaatggaagttgcgatcggttctgtaccccagtatttttcgttttttgtgaggatgtagtgatcgttcggaacccactccgtaaccgtgaactcaccggatccgagtacattctccacatcgccgtaagcatcgcctgctgctgtgacagctgcctcagaaacgatacttaagtttgtctgggtaacgattgtcttgaacgctgcgtatggctgtgtaagcttgaaggttacgtggtaatcatcgtcagcgataacctctgcgatctttgaagtattggactttgtcttcggcatatccttcgcacggtcatacgtaaactttacatccttcgctgttaccggtgttccgtctgagaagcatgcatcctcacggagcttgaaggtatactctgtatcactcttcatctcatagctctcagccagatcaggaacaaggttaccgtcatcgtcgatatccatcagtgtgctgtatacgtgatggatcagtactccggatgtggtatcctgctgtcctgccggatccagtgttacaacatctgcaccctgagccacaacgatatccgtctttgtgatctcgccgcttccgccgttatcggtagttgtctgcgcgctgctgcctgccggtgcgtttgtagactgatccgcgtttccccctccgcaggctgtaaggatcatagctgctgccattgccattgctgttgttcttgcaataccccttcttttcattcacaaattcctcctgttattttcttccgctccccacagcggtcgcacttcataacggtagcatatgtcagtgttcactatacccgtcatgcagtacttagttcgatctcatgaaccaatgataacagttttgaacaaatttgtcaataattttcaatttacacggggttattttagcaattttcataaattattgtgatcttttttgtattgtatttactatactcctatcacactgatgggttgacccctttccgaagatccgccctataaaccgtctttaacgaagtcggtgctgccgattgcacttctcacttccgagaggcgtccacggcgtttattcgtctcctccgggttatccatggcagagaaatatatcagggcgttcgccacagacatatatcccatcacggaattataaaagaacaggtcgtggttgttgcaggtaaaaacggtcgttccgtaggacgcgatcggtgaagtcctctgatccgtgatggcgatctgcgggatcttcttcttatcgagataccttgcggtattcacgatatgtttcgcgtatccgggtgcggaaaagatgatcgcgcagtcctccggcgtagcgtgggccaggtagttattgtagagagcccggctcagattcgagagatcgagcgcctccagccccaatgtcaggagtcttctcgtcgtgtaggcacagagtccagttaccagctcgctccccaccacatagatcttccgggactgcctgatgatcgccactgcggagaggatatcctttaaggagacctgttcaaaggtcttcgcgatcacatttttctcgttcgtgacaaactcccggaacatttcttccttatcgtggtcaccgtaccggatcccgcccacataatccgcgatcctgttcaaaccgtccccatggaccagtctcgtctgcaaatgctcccgcagacggttcttcatctccacgaagctctgggccccgatcttctttgtgaaccttaatatggtcacctccgtcacacccagtgtctccgaaagctctttcagggagtaaaagcagacctgatccggatatttgaagataaaatccgcgatccttttctgaaccgggctgagtttttcatagcttgcgtttacttcttcgagaattcccatgctcatctcctcctgttttactattcagccctatccctattttatcagcgaattctctgaatagttataattcactatacattgtactatacatgatagtgacattataactgaatatctcatgcaattccagtattttttgtgtatttttttaaatgtgtctttacaacttcgggcatcccgcgcagcctcttgcggcagtctgcatcttcgcgcgaatgcatgtcattgaaaagggggcagacatctttatgcctgccccccgtcttttacattttaaatattatcaatcttcatagtggcagttgccaaggtagtgctgtgcgcccttgtgaagcttgaatccctttaagtctgcgcggacaccgacattgtcatttttgtagtataacggacaccacggggagatctcgtggagatatacctgaagctctttgtagaactccatgcgcttggtatcgtcactctctttctgtgcatcgatgatcagctcatcgactttatcatcggttaagaatgcacggttaccggtcgctccatggtttccggaatagaataactggtaagtacttccatccgcgtcgaagcttgaattcgaccatccgaggaggaacatctcatgctcacctgcatttaaggaatcgagaagagcgccccactcataggtagagatatcaaccgtgattccaacctctgcaagctgggcctgaatgatctgggcggaacgggtacgaacgtcgccgtttacatagatcttgcattcaaatccgttcggatagcctgcttccgcaagaagctcttttgccttcgccggatcatacggataagcttccacttcgtctgtccagcccgggatcattgagttgatgtagctgtttgctacagttccccgaccctcaatgatcgtatcaacaaatgtctgtttatccagcgcataattgatcgcctgtctgactctcacatccgagaatttctcttttgtcgtattcataccgagatattcgatggaagaagacgtctggctcaacagcgtcacatccggatttgcctcgatgttcgcacagtctgtcgcgtcaacgttccatacaaggtcgacctctcctgcctcaagggcaatggcgcgggcgcttccctccgggatcacccggcaggtgatcgttgtcgcgatcggcatctcaccccagtatttttcgtttcttgtaagggtgtagtgatcgttcggaacccactcggtaactgtgaactcaccggatccgagaacattgtcaacatcaccgtaggactctcccgccgctgtgaccgccgcctcggaaacaatactaaggttcgacgaagtaacaatggtcttaaatgccgcatatggctgtgtcagcttgaaggtaacatggtgatcgtcatccgcgataacctcttcgatcttggaggtattggatttcgtcttcggcatatccttcgcacggtcaaatgtaaactttacatccttcgctgtaaccggcgtgccatcggagaaacatgcatcctgtctcagggtgaaggtatattccgtatcactcttcatctcgtagctctctgccagatccggaacaaggttgccatcgtcatcgacatccatcaaggtactgtacacatgtttcataagtacaccggaagtggtatcctgctgtcctgccggatccagggtcacaacgtcagaggcctgggcaaagacgatatctgtctttgtgatatttccgccgccggagctttccgctgtcgcctgagtctcactgccgcctgccgccgcggtcgttgccgccgcattgtttccgcctccgcacgctgtcagcaccattgctgctccgacaacggctgccaccgatctcgctgctgttctttttctcattcacatgccctccttcaagttatttctgtttcgtcagagtgttgttggtaatcgttgaatgtaaatatttactatacctatatatacactcttttctgaatttcatgattaaaggatatcattttctaacatttttgtcaataaggttttcctttctgcgtattttttgtttaatttgtttgttttatttggtttcagcctttctatcgccataatctgtttacaatttgttcaaaattcacaacgaagggaaactctcatgtatagtaaatgctgacatttcgacagagaaaaagggcgggaccacaaggatcccgcccggaatttttttaaatacttatattatcacgaatttatcagatgatccgacagttttctgtcactgaatcctattttacaacaaggtttacaatcttcttcggaacatagatctctttcacgatatttccagtgatctttccttctaccgcagctttacctgcagcaatcgcatcctcttttgcgatatcagccggaaccatgatgaccgcttttaccttaccgtttacctgtacagcaacctcgatctcatcgtccttcatggcttcctcatcgcactccggccaggtcgcgtggaatacgctgtctgtaccgccaagctctctccagagctcctcgccgagatgcggggtgaacggagccagtaagatcacgaaggtctttaaggtctccttgtcgattccgccttccttctttgcaacatctgtgagcttgttgcagtactccatgaatccggataccacggtattcaggctgaactggttgaaacgtgtctcgatatcgtagacaagcttgtggcgaagcttcaccatctcctttgtctccttgatatccttgtccttgctgtccatcacaaggttgtagaaacgattcaggaatctggcaacgccctcgattcctctgtcgtcccactcggcatccagctccggcggtccaacgaagagctcgtacattcttaacgcatcacaaccgtaatctcttacaagatcatccggggagacaacatttcctttggacttactcatcttgataccgttcttgccggtgatcataccctggttgaacagcttcttaaacggctcgtcaaaatctaccactccgatatcatataagaacttcgtgtagaatctggagtacaggaggtgaaggacagcatgctcaacgccgccgatatacatatctaccggaaggtacttgtctgctttctccttggatacaagctccttatcgttcttgttgtccacataacgtaagaagtaccaggaagaaccagcccactgcggcatggtgtttgtctcacgttttgccggtgcgccgcagcacgggcatgtcgtgttgacccaggaatcgatcgccgcaagcggggattcaccggtaccggtcggctgatagctctcaacctccggaagctttaacggaagctgatcctccggaaccggaacgtttccgcacttcgggcagtgaacgatcgggatcggctcgccccagtaacgctggcgggagaatacccagtcacgaagcttgtagttgacggtcttctttccgatacccatcttctcgatgatgtgcggagcttctttctttaagacggaggactccatgccgttccactcgccggagttgatcatggttccctttgcgtctgtgtaagcctctgtcatattttcgatctctttgccgtcctgggcaatgacctggatgatcggaagaccgaatttctttgcgaactcgaagtcacggtcgtcgtgtgccggtacgcacatgatcgctccggtaccgtagtcagcgagaacataatcagacagccagatcggaacttccttgccgtttaacgggttgatcgcataggatcctgtgaagacgcctgtcttttccttgccctggagacggtctacgttggacttcatggatgcgtcgaagatgtacttctcaacagcctctctcgtctcatccgttgcaagctctttcgcaagcttatgctccggggagagtaccatgaaggttgcgccgtgaagcgtatccggtcttgttgtgtagacagtgatcttctcgtcgcgtccctttaccgggaactcaacttctgcaccgtaggatttgccgatccagtctgtctgcatctttttaaccttctccggccagtcaagcttgtcaagatcatccagaagacggtctgcgtatgctgtgatctttaacatccactgacggagattcttctttgtaaccggtgtgccgcagcgctcgcagcagccgtttacaacttcctcgttcgcgaggcctgtcttacaggacggacaccagttgatcgggaattccttctcatatgcgagtcctttcttgaacatctgtacgaagatccactgggtccatttgtagaaggacggatctgtcgtgtttacttccatatcccagtcataaagtgctgcgatctggttgatctggcgtttgatatttttgatatttgacgctgtggagatcgccggatgaacccccatcttgatcgcgtagttctcagccggaaggccgaacgcgtcccagcccatcgggtggatcacatattttccctttaataactgataacggctccatacatcggagattacataacctctccagtgacctacatgaagtccgctgccggacggatacgggaacatatccagacagtaatacttctctttctttccatcattgacattgatcggattcttttcccagttctcacgccacttgctctcaatggcggtgtggttgtactgtgccatgacgcttttctcctccatttcatatcgttgaaggcggtgcaaaaatacgctccgcggatttcgcccgccgccgctgcatttaccggaatccgggaactcccagaccctgttcgattgcctgaccgcttttccggtttccgggcaacaaaaaagtccctctatctctatcataattttatagagacgtgggggacttagattctcacgcggtaccactctatttcatacagggctttcacccgtatgcactcattttccgataacggcggaaaccggcaatgcctatctgaggatatccgcagacagcgtttcgttttcccactgctctgcccgctctttcagcatgctgctccgaggcgagttcggaaagcttctggactctgcctcgcaccgcccggcagttctctgtaccccgtcttctctcttactgttcctcttcgacgcattttaactcaataaatttaccatagaatcccggttctgtcaaggtgtcttgtacggttcaattctgccaggaatgcgttcatcgcaccgataggcaggctgcagtgtgcagcgcaaagaagcgctcctgccggaaaaccggttgactttttgagagttcttatatagtatggaaggacaggtctcaacctgaattttatcagaaaaagcggcattgcagcattttttcatctgcccgccgcaaaaatacaagggggatatccatggaatacatccataatctgatctggctctgcccgctcctcttcattgcgggatttatcgactctatcgccggaggaggcggcctgatcgcgcttccggcttatatgatgtgcggaatgccgatctactatgtttacggctgcaacaagttccagtgcgccttcggaagcaccgtggcggcatggaaatactttaaaaacggctgtctcgaccttaagatcacactgatcagcgcagtgacctcgttcctctgctccatgctcggaacaaggatcatcttttacctcaaagaggaacagatccgctcgatgttaatggtactgcttccactcaccgcgatcctcgtggtctttatgaagaatgcctggaactataccgatacgaaaaaaccgctgatcctgccgaatgtgctccgcgccctctttatcggaatgaccatcggcctttacgacagcctctacggaccgggcggcggcacaatcgccatgctgctcttcacgtttcttttaaaatatgatgtccgcactgcctccggaaacgcgaagctcacgttgatcgtttccaactacacagcgcttctctcctatatcctttccggaaatgtgttctacatgatcgcgatcccgtgtgccgtaagcaacgttctcggaaactatatcggtgccggcttcgccatcaaaaacggcgcgaagatcatccggccggtgatgatctgcgtagtaacggtgctgatcgtgaaaattgttcttggaaagtaaaacaagtgaaaacacgtttcgcgagtttccccttgtcatcgcaatagtcgccacggtctcacgcatgcgcggactttggatcgttgttcgcgtaaattatacgagcgtgcttattttacataggcacgctcgtttactatcatcaattcagccgtatctttttcccctctgtttccttcttaccacaccggaaactacctgctctttccgtaccggtttccgtcctctgtcacaaaccagccgtccggagtcctgcggtttgcgtagaggatgccttttgttccgtccgggatcgggttgaagtagtaccactttccattgatctcgatccatctcccggcatttagttaaatccgaaaaacttctgcgcgatcttatatcccgcgatggagagggatcttccgccttttcccggaaggttcatgccctgtcccaagaagccccagcggagtcgcagatagagcgccggattggattttttcagttcttcccacaacgcttttttctttgccatattctcctcgctgccggacttgatcgcaaggatcgagcagatgaccatcataatctccagatagcggaccatatagtggcggagcttccggttctggatctttgtcacatcgtagtagccaagcatcagcttcgtcacacggatctgctggtcgatccttccgatcatgacctgttcgttgacagactggtccgagcggccgataaagtagcggtagaagttcacatcaagatagtacatcgtatgtacatgcgggagcggctcgtagacaaagatattgtccacatagaacgtgtgctccgggagttccagcttacagtcccttaagagctcggtgcggtagatcacggaatgcatcaggatatactgtcctgctacgaacaccttcacatcgttccagctaaagagctcatctttcggaagcgctaacttgtagctcatgaccttcttgtgtcttgcgccctgtttctcatagacaaagtttgtgatcagcatatcgagggtgtcttttccgtagacgaagcggcgcagggtgtcaagcacctgtctgtatgcctgctcattgacccagtcatcactgtccacgaccttgaaaaagattccggaagcggcctttaaaccggcattgacggcagctccgtggccgccgttctcctgatggatcgccttgcagatccccggatattccttttcataacggtcggcgatctccgccgtattatcctttacagatccatcgtccacgatcaggatctccacttcatttccacccggaagcagagacttgatacagttttccatatatgccgctgaattgtagcatggaatcgcgatcgataacagcttcaaaattgtttcctccttaacgtttttcgactcagttgttcctattctaccataaacaaaccaaaattgcaaaaaattcttatcattaccaaaatcgcgcgatctttctttatctctcccgccaaccagcagcggtgaatactcttaaaaaaatgcgccttcatccggcaaccttgcacactatccctctttcctctctcccgccaactaccagcggtgagcatccgggcagaagtgcgccttaatccagggatctggttcctcttagcttccgtctttagcagtcgcccgggagcttagcggaaccatccctgcatccctcaagcactcctgcccggatgctcaccgcgttccttcgccaacacactcactttgtccgtaatttatttcttaaatcctttcatttttccttccataatttccaaaaatatggtaaaatatctgaaaatacatgattattccaattttgcaaaaataaagaaatgagggatcttgatatggcaaaaaaaagacttgttttagcacttggacatgatgctctcggaaccaatcttccggaacagaaaacagccgttacaaaaacggcaaaagccatcgccgactttattcaggacggctggcaggtagtgatcacacacggaaacactccgcagctcggcatgatccacaccgctttaaatgaattcgcgaaaaatcatgaaggttacactccggccccgatgtccgtctgctccgcaatgagtcagggatatatcggctacgatctccagaacgctctccgctccgagcttatcaaacgcggcatttacaaagctgtatctacgatcttaacacaggttacagttgacccgtacgatgagtcctcctacactccgatgaaggtggttggacgtgtgatgaacgccgaggaggcaaaagcggaagaggcaaagggtaacttcgttgtaaaggaaggcgacggctatcgccgtatcgttgcggctccgaagccggtcgcgatcgttgagatcgacgcgatccgcgctctcgctgatgctgaccagccggtgatcgctgcaggcggcggcggaatcccggttatggaacagggctcccacttaaaaggggccagcgctgtgatcgagaaggaccgcgcagccggacttctcgcgaaggagcttgacgctgatgtcctgatgttcatcacaggtgttccgaatgtcgtattaaattacggcagtgatcacccgatcaacatcgataagatgacaacggctgacgcagcccgctatgccgaggaaggtcattttaagacaggttccatgctgccgaaggttgaaagctccatcgacttcatcaacgcaggaaaaggacggcgcgcgatcatcacttcccttgacggtgcaaagagcgctttagccggtaaaggcggcacaacgatccagtaggcaatatattctgatttgaccccggtcaatctgatttaaacccagaacaaacaaaagcataatcccagggaattctatatgagaacttccctgggatcttttttcaaatactcctctcccaactgtcctgatcatacgaacctctttagtgaaaataataaagaatgcgccaaggcgcagtcgcttgcgacaatctacatcttcgcgcgagtgtgtatcattggctcgttagtgccttttgtgcaataggaaattccgcgtaatctcctattacacacaaaaaagacccgccggaaagcatttctgccttccgcgggtcttttctttttctatatgttgttacccaatcagataataacatgtgccgggcacttcgccgcgcacttgccgcagccggtacactttgtgtaatcgatcacagcaacgttgttatccatatggatcgcatcgaactcacactgctttgtgcagagcgtacatccgatacagcctgcctcgcagaccttcttgacagccggtcctttgtcgtgggagctgcactgtacgaggtggtttgccttgtacggaacaagctcgatcaggtgacgcggacaagcctccgcacacttaccacaggcaacacacttctccttgtcgacaacggcaacaccgtttacaacatggatcgcgtcaaactgacatgccttcacacaacttccagaaccgagacatccgtagttacagcccttggagccgccgcccggaactgcatctgcgatcttgtgacagtcgtcaataccataatagttgtatttcacagttgccttatcgcaggtacctttacattttacaaatgcaaccttcttctcagcggaaccagcctcaacgcccatgatcgcagcgatcttttctcctaccggagcgccgccgaccggacactggtcaacctttgccttgccctctgcaattgcttttgcaagagcgtcacagcctgcgtaaccgcagccgccgcagttgttgcccggaagctctgcacgaaccagaatttccttctcgtctacttctactttaaacttctcgctggcgattccaaggagtacgccgatgacgataccgacgataccgacaaccgcagcagcgatgataatgcctgtcatgttcatctctcgttcctccttaaatcattccggaaaatccgaagagagcgatcgacattaagcttgctgtgatcagaacgatcggagatccctgaaaagcgtgcggcacatcattgtgctcgatcttctcacggatacctgcaagcaggacgatggcgatcaggaatccaacggaaataccgataccgtttacgacactctgaatgaagttgtagcccttctgtacgtttgtcagcgcaacaccgagaaccgcacagtttgttgtaattaacggaaggtatacgccgagtgcctcataaaggcttaccatgttcttctttaagaacatctcaacgaactgaaccagcgccgcgattacaaggataaatacgatcgtctgtaaatactcgatatggagctttacgagaacgaaatcataaacaaggcttgtgcaggcggatgcgatcgtaataacgaatacaactgcagcgcccataccagctgctgtctctgttttcttggatacaccaaggaacgggcaaagaccgaggaactggcttaaaacaacgttattcaccagggcagaaccgatggcgatcaataaaagttctttcatttctccatttcctccttaattttctttgccggcgtctgctgcttcagtcttagctgcctctgccgcttttgcagcctcagctgccttcttagctgcgagggccttctctgctgctgccttctttgctgccgctgcagctgctgcttcctctgccttcttctcagcgagagcagcatggtttgtcatgctgacacagcctgcacagcttgcgcagttaccgccgcatacaaggtcagacttcggtgcatcgccgtttgtcgcgcatggaagacggagcttgttctggatcgcggaaagcatagccagagtgaacagagcacccggtgcaaggatgatgatggaaatgtggtaagcttccggaatgatggtgtgtccgaagatcgcacctgcaccgaagagctcacggcacataccgatgacggtaagggaaagggagaaaccaagtcccataccaaggccatcgaagaaagattcaaccggaccgttcttgcaggcatatgcctctgcacggccaaggatgatacagttaacaacgataagcgggatataaatacccagggatgcatacagggacggaacgtagccctgcattaagagctgtacgactgtaaccaggctggctacgactacgatgaatgccgggatacgaacacgatccggaataatattacgcagtgcggagatcagcaggttggaaaacatcagtacggctgttgtggaaagtcccatgccgagaccgttgatggcggatgttgtcgtcgcaagagtcggacacatacctaacatcaggatgaaggttgggttttccttgataataccgttatataaacgttctacgcatttattcatgaatgcccacctcctagtttaagcagttatgcagataatataaagctgcattgactgcgtttgttgtagcgtttgatgtgatggtggcaccgctgatcgcgttaatctcagtgtcagatgcggaaccggactttgttacggtaagcttgtcgcagttcttgccgacgaactgatttctgtagtcatcatcttttgcctttaatccaagaccaggagtatcgcttgtctcacggataccaacacctgtgatggtaccgtcagcgtcaaagccgatggagagctttacagctccaccgtaggagtcattggacagggagttgatcacatgtcccactactgctccgctcgcgtcctttgcctcgagaacggactcgatctcaacgcctccgaaaccgaggtttgcgatctcatcagcagtctcagcgatcttctctgtggaaccttcgacgtcagagaagttgtctgcgtccggaagaacctgtttgtatgttgcgttgttggctgcgatggtagccgcctcgatcggagcttttgtcacatcatagacaacaccgagacataaaccggaaaccagggtgatcgcaaaaaggatcagggcatctttcataaatccagacttacttgctgccatttttcttacccccttttccgaatgctgtcgggagagttaccttctcgatcaacggaacgagcatgttgcagaagataattgcgtaggaaacgccctctgcgccgcttccgaagatacggaacagtcctgttaaaataccaaggcagataccgaatacgatctgtccttttgcagtgatcgggcttgttacatagtcggtagccatgaagaatgcaccgaagatgagaccgccgccgcagatctcagccagaacatagttgatgttgtgctgaccgaagatgaatgcgaatactgcgaatgtgatgatgtaagctgccgggatgcggatggagattactttcttgatgagcaggtaagctgcaccgatcagaagagcaatcacagaaacctcaccgatggttcccgggatcttaccaatgaacattgctgcaagatcatatgtaccgcctgctttgatctctgcaagaggagttgcacttgcgatcgcatctgttcccggctctgagaactgggtcatagcctgtgcgaaggagatcagcatgaagcatcttgctgccagagccgggttcatccagttctgaccaagtccgccgtaaagctgttttacaacgatgatcgcgaagataccgccaaggatcggcatccagatcgggattgccggcggcatgtttaatccaaggatcatacctgtgacaagggcactgccatcactgatggtaaccggcttgtgcatcagggtttcaaaaatgtactcactgagtacgcaggaaagaaccgttgctactacaacgatcagggaacggataccgaactgcatcacaccccagatcgtagccggcagcattgcgatcgctacatcgtacatcaggttctttgtggaaacaccgcagcgtacatgaggggatgatgatacgtttaataatttactcatttgtcacacctcctacgctttctttcttctggctgccatgactgccttacgcatctctttgaatgcctgggtcagcggtctgtgggcagggcagatgaaagtacaggagccgcattcgcagcactccataccatttaatttttcgaacagggcaagatcatttctttctgctgccgccatcatcatctgcgggacaacatgaccaggacatacctcgatacagcgtccacagcgaatacacggagattccagatttgccgcaaccggatcttttatgaagcaggtcagggcagaagagttcttcatgaccggaatatccagagagaataatgcctgtcccatcatcggaccaccggagatcatcttttccggctcttccttaaatccacctgcagcctcgaggatctcccggtagcacataccgagcggaacctggaagttctgcggattcttaaccgcatcaccggtaacggtgatgatcttacgaattaacggtgtgctctcacagaccgcattgtaaatagaaataacggtatctacgttatctacgatacatcctgcatccgccggaagcatagtggagttgatctcacgtccgcctgtaaccgcatagatcaggaaacgctcgccgccctgcgggtactttgtctttaacggacataccgtgatcttcggctcgtcttttacgagaccttccagaagcttgatcgcctccggcttgttctcctcgattccgatcacgcctttcgcgttcgggaacatgcttaacatgactttgacgccgccgatcagtctctccggctgctccatcatcaggcgatagtcacttgtcagatacggctcacactcggccgcgtttacgataatgtgatcgatcgcgttgtcatccttcggtgcaagttttacgttggtcgggaaacctgcgccgccgagacctacgataccggcttcttttacgatattccggatctcttccttggaaagttttgtgtaatcgcgtttttcgccaaaaccttcgattgctgtgtactcgttatcgttctcaacgataatggactgtacgattgctccgttcgcaaccagacgcggttcgattccctttactgtaccggatacggaacagataacatttgcggaaatgaagccgcctgcttcagcgatcttctggccaaccaggaccttgtcacccttggcaacaagtggtttcgccggagcaccgatatgctgggagagaggataaaccagctcacccttcggctggatcacctgaatcggcttatctgcggacagttcttttccctcataaggatgaacgccgcctataaatgtgctcagacccatttaacaaaccttctttctataaaatttcatagtacccatcacaccgtagtatagcatatttggaatttttctacaattggaaatcggttaactttttaacagaaatggccgttttcggcgtttgtatcaaaaaaagaacaaaaacagacatctgatttctttaaaaaatgaagtttttaccaactaactcccgcgcttttctgctctctcttatggaattgctacaaaatttgaaaaagcttgtctgggtgcgtatgatcgatacgcagtgcctttttatgtaacaggaaattccccggaatttcctgttacataaaaaatgggcagatttcttcatctgcccgttttttcttctgtgatcgtcctaactcagctccgccattcccgtatataaccgataataacgtcctttttctttcaggaggtcttcatgatcaccgcgctcaatgatctctccgttctccagaaccatgatggcgttggcgttccgcactgtggaaagacggtgggcgatcacgaaagtggtccgttctgccatcagacggtccatgccctgctcgatatgcttttccgttctcgtatcgacggagctcgtcgcttcatcaaggatcaggatcggcgccttggataccgccgctcttgcgatattaagaagctgtctctggccctgactcaagttcgcgccgtcgctctccagaaccgtgtcatagcccctgggaagccgcatgataaaggaattggcagatgccatcttcgccgcctgaacgacctcctcgtcggtggcatcaagccttccgtagcggatattttccatgaccgttcccgtgaacaggtgggtatcctgaagcaccatggcgatgtggcggcgcagctcgtcccgcctgatatggcggatatcaacaccgtcaatggtgatggtcccgctctggatatcgtaaaaacggttgataaggttcgtgatcgtagtctttccggctcccgtggaacccacgaaggcgatcttctgtcccggcttcgcgtagaggctgatatcctttaagatgaccttgtccgggttgtagccgaaggtcacatgatctaacaccacttccccgcgcatgccgtccatagacactgcgtccttatcatccgccgcctccggctcctcatccatcacggagaaaacgcgctccgctccggcgagagctgagaacacgttggagacctgcatggagatctcgttgatcggccttgagaactgtctcgaaaagttcaggaataccgtgagccctccgacatcgaagtttttcaccacacagaggatcccgccgatgcacgccgtcagggaatagtttacctgacttaagttgttcatcacaggtcccatcatgcccccaaggaattgggcgcggatctgtttttcgcggagatccctgtttaatatatcaaattcttcctccgcgatctcctcatggcagaagacctttaccaccttctgtccggtgatggtctcctcgatgtatccgtttaaagcaccgagagccgactgctgggcgctgaagtatttctggctccgcttcgcgacctctccaccggcccgcagcatgagcgggatcatgatcagggtcacggctgtcagccagatgttcgtgtagagcatgaggaacaaggtcccgatgatgcttaaggttccggaaaagagctgcacaagagtactgctcagcatatttccgatagtgtccacgtcgtttgtgaagcggctcatcagatccccattggaatttgtatcataaaatctcaccggaagcttctgcatctttgtaaagaggtctgtccggatccgcacaagggcgctctgggcaacctctaacatcagtcttgactggagataatttgcgataacccccagaagatagacgcatgccatcgcagtcagccctttaaaaagtcctgccacattgccgggacttccgtccggcggtgcaataaatcggttgatgatcgggcgcagcatataggaaccggtcagtgtcgccaccgtatttacaatgacacagaaaaatgcgatccccatccggagcctgtccgcttccagataggacagcaggcgctttaaggccgctcccgtgctctttgggcgtcctccgcctctcggagcccccggtcctcttcccatccccctccttttcggtgcggctgccacgcgtccggcatatcgttttttcagactcgcttcgcggtctgctctcgtgacgctcatactgccgcctcctctcctgccctgatggactgatttccgatctgggtcgtatagatctcgctgtatgcctcacaggtctttaaaagttcctcgtgggttccgtgaccgatgatctttccgtcctccagtaccagaatctgatccgcctcctgaacggaggagatcctttgggcgatgatgatctttgtggtatcctttagatcatgataaagactctcacggattttcgcttccgttgccgtgtcaacagcgctggtggagtcatccaggatcagaatcttcgggcgctttaaaagtgctctcgcaatacagagacgctgcttctgacctcctgagacgttgacgccgccctgccccatctcggtatcatatccgtttttgaaggtcttaacgaagggatctgcctgggcgctctccgagaaccggatgacatcctccatcggcgcgtcctcatttccccatcggagattttcctcgatcgttcccgagaagaggatatttttctggaggaccatgccgacgccctcacgcaggtgttttaaagagtattctttgacgttcacgccgtcgacaaggacttcgcctccggtcacatcatagagtctcgggatcagctgcacgagggaggtctttccgcttcccgtggagccgatgatcccgatggtctgtcccggttctgccgtaaaggagattccttccagaacgagatcctttctcccgttctctccgctgtagccaaagcttacattcttaaactccacacagccttccgtgacttttttatccttatttttcgcatgatcatcatttaagccgatctctgtgtcgaagatctcattgatccgtttcagggacgcgctggcacgggagctctgtaagaataccatggaaagcatcatgagggacatcaggatctgcacgatatacgtcgtaaacgcagtgagatcccccaccggcatctttccggcaatgatgatatttcctccataccagacgacagccagtgtcgtcacgttcatggcgaacatcatcaccggcatcgtggcgatcacgatccggagcgcacggaggctgctctcctttaagtcgtcatttaatttactgaatttttcgatctcatggtcctcccggacgaaggatttcactacccgaacattcgtcagggattcctgaattccggaattcaaacgatccagtctcctctgcatctccccaaagcgcgggaatgcagtctttaagatcagaatgatcgccgcgagaagaagcgggatcacgatgaggatgatgaccgcaagctgacgattcatcataaacgccatgatcagggcaccgaggaacattccgggcgctctaagcgccatacgaagccccatcatcaggacattctgaacctgctggacatcgttcgtgagcctcgtaacgagagaaccggtgctgtagtcgtcgatattctcaaaggagaactgctggaccttcctgaagaggtcgtttctcatgtcactggtaaaggagatggacgccttcgcggaaaagtaggcgccgaggatcccacccaccgccataaaaaggacagtcaggaccatcagcgtccccatctttccgatataggcaacatttcgactcgcgacaccgttgttgatgatcatggacataaatttcgggagcatgacctctcccgccacctcggtgagcatcatcagcggaccgatcacaaaggcactgagatacggggtgatgtattttttgtatcgtttcaattctgttgtttcctttctggtcagatctgcattcgttggattcttccgttgctgtttatcacgcatcttccctcggaagttttctcctcacgatatagaagcagatcatatgggccgtcgccgtgacgatccaggtaaacggataggataagtataacactgtcaggttatggtatacctgaaacaccgtaaagatccagacgatccggagtccacacgctcccagaagggagacgcacatcggcataacggagtatccgagaccgcggatgctgcccaccatcgtatccatgatcccacagaggaaatatgttgttccaaagaccacaagtcttctcattccgtatacaatgacctccgggtctgaggaatagatccggatcagggcatgtccgcaaagataagccgggattcccatcccgagtcccactgccgtcacaacgccgaggcaggtaaccatgatccggttgatcctcgaatactttttgccgccgaagttctggctcgtgaagcttaagtttgcctgataaaccgcattcatggcgttatagatgaatccctcaatattctgggatgtcgtatttcccgccatcgcgacagaaccgaaggaattgacagaggactggatcagaacattggaaatagaaaatactgcgccctgcatccccgccggaaggcctacctgaatgatctgacggaattttgagcggtggatcttcagatcttttaaatgaagcttcagaccgccctcgctctccatcaggcaaaggatcaccagacacgccgagatcgcctgagagatcgcggtcgccagagcaactcccgccacatccatctggaacatgatcacaaaaaagaggtttaagaccacattgatcacgcccgccgccgtaaggaaatacagcgggcgcttcgtgtctcccaccgcgcggaggatcgcgcttccaaagttgtagatcatattcgcaggcatgccgataaagatgatccgcatataaatcgtagatttatcgatcacatcgtccggagttcccatgagttccagcattggcctcgagagaagctgacccacaatgatcagaaaaagaccgctgacgatgctgagtgccatggccgtatggatcgtatcctgcacgtctttttcccgcttcgctccataatatctcgccacgatgacattgacacccacggacagtccgataaagatattgatcatcaggttgatcagcgccgttgtagaacccaccgccgccagagactggctacccgcgaaacgtcccacaacgatcacatccgcagcgttgaacagaagctgcaggattccggaaaagatcagcggaatcgtaaaggtgagcagttttccgaggatcggaccgctgcacatgtccatttcgtaatttttcttcataatactcctttttcccgtacctgtattttctttccggcagcatccggaaagaaaagcagactggcatttcccgcccctgtccgtctgctcattctatccacggctgctcccggtgccggaatgcgtaaggcacattccttttatctattacgcaaattatagacgatttttacaaataatgcaatcctgccgcaacacgcttcagtcctcgaggacatacgcccggaagagaccggaccacggatttccgataatatagcaggtgtaggctcttccagcacggacgttgacgttgaaggtgagaagcggattcgccacagtgcaggtcgggcaggaaacgccgacgatggaggaaaggacaaggaccggaagctcgcctaaggctgaaactgcatactgggaacctgtcacaaagaaggtataggttccgctggatgtctgtttatagctcgtcacttccttgtatccgatccccgcaaatgctgtctggttgttgaaggtccgcacatcgtagctggatcccgcgtaggacatgttcgctacacggagacagccgtaacctgccggaacgttcgtgcagcccatgtcggaaacacgggtcagggacactccggaaaccgtgtctaagatcaccatcgtgagtctctcaccggacacaaaggcaatcgtctgctgataatagatctgaccgttggtcctgcgcacagtgacggtgtggaatccgtccgtcacgcggatataagaagaaatcgtggcaaattcagaaccggaaaagatattccggccatcgatatagacatccagagttcggcctgatgtgctggcatttaaaaaccggactctgctgtagtaatttcctcctgagaccgtcggatatgtgaccggaaaagaaatcgttggaaagcccgggcgtccgatggtattgtcgggatagacagggcgtccgccagacggcgcgaccggtgtcgttgggattccagcgagatcgtcatccccaggataaacaggtcttccgcccggtgaagcgatgggcggcacagggattcccgcaagatcatcgtctcccggataaacaaaaactcctcctaatggctcggccggtgtctccggtacatttgcgtcattcttccctgctacgacctccgccgtattctctcccgacggttccggcattgatgttggattctctggcatattaacacctcaatatcttttttactacaaaatatgaaagcagaacggaaaatgttccctgcacgtgtttgaacgcagataagcattcccccgcttcaagtgcgcggagcactaaccgctttaccctccatgagctttccgaggaattgatctttttgtatgaaaaatttattcaattttttttgtttttatcgttgacaaacctgttgatccatgatactatattggaggttcgaaaaacacagtaaatgtgttcgctgccttggctcagctggtagagcgtcgccttggtaaggcggaggtcggcagttcaaatctgctaggcagcttaaaccatgaggctttccggaatatccgggaagccttttttcgcgttacaggaaattcctgttacgaaaaagacgtgaacgcgacaatgatgctcactcactcaggacgaccgggctgaccggaacaaatgtttattatgaaggaaatcctcctcgaataaaaaaggcctgcggaactcctctccgcaggtctttttatcataagcaaaaatataaattctatgccttcgccagtctctgtctcacgatctcatacgctagtacacctgtcgcaacggacgcgttcagggaatcgatatcacccttcattgggatcgacgcgatcatgtcgcatttttccttcacaagacggctcacgccctctccctcatttccaatcacaagaccgatcggaccggtgaggtttaagcggtacatgctctctccgcccatatcggcgcagacgaaccagatcccgcgcttcttcagatcctcgatcgtcgccgccatattggtgacctttgcgaccggcgtatagtttaacgcacctgcggaggttctcgccaccgtcgcagtaagtcccaccgcgcggcgtttcggaatgatcactccgtgagcgcccgcaaggttcgcggtacggatgatcgctccaaggttgtgcggatcctcgatcccgtcaagcaggaataaaaacggcggctcgcctttttcttccgcgatctttaagatgtcctccacctccgcatactcatatgcagctgcataggccatcactccctggtggtgtccggtctccgacatcgaatccagacgttccttcgggacaaaatttacgatcgtatcatgctttttcgcctctctcacgatcgtgcgcaccggaccgtcctggcagccgtcaaggacaaacaggcggtcgatcgtctttccggagcggaatgcctccaaaacggcgttccgtccttcaatcgtcagctcttcatatctcatcggatttctcctcttctgttttttctgtatcttccggcgcggcttttccggtcttcttcatcgcaagggcgacaagatcgaccatccgctccgtctttccggacaggtaaaggtatcccatcagcgcctcaaatccggtcgccatccggtaatccttcatcgtcgcattcttcgccatggaaaaggattttgcatttcttccccgcttataaacggcatgttcctcctccgtgaggtcttcctcgatcgccatcaggaattccgcctgtgcggcagcctttacgagagccgaagattttttgtgcagcttattgacctgcatatttccctcgctcacaacgatcgtccggatcaggatctcatacactgcatctccgagataggcgaggaccagtggggaatactggttcgcgtccgtctctttcaagtgaaatttttcctttaagaggattaagctctcttccattttacgccctctcttgtgtcctcgagaacgattcccatgtcgagaagctttcctctgatctcatctgcaagtgcaaagttctttgcctttctcgccgcctgtctctgggcgatcaggtcctccacctcggagtcaagaacctctttcttcttctccgtgatgattcccatcacatcgcagagtctctggatttcattcttcatccaggaaacatatgcctttgtgctcgtctcggatactgtagagttggagagcttgataagttcgaagatcgcggagatcgcgtctgcggtgttgaaatcatcatccatcgccgcctcatactttgcaacgagctccattgcctttttccggttctcctgctcttccgctgtcatcgcgtctccggatacctttgcctccatctcgcggagtttctccattccggttaagatcctctcaaggccgttcttggaagcttccatcagatctgcgctgaagtttaacgggcttctgtagtgggcgctcagcataaagaaacggagtacctggagatcatatttctcgctgatctcgcggacagtgaagaagtttccgagagatttggacattttcttattgtcgatatttaagaatgcgttgtgcatccagtatttcgcgaacggctttccgtttgccgcctcactctgggcgatctcgttctcatggtgcgggaagatcaggtcctcgccgcccgcatggatatcgatctcatcaccgaggtatctctttgccataacggagcactcgatatgccagcccggacggccttcgcaccacggggactcccagtacggctcaccttcttttttcggcttccagagaacaaagtcgttcgggtcctgttttccttcctcaccggttaccttaatctcacggaaaccagactgaagatcatccaggttcttgtgggacagctttccgtaatctttaaacttgcggacactgtaataaactgttccgtccgcagcaacatacgcgtagcctttctcgatcagagtgctgatcatgtttaacatgccgcagatttcttccgtcgcgagcggattctttgtcgccggctcaatattcatgccttccatgtcttttttgcactctgcgatgtagcgtttggagatcgtctcggcgtctacgccttcctcgatcgctttcttgatgatcttgtcatcgacatcggtaaagttggatacataattgacatcgtatcctttatattcgaagtaacgtctcaccgtatcaaatacaatcatcggtcttgcgtttccgatgtggataaagttgtacacggtcggtccgcatacatacatttttacttttcccggctcgaccggaacaaactcttcttttctctttgtgagtgtattgtagatcttcataccttagctccttcatctatctttctgtctgcgagtctcttttcatccctgctgtttacagcccggacagcctccgcagccgccggagatcactccgacgcggtcctccggcgcgtaatccgcaaccgaactcaaaagcgcgatcgcctgggcggagattccttccccggtcccggtaaatccaagaccttcctccgtcgtcgctttcacgctcacctgatcaggctcgattcccagcgcatccgcgatatttttcgccatctgtggacggtacggcagaagttttggtctctgcgcgatcaccgtggaatcgatattctcgatcagatatccgttttcctgcaggatctttccgacatcttttaaaagttcaacgctcgagatccctttatatctttcatctgaatccgggaagtgctgaccgatatctccgagagccgcagcccctaaaagcgcatccatcaccgcgtgaagaaggacatccgcatccgaatgtcctaaaagtcccttttcatacgggatctccacaccgccgaggatcagctttctcccttctaccagacgatgtacatcatatccctgtccgattctcatgagaatctcctttccatagctgttcatcttcttccgtttatgggcagtccaagaccggccccgataccacctcaagaaccgatcatccgcatccgcttcgggatacagcgcaccacgagattctgctggcacatacaactctcaccgtccatatggaccgcgagcggtcttgccagatggacttccgcctcgttgcactcaaagacccggatcccacgttcttttttccggacccccatcacaaggtcccggaggatcgggatcatttttgtctttctcgcgctgtttccgatataaaccgtcatcttaccatcatcattcatcagttcgctgttcttccgtttcttcttgtcttccctgcggaccataaacgtaatgaaatatatatgattaaactccactttctgcgtcccgtcaagcaaaatatatccttttgtcggttttgcgagaaaaagctgcttgagaccaaggccgaatctgagtattttcgtcagatgaagtctcgtcatttggttcctcaccgggcagcacagaagattatggcagatcgccgcgtccagtccgatcccgcaccggcccgcaaaccgcctgctcacgatctcctcatctccgaatgttgcgacaccatagtccagcatccggtaatatttcggatgaaggatccgttttgcctgacagttgaccttccagaaggattcaaatcccttcgacagcgcattccgaaaacccgccggtacatatccgaatgtcaggagtccccggaaggacacgccattcagcacttcattataagttccttccccgccgacgatcacgatcactttcgcgtcatcccgctcggcagtcagcacttttgcgatctcagccgcgtccccctggtgttctgtaaaaaagacccggtactcccggctgtccatctccagctgatgttccagtcgtttccagatccggtatcctcttccggcaccggcactgggatttacgataaactgatacataacgtcctccgaatcttatatcgttcagaattctgagtgcagccatacacatcctgaccgtgtcagcgccatatggcatacaatatagactatagtatatcacataaccgctaaaaaaaggctaaattttttctaaacttcatgcaagtgcaccgcgggcacgttactgttcgttccttgcgcagacagtaactgattttgccgatgcttcgcattccaaatcagcgaaattcacacacaccactctattgtccggaattttcagttcagaaaattcctgcccgtatacagtagcacggacacatccgcgttgaaacgtaaggaaatagtaaatatctctttcttgtcagacaatatctgtatcgattataataaaaacagatataagaagcaaagatatataattttatgaacccaagttctgaaaggaggtccctgctatgaaaaaaagaatgcatgtcaggctgttcatgttgctgttctatctgatctttacagtcacagcacttccgatcaccgcgaaagctgatatgggtccaaagccctcggtgcgcatccagttcaaaaatatgggcgatgacctgtgctacggcacactgctttcaagggagaagcatgcaggacctgcgcgagtctgggacggcaccgccagactcgcgcagctctatgatcttgaccggagcatatggaaagcttttgtagattacaaagattctgacggatattatttcctgcagaggggctggacggtaagcgaaacaggcgagatcgcgtggacctattatccacctgagaattttaagatcctcctttattatccggaaaccgagacctttgtttcaagcgaaagctatgaacgttatgcatttgatacctattacaccgttgacatggaaggcgtccggatcggatccgtggaatacaatgagaacctgagcacaaacgagcggatcaacgcatatcgctcatataattatcgaaaggaacttttatcgctcgcggtccgtattcttcttacgatcgcaattgaaatggccgtcgcgctgttattcggcttccggcagaaaaagcagctgcagatccttgcgcttgtaaatatcacgacacagcttctcttaaatctgcttctcaatatcattcattacaatgccggtccgttggcctttatcacaagctatgtcttttttgaggtcatagtctttgtgctggaggcaggtctgtattgcaggcttctgaagaaagtgtccgaaagaaaggagaactggtactacgtcctctattcatttgtcgcaaattcagcatcgttctgggtcggatattatcttgcaacagtattaccgggaatcttttaagtgaaaatccaggcaccggcagagccttccatatgtttgcgagagtattgcagatgttcttttctgtttggtacaacagaatatttcagaaaaattattataatcgaaaaaatcccgggaatctgtgaagactcccgggattttcaatcgtagcggaagggagatttgaactctcgacaccacgggtatgaaccgtgtgctctagccaactgagctattccgccatagtagcggaagggagatttgaactctcgacaccacgggtatgaaccgtgtgctctagccaactgagctattcc

SEQ ID NO: 2077 - DNA, 23126 bp, Unknown
  gut microbiota DNA sequence
cttccggctgacgtttccgtcaagcgcgattgcttgtacagtttaacctattttttcggaattgtcaacagtttttttaaattttttgtgatgatatttttccttttctatactacacgatttttaaaaaagactgacatcttctttttttctcttgcattcccgatacatcttgttatatagtataatatataggaaaccagtttatggattccaatattatgaaacctgcacaggagggattatcattatgccaagaggaagaaagaaaactgaagttgctccgcaggatcttttaaacgaggtcctcacttccattgaagagacagagcagaaattaaaaacattaaaagcgcagaaaaaggacatcgaaaaacagatcgaagctaaagagatggctgaattatacgcgatcgtgaaagagaaaaacatgtcgatcgaagatgtaaaaacgaaactcggcgcagaataagttttgcacttctgcctgaacataaaaggaagatccacatttcccagatatcagggatgcggatcttccttttttattctattttacctgtttcgcgaaaccagcagtcccacgcagatctcagtcaggtcccgatcattctaattcttttaagatcgactccccgatcatattttccgcctttttcaatccgaaattatcaatcacggtcgcaccgatcacaccgaaggtcttctgttcctcaaacaggcctgtctgtttcatcgacggggagtacgcaaggaacgggactttctctcttgtgtggtctgttcccgtataggtcggatcatttccgtggtctgccgtgatcatcaggagatcgtcctcccgcagattctttaacagttccccgagcttcacatcaaagcgctccagttcttccccataacccaccggatttctcctgtggccccagagggcatcgaaatccacgagatttacaaagcagagtcccttgaaatcctgatctttgcagatctcgatcgtctgttccattccatggacggagctcttggaacggaatgcctccgtaatgccctggccgtcaaagatatcgcggatcttgccgacggagatcacatcgtatccattgtcctttaagatatcgagcgccgttgtcccggtcggctttaacgcataatcgtggcggttgctggtgcggacaaattcgcctttcttctttccgacataaggtctcgcgatgacgcggcccacgcgccactcttccttcatcgtgatctctctggcgatctcgcagcagcgatacagctcgtcaagcccgaatgtctcctcatttccgcagatctgaaggacggaatcggcagatgtatacacgatcatgtgaccggtagcgatctcctcctctcccagctcatccaggatcgcagttccgctggcgctcttgtttccgatcaccttgtgcccggtacgtttttccagctcctcgatcagttctttcgggaatccatgatccgtgaacgtcttaaaaggcttcgtcgtgtagatccccatcatctcccagtggccggtcatcgtatctttgccgttgctcgcctccgagaattttgtgaaccgtcccatcggcgcctccaccgggtccacgccctttaacggtcttaagtttgcgatcccgagtttctgaagatttgggatattgaaatgttccatatgttccgcgatgtgtccgagagtgtccactcccacatctccaaatttttcagaatccggcattgcaccggttccgagagaatcaattacgatcgtaaagatccgattatatttcggcatctaaatctacccctttctttgcctgttctacaagtctgcttgttccgaggcggtcagcccccagacggacaaactccgccgcatcgcaaaagtctgcgataccgccggccgccttgatcttcttttctgcggccatgtgagccttcatgagcgccacatccggctttgtcgcccctgcggtggaaaatcctgtggatgtcttgataaagtccgcgtctgaggctgatacagtctcacacatctttatcttctcctcctctgtgaggagacatgtctcgatgatgactttcaggatatgatcgccgcagacttctttcagagcgttgatctcttccaggatcttatcgtactgtcccattttgacccagccgatattgatcaccatatcgatctcctccgccccgtcctttaacgcctctttcgtctcaaacactttgaccgccgtcgtgttgtacccgttcggaaatccgatcacggtacagaccggcatcttctctccgaggtactccgaagcctgctttacgaaagacggcgggatgcaaaccgacgcggtcccgaatttcaccgcatcatcgcagatctcccggatctgttcccaggtggacggctgctttaataatgtatggtccactctctttaaaacatctctgtatgtcatttttcttatcgttcctttccacttcttttccggcggctcaaatttccagcgctttccctgtaaatccgagcggaagaagctccttcaaaaggtattcccggatctcgcccgcgccattcatgaggatgatccggaatgtctccggatcgcagaattccgccatcacctggcggcagacaccgcagggcgcgcagaagttttccggttcttttccttttggacctccgacgatggcgatcgcccggaattctgtttttccttcactgaccgccttaaagatcgccgtgcgctccgcacagtttgtcgccgggtacgccgcattttcaatattgcagccggtaaataccctgtcatccacgcagaggagcgccgctccgacggcaaaaccggagtacgggcagtacgcctgttttctggctttcaatgcttccataaccagccctctattttccatgaatttcctcccttccggtccgaaaatccgaatattctatgttctcttaccataccataaacacggagcaatgtcaaagcagcttccggcacccccggacattccccgcccaggaaattcctgcccgcggaacactttctgacacctttcttacgtttcgataaaaatttattcatgggggttgaaaccgcaaaaccaaagtgctataatgtggcagcataaaggaaatatgacaaaattgttacagaacataaattcagaaaataaaggaggtcatcctttgaaaaagctgataaaaaaatacggacatatatggatgttatcctacgcattcatctatcttccctggttctcaagactccaggaaaatgtgaacaaaccttaccacgtcatgcacacggtgctcgacgatctaatcccgttcaacgaatattttatcgtcccttacctgatgtggtttttatacgttgccgcgaccatcgcgtttttcttctttaaaaaccgtgatgactattacaggctctgcactttcctcttcacaggaatgacgatcagtcttctcgtctgcaccctgttcccaaacggaacagatttccgtccggcgatcgatccggataagaacatcttctgttatctggtatcgagactctggagcatcgatccatgtatcaacgttttcccgagcatccacgtttacaactccgtgggtgttcacatcgcgatctgccacagcgaggaattaaagaaacacccgatgatcgtccgggcatccggcgttctgatggttttgatctgcctcgcaacgatgttcttaaaacagcactccgtgatcgatgttgtcggtgcactcttaatggcatccgttatctatccgatcgcttatgcgccggaggcggagaagaagaaaaaatacgagacgagcttttaaaataaggattcagaaatatttgcaggacagcttttcagctgtcctattttttcgcgcgaagatgaagatcgtcgcaggcgaccgcgctcggcgcgagaatgttccaagacacattcggtcctctcccctctgcctcccgggtctaacttcatcttcacgcaagtgtccggttccggcctgccagtgttttttatccagaatttttactgctatagaaaacagccgccctcctgcacgcacatgcgcgcaaaaaggcggctgtcttacgatcgtctttcttatattttaatccagctctacttccggtacccggtcgcaaaatccaccacattccggtacggtgtcccgttcgcccacgccgcgagattctctcccgcgatccttacgatccgctcaaatgtctccggaaggaagaagtttccggccacatgaggcgtgatcacgaggtttccgagatcccagagcggactgtccgccggaagcggttccggctccgtcacatcgagtccgcagccgccgagatgtccctcttttaagaccttgtaaagtccctccgggtcaacggcatttccgcggccaacgttgatcaggtacgcgccctttttcatcaggcgcagtcttctctcgtccatgatgtggtttgtagcgtctccgcccgggagcaccatcgcaacgatatctgctcttccgagaagctcgtccagatcgtccatcgtatgctgctcatccagataatccggtttattccggttcgtgcggcggacaccgatcacatgagcgccgagtgcatggcactttcttgcgtaatccccgccgatatctccgagtccgagcacgaggatcgtcgaaccttctacagaggtaatatttcccatggactgccatacgtgctttgcctggttcgcgtggtactggttaaagcggcggatcaggtcaaaagtcagcgccagcatatgttccgatacggcaagcccgtaagcgcccgttgcatttgcgaacaccgcctgttccggaaggatccccggtttgatgtactggtctgcaccggcagagtttaactggaacagttccagatttttcgcctcttttacaagagccggatcgacatttccgatgatcacgtttgcctcttttacatcctctgccgtgacatcgctgccgttcacatagcggacgcagcagtttttgttgccagatgcagctttctcttccagaaactttttatgatcctcatttaccgggatcaccacaaggatatttttctctagatccgccatgtataatcctccccgatcggtcttgtcacctcttttaaccactcattctcctccgccgtcataaacggtgaaagtttctcgtagaccgctttatggtactcatttaagtttctcacatcggacggctccatcacggaaatatccaccgcgtcgaggtcgatcggcgcgaaagtcatgttctcaaagcacatgaactgaccgtactcgttcttttccgcttttctgcacatcgtcaggttctcggtacggatgccgtggcttccctcaatataaagtcccggctcgtccgaagtcagcattccctcttccaggacgcaggagtcctggcgctccggaacgatgcgccagcggatgccgttcgggcgctcatgaaccgcagacagaaagccgacgccgtgaccggtgccatggttgaagtcgagtccgcgctcccagagcggtcctcttgccagatagtccacattgagtccgcggcagccatataagaattttgcatgcatcaggcgcagcattcccatcatgacaagtgtgaaatgaaccttcatctcgtccgtgacatggccgatcgcgatcgttctcgtcacatccgtggttccctcataatactgtccgccggagtcaacaagatagaatccgtctgttccgaccgggctctcctgctcctttgtcgcgtggtaatggcacatcgcggcgttggatccgaatgcggagatcgtcgtgaagctcggtccgagataaccttcctgggctttccggtaatcctcaagacgctctgcagcttccgtctccgtgagagcgacctttccggcgtttttcttcatccagtacaggaattttgtcagggcaacgccgtcctttaaatgagctttgcggaggttttccatctccaccgggttcttcaccgccttcatgagggaagtcgggttcatggcctccacaatgcggttggatgcgtcgatcttcttatagagagcaaagtttaccttctccggttccaggagaaccgtctcattcttcagttccgccactgcatcatagatcgcatcatacttttcgatcgtcacatgattcttttcaaaataagcgcgcagctccggagagaatttacggctggcgataaagagtctcgcctcgtcctccgtgatcagggcaaacgccggtgcgagcacatttccgtcatccgaatttttgcggatattgaagagccatgcgatatcgtcaagacttgataagatgtggacagacgcattcttttcatccatctcggatctgaggcggatcagtttttccgtcacagtctcacctgcatatttcacatcgagagtccagacctccggtgccggaaggatcgggcgttcttcccatacttccccggcaaggtcatcccccacggagagagtcgcgtgtttcttcgccatcatcgcctcaaattttcttccctgggctgcattgaccacgcggccgtcaaagcctaaaactccgccttccggcatatggtccgtcaggtattcctcaatcgtcggaacgccttcctctcccatcgccatcagacgtgtgtcctgaccttccagttctctctttgcctgaacgaaatatcttccgtccgtccacatgccggaaaagctctgtgtgatcaccatggttcccgcggaacccgtgaagccggacagaaatgcgcggcatttgaaatagtcctccacgtactcggaatcatggaagtcagaggacggaacatagtatgcgtccacatgtctcactttcatcagggtcctgagttccctcaaacgttcattagccattgtttacctccataagcgaagaacagttaccgcacgcatgtttttgcggaccgtaactgttcttctgatatattcatgccggccggcttgcgccgccgggttgttctcaatataactttgtgcagatccatatctgctgtgtgtatgctccggaacgccttccttacaggagcgggattcccgcctttgctgcctcggcgcgcacctcatccggccataaagaagactggatctcgccgatatgcgcctttctcaggaagaacatacagatacgggactgtccgataccgccgccgatggtgtacgggagctcgccgtttaataatgctttctggaatgcgagtttctcgcgctccacgcatcctgctgccactaactgctcatgcagggatttctcgtcgacacgtatacccatggagctcaactccagtgcgatgtcgagaaccggatagtagacgatgatatcaccgtttaatttccagtcatcgtagtcaggagcacggccgtcatgcggctttccggattttaagtttccgccgatctgctcgataaagacagcgccgtgaagcttcacgatctcgtactctctctgcttcggagtcaggtccggatagcggtcctcgagttcctgggatgtgataaattcaatgtgctccggaagaacacggccgatataatcgtactcataagccatgtagtcctccgtgatctttaacgccttatatacggcgcggacggtctcctcgagagtctcgcgggtccgttcctccttcgtgatcactttctcccagtcccactggtccacgtagatggagtggatattatcggtatcctcgtcgcggcggatcgcgttcatatcggtatataaaccttcgcccggctcaaagccgtactgctttaacgcgtaacgtttccatttcgcgagggaatggacgatctccgcctgtctcccgccttccttgatgtcgaacgcgaccgggcgctccacaccgtttaagttatcattcagtccggattccggcgttacaaataacggcgcggaaacacgggtcagatttaactgctttgtcagttccttctggaaaaagtcttttacgatcttgatcgcaacctgggtctctttcaggttgatatccggagtataaccggctggtacaataaaattcattgtggtgctcacctttctatgcagcagcgtgtcttctgtatgttcgtctctggtcctgctgctgttatccatcatatcatcatttgggggaaaatggaagaaaaaagtgttcgttataatttttcattcgttcacacttttttccaaaaaacatggtaaaatgtttccagtatcattctgtctccgggaatcaccggacaggcagattgctaccaaagacactgtaaaggggatacatctatgaaacttgcgatcgttgacgacttaaagacggattccgaccgtcttgccggcttcgttcatacatatatggagcagcatcagcttaaactcgatgcattggatcagtttgaaagcggagagtcctttttaagcggctttacctccggctcctacgatcttatctttctcgacatctatatgaccgggatcaccggcatggagactgccaaaaagatccggcagatcgatcacgactgccgcctcatcttcatcacgacctccccggaatttgccgtggaaagctacgatgtgaacgccgtcttttaccttttaaagccgatccgtcaggaacaggtctttaccgctcttgaccgctgcgccctgcgtgcccgggaagacagcaggaccatcgatgttccgactgccctcggaacaatgcctctcccgctccacaaaatttcctacacagagcatgtaaaccgccagattcttgtccacttcaaagacggaaggcagatggaagtcccaatgaaccagaaaagcttctccgccctccttctcgagtatccgtggttctgcgactgtatcaaaggtatgctcgtaaactttgaggatgtggacaaacttctggatgaccgctttctcttaaaaagcggagtctatattccgatcagccgtttaaaatacaaagacgtgcgggaacaatttctcgaatattcctattccgcagtcagaggaggttcctatggcggagctgctttttaatgaatttttctgtacctatccgtttcatatttttgcctatctgccgtttcactccacactccggatctccggcagaaagatcctcctggtttcggtcatggcggaactgctctacctgaccgttttcgcgctcttagtcagcgccggtctcccggctgtctacgtccagtacacagcgatccctgttttcgggatcttcctctattccctcgtaaaagcaaatgtcgggatcatcaccttccagtatatcttcgtcatcgactatctgatggtgatccgtgcctgcgccttcttcgtctgccagacatttttccactgcggattcttctcctggcagtccgggctcatcacattcgttctcgtgctcctgaccgcctggttcatgatgaagcgcctgatggagatcattgacagcctgtccacgatccaggctccggccctctggaagaccgcatggctcctccccttctccgcgaccatgatcatctttctcctgaccggcagcatccggagcggaagcttcacacaggccgcccttatggcgaggatcctcatgctcctctgcatgtttctcatcagccatacactgatcctgctcctccgcttcttcaaagaacaggcagaagcagccgtcaagaccgaatccatggaaaaactcctcgagatccaatccgaccagtacaacctcctcacagccaggatccgcgacaacagcagagcccggcacgacttccgccagcacctcgccgtcatcaaagactgcgcagaccgcggagatctcgcctccctgcaggcatacttaaaagactacgaatccatgttcccggtccaggatgtccgccgctactgcaaaaactacgcagtcaacgcgatcctctccttctacgcagaaaaagccgaaaaaaccgggatcaccacccagttccagatccagatgggagaaccactcctgatcccggaaacagaattctgcgtcctgatcggaaacctcctcgaaaacgccgtcgatgcctgcgcagacatagatgatgacatccagccctttatccgtctccacgtctgccagaccagctcctccatgctctcgatcacagccgacaacacaagcacatccggcccgacctggtccggcaaccgcctcctctccaccaaacacaccggctacggcataggaaccgaatccatccgcatgatcgcagaacgctaccacggcgacgccagattctcatggaaagacggcatattctacgcctccgtgatgctgaacccgtaacatagttaccctttccacattccgctccccccgacacatctatctcccgcaaaaaacagcaatgccagcggcgagcgtcccactcccagcgatgcctccggcgcgcgtcccactcccagcaatgccagcggcgagcgtccggccgggagtgccttgatccggggagctggttcctcttagctcgcgggtgactgcgttggacaaccgatgacacttgtctgagcgcagcgagttgtgtcatcggttgtccgcccttagcagtcacacgggagcttagcggaaccctccccgcatcccgggcacacccggccggacactcgccgcgtacccccgccaaccaccccaaaccgccaaagccccaaaaccccaaaaaaagcggaacagaccactcaaaaaaatgatctgtcccgctttccttctattcatctttccccaaaagatatcccaaagccccttcgctcctacatccccggcacatacaccccactctcattcacatacatcccatccggcgtcctccggctcttatacatctctccactcaccggatccagataataagacttattgtacaacgtgatccatcccgtcgccatatacccgtcctcctggaaataataccactttccattgatatacagccacttcgccgccggccacgtcccgtcaccgtagtcccaccaccatcttccgtccgcactctgcttccaggaaccggaggcatatgatccgatctccccggaacgcacccaggcactcttcgtattgttcgaagacttcaccgcacggacctcaaaactgtaggagcccgtcgttcccatcagtctcgaaaaatcataggacgtcccatagatcgtaaactcatcccctgtgagacttccatccttcaaaagccggagctggtaatacttcgccccgctgaccgcctgccatgttcccgtcccgtacgcattcggggaccaggcagcacctgccggcgccttgatagtgctcgtcgttgaagaggttgtcttcttatcgagcgtcagacggaatgtcagatcaagcgtgctcctgtcatccctcttcaccgccttcacatactccgcctttccataacccgatttcgcggagtccgaaagcgtgagccggaaatccttcgacgccgtcccggaaaaataataagaatcctcatccgcgaccgataacgtcaccgtgaccttcggaggattggactccgtatagccgtttccgtcattgttttcgatgtagatggaatccacataataacggtccgtattatcgccgtacggcgtcactgtgacgtcctcagagtcatcctttaagcccaccgtaccgtcgatcgtcagatagatcttcccaaccgccgtcttatccgcagcaaaagccggaactactgccgcagcagcaaagactgccgcaagaaaaaaaccgacggctttctttccgaatctcttcatatcctttttcttctccttcccggaaatttttctcccatatgttaatatgtgcagaaaaacggttccggagtacggggtctccccctgctccggcacagggcaaaataaatttgccgcacgtcctcctgcacagatctgtcacatatcctttatttacctgttcttaaaaatctcaacgatcgccttccacatctggacgagcatgttccacattctctgaagcgggttgaccgctgccttctctgtctccgcatcgagaagctccgcatcgtcatccacgctgatctcctccgtgcgcatgatgatctgcagagtattcggctccgcgttctcatcagaagtaaaagaaaccttctccgcgttcggatccatgtttaagaagttagtgtcgtcctcaaggtcattccactcattgtccatcgtatccttcatggtgcgtccggcttttctcatggagctggtgctgtcgagaacattcaggctcttgttcaggacattcagacttcccttgatggaatccttcgccgccgcatcaaggctgtcagagctcgcacggaccgtattctgtacaagtgtcagagagttcgtgctgttattcagcgcatccgttgtacggttcacaagctctttggaatcatccagtgcagactgaagatccggataatagacgtccagggaatcctttaaagccttcgtatcctcgatcagataatccatctgatccgtcgtctgcgcaaggtatctcgcgacattcgacacatcatccagcatattcgatgtgtcggaaaccagcgcattgctggaggaagcaacctggcggagcgctttctccttctgttttaagatcccgatcagctcctgggcattcagcagaccggcgtgaccggcggaagtatctgctcccgcagccgcctcggcaagtgcctgttcatccgcatcccctgcctcaacatcataataatccgcgatcgcatcctccatggatgcctgggatgatgcaagatttttgataaagtccacgatactcttctggagctgtgtgtccagctttttgatctgctggactgctgataccacgtcatcaacgctcacagatgcacttccggagctgctctttaaaccgcgaagactcgtatcaagcttccggagcggttcctgcatatttccgagcgtattgacaacatccgtcagactgctgtgggcaacctcggaggcatccttcgccgtctggatatacgggatgatcgttccgagctgctcggaaagggcatttaaggatgcaagtgcctggtcattgctgtccaggatctcatctttggaaccgctgatgatgcctctcgcattctccgcctcgtttaatccctgtttcagctcgttgacgccgcttctcatgctctccaaagaagctgccagctgatccatgctgtcatataactggtctccggcacctttccaggtgtccttcgcatcctttaagtccacgatatgctcaaggtctttcacagttcccgggaccatcgccatgatgacgccggatgtctcgaatttgtcagagccgatccggattgtatagtcgccgtcctcgcccggaagcgccgtatacatgatcgcggtctgggaaccgagactctgcgtctgcgcgccttccgcctcgacactgtagcatttgctcatatcgacgagcatcgcgacaacgagcagcatattgttcttataataatctctcgccgcatcgttcggtttcgcggtcacatggacctccacgagtccggaagctccggcgagcttctctgcatccgtcgggactccgtttaatttgtaggagacatccatcgtccacggaagtgtcaccgtgtccttgtcgatcgctcctttatagtaaaaatatccctttgtgtcggccgggagattccaggtaacttttccgtctccgatctccggggccgtattgttggtcatatttgtgacatcgagataatttccatagtccgtgaagctcgtgagtccgtttaagctcactcctttcacaacattcactttatctacagaaccatagtaatccaggttcacgtacatcgcttcatcgacgctcacagacgcctccgccgcatagaccggcgtggaaacaaggctggtgcagagcgtgacagctgccattcccgctgccatgatctttctatttttctgtctcatcaccgttctcctccattccttctctatctgtcatctccggctccctgcctgccgccgcttcgttctcgtcgtcctcgtagggatctccgccttcctctgtatcttcttctccgtcatcaccgttctttgtcagacgtctcttctctctccggttcttcgcccggcggtgaagacgtttcgcaagcgccgctgccggcttctccccgacgataaagttgtcaaacaaggtcaggagcagcggaagcactgtcagtaccaatacaaggctgaacagtccgcctcgtccgatcaggtgaccaaggtcggcgatcgccgttgtggacgagatcatgtatacaatgtaaccggccagcgtgatgatggaaccggatgtaaagatcgaggaacaggacgccgcgatcgcttccacgcaggcttttttcttcgggagcgtctttctcttcgccaggtagttgtttgctaagaggatcgagtaatcgaccgtcgcacccagctggatactgctgacgatgatgtagcccatgtataccatctcaacgccctggaaatacggcatcgccatgttgatgaagatcgccacctcgatcgggatgatgacgaggatcggcatgacagccgatttaaaactcatcatgacgacgaggaatacgcccgcaagggacagcacatttacattctcatagtccttgacgatgaaggacttgatatcctgggtcgacggcgtctcaccgacgagatagctgccatccggataatatttctttacgatctcctggatcgcatcggaatccttgaatgcctccgcactctccgtctttgttcttgtgtagatcagcatccggcagtagccgcctttatgtaagagttccaccgtggacttcggaaggaactcttccggaatcccctccggcagcgtgtctgccagggccgtcacgctctttacataggagagatccttgatctccttcgccatcgcccgctcattgacctccgaagtgttcggatacagggcgagcagcatgttgcttcgtccgaagatcttcgtgatctcctgatcatcctcatagacctgggttccttccgatgcgcccatggaatcatttccgtagaggaagtcgtttaatccctgcgccgtgtaggcaagcggcgtcacaaggacgatcactgcgaacacgatcgggcggatccggtagatcacctttccaaggccgtggaaatccggcatgaaggaacggtgtttcgtcttctcattgagcttcgcaaacttcaggatcattgcaggcatgaagaatacgacggtcagaaggctgaacacgatacctttcgcaaggacgaggcctaagtcaaagccgatcgagaacttcatcgttacaagggcaaggaagccgacgactgtcgtcaggctgctggcgaagatcgagttgatcgcctcctgaacggcattgatgatcgcgtcctcctcattcattccctgtttgcggtaattcatgaacgcatcgagcaggaagatcgagtagtccatggacgtcgccagctgcaatatgatcgagacgttttccgtcaggaacgagaccgttccgataaaaatgttcgttcctttgtttaagaggaccgcaacacccataaccagcaggaataatatcggttccgtccatgccgtcgtcgtcacggaaagcactgcaaagatcatgacaacggccaccacgaggatcttgctcatctcgctcgccatggactcggtcatggatttgttctggaccgccattccgacataacagcctttgtcgccgagaagattcttcatctcattgatcgcgttggaagtccggctggaatcgctctcctcgacaaacgtgatatcgaagactgcgtttctgtccttatagtaatccttgatgtcgctctcattgatgaaatcttccccggcgtagatgttgacggaactgtcgcaccacagcacctggtccacgccgtcgatctcggcgatctcatctttatattgcttcgcctcatatagtgagacatccttcaccataacccgcgcagttcccggataaccgaacttgtcacgcatgacgtcaagtccgatcgccgattccgccgtgtccggaaggtattttgtcagatcgtagtttacattgacgaaattcatcgtcaaaagtgataagagacagccgatcacaaagactgtctcgatccacacgcgtttatggatgatgaacgacgcaagcatataggaaaaaccgccgctctggctctttttcttctccttatgcccgcggagcgcgttctttaacttctctcccatgtcctctctccttcaattttgaaatgcagccggtcctgcaccgcggatctggcgcgggactgcccggtcatttcttttttcttaccgctccagaactaccatatagtagtcttttccgtctctgatttcatgggcgattcccattctgcggtagtattccagagaatattttttatcattcttcctgtccgccttttcctgcatccgggtcatgacagaatcatacggatcgtacgtctcctccggtccccagaggtacatctcaaaaaatgtcgcactctttctctccggaagtacgttctttatgtaatcgctcaccgttccctcgcccgggatcgtatttctgctcttcgaatatcccttctccattgagagagagagccgtttctctgcgatttcatttaacgtctggtccaggacaaagctcgcctgcccatcgtaaaactctacatccccgttgtcatagtcgtcctcggcatccggataagcatcaaaaaacaggtcgctcttctcatcattcatctcatcaaagagttcctgttccttctgatccagcatatcaacagggtacgctccgccccgcgtgttcggatttttcctcgcataggagaagatcccgtcctttgtgaacgtgtagcatgtattttcatcctcgataaaatctgtgctccaggcaccgtttcccataaggtagtaccaatttccggaaatctgattccaacccggcttcgctccgagcgtctccggaactgccgcataggcagggatcccggacattccggtcatcacgcagaggattgctgccattcttcgtacatctttctttctgatcatccgatcgcctccgcttttcctctcctgctccatctgcctttctttctcgcatactctgcagcaggatcttttttatttcattccttttacttgcaatattatctatgtttatgttaaaatactcaagaaccagttttcaaaaattgtgccaaatgagacaatttgagtgtttttgtccaatttggaatggataaaggagttttgtgctttatgttaaagctgcctatacaggaagagcatgtctctgtccgcagaacctacctgcttttgatgaaagcgcttctggatctgctggcggaaatgccgtttgaaaagatttccctgacggatatctgccgggtatccatggtctcccgctctaccttctaccggtattttgaggataagtacgatctgctccactactgcatcaaaatgtatattgagggacttcgtccggtggaggaccttttatatttcaggaacatgaactccctgcggatctttttgacgttcctgctctcacaggcgcaggaaaaccttgcccagtaccagaagatctaccagataaataaaaacgggtccctgatgttcctgatccagcatgatctcgctgaaatcctggctgagagcggatggcacggggaaagtaaagggtaccgcctgaagatcgcaatgccgctctatgtttcgtttatgtcaagtttttacctcacaacgttaaaatcctacctggagctggccgatgactacacgatcgctgattacgtggaaaatgtgtgccggtttgtccagagggatttctgggaggcgaaggaagatgagacatgacaaaatgccgcctgtcaccgttttttaccgggtgaacagacggcattctttctatattttatatattctattttctcttctctgcgtgttcatcccacaccggaacatcgatccccgcaactttcgaggtaaacgcggttccgtcattcttctcgaagtgttcccacgcccgaagcacatatttgaatccgatatactgtaacggaaggttgcagtaaaccatgaggatattcgcaaaatcactgagatcccagagggcactcagatccatgccggcaatatttgtgatgacgccgaaggaaatgacaacaaggcagagcacacggatcgtattgataaatgcaggccgtgtcgagatccggttcgcgcacatctccgtgaaggacataaagcctaccaggcaggtgaacgcaaacaatccgaagcagacgctgacgagcatcgttacaagatgatagatcgttccgtttccggtgagtgcgccgcatgatgtcaggaaacggtcaagtttcccgagttcaaaccatgccgcactgtcctccgtgagccacattcttcccatgacaacgacaaaacctgtcagggtgcagatcacgatcgtgtcgaggaagacgccgagtgcctggacacagccctgatcacacggatggttcgcatctgctgccgctgccggcatcgtgatggttccctgtcctgcctcatttgacatcaagccgcgcttgatgccctggctcaatgcgatgccgaacgctccgccgaagactgcttccggacggaatgcctctgagaagactgcgccgaagaaccacgggatcctcgggatgttaaagacgatgaggaggacaaccgtcaggatatagattactgccatgaccggaactaacaggtctgtgacctttgtgacttttttgatcccgccaaagctgatgatcgccgtcgcaacaatgagaactgcgaaggagatccagtaaagggacgaattcgtctcaatcacggtcccggtaaacacgcccgcgatcgcgccgaccgcagagatcgtgttgaagccctgtgccgggaagcagaggaacgcgtagataatatagaggacactgagcgccgctcctgcccacgctgcattcttcaaaagtcttcttccgtagaatggcaggccgcccacatactcatcatcttttcgctctttaaagatctgggagagcgtcgcctccacgaaagctgtcgacattccgaaaaacgcagagatccacatccagaacagagcgcccggaccgcccgtggagatcgcgccggtgacacccaggatatttccgggaccgacacgcatcgccgtcgacaagaggaatgatgcgagggatgagattcccgttccgctgctcttctgcctcatcaggacatggagtccgtagcggaatttccgcacctggataaaacgcagacggaatgtaaaataaattcccgttccgactaaaagaatgatcgccagactgaaattcccgaggatcgggatcttcgcataccagtcaaagtttgtcggaaaatcccagaacaggtttgagacgatctggatcttcccgcatatggcatttacggcctgaaacaatgcttccatagcttttcctcctcatgatctcttatttgtgtgaatgatcggatcgaacaccccggcattttcacacgccgcagtcgaattcagattatcgtttcacgctgcgaaatttgcgcattgattttcgatattccggattcgtttttgtatatgtttctataatatctctgatatttggtattttcaagaaaaaattgtcatatttcagaaatttgcaaaactcatgttccttccacatttcattccggtatactttcagaaacacacagcgccccataccccaatctcggattcggatactccagctcggacggcagccgtttcgcccctttcctcaggtacgctttcactttctccccataaaggtacgggtcattccctctcacgatcccccactccatgagaagcgccgcggctccggcgacgaggggcgccgcaaaggacgttcctgtgaccgcctcatatccgcctccgctcttcggagccatgatcccgacgcccggcgctgcgagatccggcttctgggcatggtagatcctggtgtccccgcggccggaaaacggggcatagatcccggtccggctgtcgtaggcaccgacagtgagcggacggaacgccgtggacgggatcgtgagcgtcgtctccggcgacggttcgagaaaagccgtattctgaccgagtgcggcggatgacggaagccagagatccacatatgtgtcttcccgcccctttccgagaaaccggaaaatccagattccgctctccacatacgcctgctccggaacgaactcgatgtagatctcctgggcggcattaaacggggacggctccccgtaatagatcagaagctccgtctccccgatccggatccggtccgtcccccgtatcggaagcagttcaaactccgcgtcaccggacggatctctcagaaagatccgcatcccatcctcataatttttccagatctgtactccgaatcccgtttcataattgcccaccgaaaggcggacttccgtgatccttccgggcacgatcaccggtcttgcgtgtcctccggaatccccctcgttccccgctcctgtcacaaatacgaagcgtcccatctgcgccagggaatcgagatacctctccagaagtccgccgccgtcatgcgacccgtatgtatttccgaagcttaagttcaccgccatcggtctccccagctccaatgcctttcgcacagcaagatccatcccgctcatcagctctgtcgtcctcggaaatcctgccggatccgggatcccaaggcggacaacgatcagctcgctctcatatgcggccccgcggtacagcccaccgcttgctctcccgtttccggccgcgatcccagccaccgctgtcccgtgaccactcgtgtcaaacgatggacttccgaaatttcctggtgttttctccccgcggagcagctcatcgatttccgccttttcatatgtcttcccggtgacctgatcgtccagatacaaaattctcgtagttccatcttcattccggaaatcctcgtgaaacagatcgatcccggagtcgatcactgccaccagaacgcctcttcctgtgagtccctcatttccgctctgtgccggaagaaagcacgaggccgctctcgcccggttcagggcaaagaacagcctctttggtttctccgcatattcgatttcccgaagtgcgatcactcgcgggacatcccgctccgggatccggaggatcgcaaaatcatttaaaagatacctccccgaaacagctgggaatttttctctcagcgcagatgcaagatccccgtggtatttcacgatgatctcccaggtccggtccgccctgtcatatccaatattcagctcctttgtccgctctctcgtctcctccggaacggaaagtgccagatttaagagattttcagccttctgatcttccatatccgccgtgccgcatctcctctgtcccctgcctgtttcacaccggcgaaacttacatgccggatcccacatcatcacgatctgacgcagattccatcgcagacagattcactccggatattttatgcggtgactgcggatcctgttccgaacctctatccgaagattacaaacgtctgcatcaagtacatgaacaccgggatcgtcaccatgctgatcacggttgtcacagtgatgacggtacaggcaaactcatagtccctgtcatactcccgcgccatgatccccatctgtgccatcgccggcatcacggtcagcatgaagaatacctctctcatctcctgtgtcaccggcaggagtctgaggaacacaacagcggccgtcggcaccatcacaaacctcatgagcacagccacgatgatgtccttcccgattttgatcgatgacggttccatgttccggatcacacttccgatgaacacaagcgccagcggggatgtaactccgctgatcatggacaacggtttcaggataaaatcagggacttcgatcctgaaaaagactgctgccattccaagaaacattcctacgaccgtcggacaaaacagatttttgatattctgcgcccatctcgcactcttgccgtttttttctccccgctgcagcagactgatccccagcgtccagaagaggactgtgctcgcgatataatagatcgcgccgacggaagtgatcccctctccccagagcgcctggatcacaggaaatccgataaaaacgacattcgggaaacccgctgccacgataaaagtatcccgcctgtcctcccagatgcggcacacctttgccgtcactgccgctaaacagacgcacattaagatcagcgcaaacacatacggcacctttgtgatcaggaacagaaggcgttcccggctgtccaggtctcgatagatattataaaacatatagaacgggagcgtcgcctccaccgtaaatttagaaagaaaatccattccgttttttccgaaccatttctttccggcgaaatagaagcccattccgatcaatatcaacaatgcaaaaatactttttatcgattgtaagaccattcccatccccctgaatccataaaagagtcgtaactgttcagtaccctcacagttacgagcaaaaatccattccagatcggcttcgccgatgggatttttgccttccgtcccatgttttattacggtcagcgcagcaagtgcgcagacctactgaatagttacaaagagtctataaaaaaaagacccccggagccatcagacccgggggcatcgtgcaaatgacacgtttgatcctattattgtgcagttgtaatattcatgacaatgctgtcaagagcacttgcatttttgatccttccgttggtatagatcacaaccatatatccgtcctgtttccggcagtagtaagtgcttgttgttttctttccggttacagatgctttatagtactgctggtttgcgatcgtcacagcagtcgcctgcgttgcctgacctttctgtgctttctcaataccaacaagtgtgtttacaaatgtctgtgcatccatatcctgtttattcttcatatcgag

SEQ ID NO: 2078 - DNA, 3584 bp, Unknown
  gut microbiota DNA sequence
ttatattcgcttccgatatagtcatcaccgacatcttcttttgtctccgttgttccgatgatctgcgggatgcagaggttcgaccaggtattgtaatatcttcctcctgtgatatgtcccttcggagcagttgttctcggcgctacccagcttccatcgtcaccaaatgtataatcaacgccgccaatgtttcttgtggtgttggagaccataatgtgggttgccggatcgatatagtaccatacttcatttccgcgtccgtctccctcttcggatttgatccatccgcttgcgaggtttccgtccttgtcataataacgccagttattttttgcgtcactctcccagccgtactttgtttctccggaagcagtctcatctgcaaatgcagtcaccatatttacactgccgatcgctgcagcgagcgctgccataagcataactttctttaatttcattttcaatccactccttcatgggtttttatcaactaatgccattatacagggatttttttgagaacgcaagcgctaagaactggaagatggcaggatttataaagaattaagaaaaaagcggcaaattttgtcatttctgacatagatttgccgctttttccacttgtttgtatctctgatccctgcatccgatctccgtttccggcagcgatgttccgctgctgtttccggtcatcgatcaggattactttctcatgatgatctcgtctcttcccggtccgttggaaaccatggtgatcggcactccgatctcttcctcgatcgtctcgatatacttcctgcagttctccggaagatcctcgtagttcttgattccacggatctcgcacttccaacccggaagagtcttgtataccggttttgccttctcaagctccggagttgtcgggaagtcttttgttacctttccgtcgatctcgtagcctacacagatgtgaagctcgtcaagatatcctaaaacgtcgagaaccgtgagggcaacctctgtggaaccctggatctgaacgccgtatcttgtagcaacagcgtcgaaccatcccattcttctcggacgtcctgttgtcgcaccgaactcaccgccgtcgccgccgcgtcttcttaactcgtctgcctcgtctccgaagatctcgctgacgaatgcacctgcgccaaccgcactggagtaagccttaacaaccgttgtgatgttcttgatctcatacggcgggatacctgcgccgatcgcaccgtaagcagccagtgtggaagaagatgtaaccatcgggtagattccgtgatccggatcctttaaggaaccgagctgaccctctaagaggatgttctttccttccttgatcgcatcgcggagatatttggatgtatcgcatacatacggagcgaccatctctttgtactccataagagtattgaagatctccttcggatcaagagccggctgatgatataaatgctctaacattacatttttcagtgtgcagacattctcgatcttgtccatcagttccttctcgtcgccgaataactcgttgacctggaaaccgatctttgcatatttatcagaatagaacggagcaattccggactttgtggagccgaaagacttaccagccagacgcgcttcctcgtaagtatcaaataagatgtgatacggcattaagatctgtgctctgtcggagacaaggatcttcggcatcggaactccctggcttgtcaggtcatttaactcttttacaaggaacgggatgtttaatgccacaccgtttccgatgatgcttgtcgtatgattgtagaaaacaccggacggaagcaggtgaagggcaaattttccgtaattgttgatgatggtgtgaccagcattgctgccgccctggaaacgaacgataatgtcggattcctttgccagcatatctgtgatcttgccttttccctcgtcgccccagttggcgcctacgattgctctaaccatgttctaatatcctcctttggacgttcaaacggaatgcactttgcgcatcccggcgtcttacgcagttgtagctgtcatattcatgacactttcatagtttacaacaaaagtctccataagtaaagtcaatatttattatgaagtccataatagcaacttatgcattactatacacggccggatccgtcacccccgacgttccctcaacacttctaaaaaccgctctcccgccggtgagatcggtaccttccggtccgtcacaacgcagatctcgcgctccggcatcatctcccggaaggcaagctcaaagagttctccgctctcgatcttctccttcgcgaattcctccatcacgcagccgatccccatgttccggatcgcgaactggacgatcatatcactggtggcgagctcaaactccggttccaggacgatcccgcgcttttccaggaagcggtccatgaactttctcgtactcgtatccttttcaaggaaaatacagggcagatgctccagttccccgtactccatccgctttcccttcagcgtccagaacttgtttccggcgacaaaggtattacggatcttcttcacctcaaaggcttccacctccggtctcgcgtcaaacggcgtgctcacaacaccgaaatcgatctttccctcgtacagagactcgatcgtctccggcgtcggcgcattggagaccatgaccttgatattcggatatcgctcgtggaaggtctccaggtacggaagcaggtagaactgcagcgtcatatcgctcgcgccgatccgcacctctcccatgtccatatccacgaggcgctttaacatctcctcgccgtccaggatgttttccatcccgcgctccacataaggatacaggagttttccctccgtggtcagttttacgcctttctgggtccgcaggaaaagtttcgtgttcaacgccttctccagctgtttgaccgcctggctcgccgcaggctgggaaatgcagagcgcctctgctgcagcggtaatgctgccgaggcgccctacataataaaatactttataatattctgtactgatgctgctcgcatgttccattatacattgatctccgcttttactccgagaagatccgcattttcctttaagatcgggcggacaacctcatcaaggaactcatcaacctgtctcggtgcgcggccgacatacttcttcggatccatagtcttctttaactcgtcgaggcttaaattgaaggacggatctgcagcgataagctctaagagattgttgtcctttccttccactttgacgttctttcctgcctccatggagagctcacggatgcgctcatggagttcctgtctgtctccgccggcttttaccgcatccatcatgatattctcggtcgccataaacggaagctctgccattaagtgtttctcgatcaccttcggatataccacaagaccgtcgacaacgtttaagtagaggtccaggatgccgtcgatcgctaagaatccttccggaatggaaagacgcttgttcgcggagtcatcgagggtacgctcaaaccactgggtggaagcgacgagcatcgggttcat

SEQ ID NO: 2079 - DNA, 1389 bp, Unknown
  gut microbiota DNA sequence
atgtctctcaagaatatccgctgcacaggctgcgagctctgcacacgggcgctttttatagtagctctccgttctcgcctccggcaccggattcgtatccgtattgatcccggccagcagctcccggcagatgtagcttccgttctcgttcttgaacgtcgttacaagctcctgaattttcttatagtgatcctgcttctccactgccgctttcgggtctgtatagccttccagagccccacagaccagcgccattccgctgacacagccacatacctcccgaagtcttccgaggccgccgccaaacgaggatgccaggcctgctgccatctctctgctgatcccgcgtgcttccagctcctcagcaaatgccagcgtcaccgcctgggagcaattgtaaccttcccggaacagttcccgcgcgcggtccccgcggcttttttcacagactgtttcattttttgttgatttttccacaatatccatcgacttattccctgccattccttctacccctttcgtatatttcccgttaccatagcatatactgtgtaacaaaattttccaatgcttcgcattccgaatcggcaaaatcctcgatcgcagcggtatcatacggaattttcagttcgtaaaatccctactcgcgaaaaataactcgctttcctctttgtcactgttccgaagaaccttcgcttgtatttttccatgtcttatggtagaataatatcgttatggttgtatcaaagattcagccgcattcatatgacagcgaatcatttcctgggccatcgccaagcggtaaggcacaggactttgactcctgcattccacgggttcgaatcccgttggcccaggaaatgattcgcaaatccagtgcttgtaatttttattataagcactttttttatctgtttgcaacaggaaatctaacctctgaacgcggttaaagctcccggaagtttttaatagctatcacaaaccattccagaaccaacgatggggcagagttcttatgaactccgccccatccattgacataggacctattaacacagcaacttccccaacaaaacaaaaaagccccgggaactgcttcccagggaaatacgggtggatacagggattcgaaccctgggcctccagagccacaatctggcgcgctaaccagctgcgctatacccaccataatataaaattcgaaatcgcacttgatttcaaatgagcctgaagggattcgaacccccgacccacggcttagaaggccgttgctctatccagctgagctacagactcattatgctttttcgcaaaagcaaagcgggtgatgggaatcgaacccacgtatccagcttggaaggctggtgttctaccattgaactacacccg

SEQ ID NO: 2080 - DNA, 1208 bp, Unknown
  gut microbiota DNA sequence
ggcagcacattcaactgcccacacagctcccatgatctccccggagcttgaaaatccggaggttctgcgctacttgcaggagacggaagatcctgcggccgatccggaaaaactgtgggaggaatttaaaaggacatacccgaagatccagccgttcgagtatgaggacggctgcgatatcctgacgattcgtccgcaggatatcggaaaactcccgagagaatgctgggtctatggaaacaacagttttctgctccacggttactataatttccgctatctgatcctcgtaaagctcggcgggaacaaaaagaaatcccgctacctgttgggagtccccgggcactactacagcagcgaaaaatatatggccaccatgttcggcttcccgaatttcgtcctctccaggcgccagccggtcggggacgggcggtttgggtactggtatacggatctgaagatacggtgagttttaacagacaggctgctttgtattgtctttcatatttatttatcttgccagaaataaaaaataaggtacaataaaaaaagaataaaaggcgaggatctggaatcatttcctgatccatgaccatagacaacattacctgaaattcggagaaacatatgaaaaagatgacaatagaagaacactatatgaaagaagcgatccgccaggcaaaaaaggcggcggctttaaaagaagtgccgatcggctgcgtgatcgtgcatgacgggaagatcatcgcgcggggatataaccggcggaccgtggataagaacgtgctggcccacgcggagatcatcgcgatgcggaaggcctgccggatcatcggggactggcggcttgaggactgtacgatgtatgtgacgctggaaccatgcccgatgtgtgccggtgcgatcgtccaggcgcggatcccgaaagtcgtgatcggctgcatgaacccgaaggcaggctgcgccggatccgtactcgacatgctgcatgaagatggattcaaccaccaggtggagacggaagtcggactttgcggggatgaatgctctcagatgctgaaggatttctttaaagcactgcgggaagaaggaaaacgtaagaagctggagcaggcggagaaagaggcggggaaagaaacctcagaaaatgcataaaagacaaacggagaatcggtttttgccgtgaaaccgaaaaatgccagtggatg

SEQ ID NO: 2081 - DNA, 2314 bp, Unknown
  gut microbiota DNA sequence
acgcatagagccaccaaaagatttccagatgaggatgacacaggagcagacaccgggacagaagaagcggcaggaactgatctcggaactcttggaagaggaatcctatgtgtgggaccgtactggacgcaacacaaagatccgggagattgcagccagggagaatacgagtgagcggagaatccgggagctgtattttcgagcgctggccggaagagccttagtggaagaaagaaaaaaggcggagaaagaagagacgaaggaagaaaaggacttcctatgggcaatcgacacgttctactatacagcgaagaagttttccctgcggagtgcgtatgatatgcttctgctttccagatacacggatccagacggacatctactgaatgtctatccttcctggcataccttccgccattatttctacgataagaacttccataagaaatccaggaacctgatcgccagaaatggactgactgattatcagagaaataagcgtccattgtttggaagtgcatcggcttggaaagaacagataggagtctttcagatggatgcaacgcagactgacatctacctggtgtcacgtctggaccgctctgaagtgattggaagaccctatatttacttagctgtggacacggcaactcagctgatcgccggagtttatgtgggaatggatgccggagagcaggcggtcattaactgtctttctaatgcggctgcggataaggtttccttctgtaaacggtatggactggacatcaaaaaagaagagtggccaaacacgggacttccgggagaaatcattacagataagggaagagagtttattggcacccggatgaacgagcttgcaatgaagtacggaattgagtttgaatccctgccgccattccgaccggatggaaaaggtctggtagagaaatcctttgatctgatccaacagcggtataaaccggcactcagaggaaaaggagtcattgaggcggacgcgcaggagcgatgggcggtggactatcggagtcaggcggttctgaccttagaagagtttacgaaggtcatcctctcctgcatcctgtacctgaacagctgccgtgtgattgagaaccgtttctataaggacgcagacccagtggcggccgcaatgtggatggaatgcgaaaaagaaaagagatccctggttatcccgatcaacagtgaagaactgtatcggtttggacttccaaggacctcagctacattgaaccggcgcggaatctgttatcagggactctggtatgtgagtgagaattataaggagttcttagagagccataacataggcgagatcgtgaggatctgctatgacccagaagatgtatcgcgtctgtttctgctgaatgggatgaattacattccatttgagctttccagacattccaagcaatatgccggagcaaccgaaagtgaatatcagatgaagcgtaaggcagagcgggacagccggaaggaatcggaacttagggataccgaaggacggatccggcttttaaagaatatcgagtccgtggtgaaacaggcagagtaccgggataagaataagatttcaacgaaacgcatggagcaggcgaaggagatggaacgggtatgaaaaagtatcagaaacagaatggaatgaccgtgaacgcagaatatgaagaagaacagggaaatcccttctttgaggcattgccggagatccttggaaaagaagaggtgatgaagcggcttcgaagtcagatcccttatccaaaagacattcagaagaggtcaccggaggaacggagaagagaagtcatggagatatccaagtggttctatcccatggattacatgtatacgatctatgatatgctttatcgtgcgatgtcagcaacctaccagacaaagaacatcgtggaccatatccgccagatgaatgacctgtatatggatttccgcaccggccgggaacgggagtttcagtatgcgacccaggcatacaccggagctgtcttaggtgtcccgggaatcggaaagacatcgacggtccagagatgtctttctctgatgccacaggtcattgtccatacgaattatggtgggaaacccatgtataccaagcagatcaactatctgttcgtggagtgcccgtccgattgttccgtgaggaccctggcattcaatattttctcagcaatcgaccgtgcgataggttccgactacttaaaacaggcaacctatcagagagcggtggcggccagcgccacgacaacaaagctaaaaattatctgcatgaatcatcacattg

SEQ ID NO: 2082 - DNA, 1724 bp, Unknown
  gut microbiota DNA sequence
gaaaagtgaagaaaaacagttacagttcagccatgcgctggtttgaatgagaaagtgtgttgcaagcttgcttgcataagcactttttcatccaaatcagcatatggtggaaccaccaagcttcttgttttcatgaatatgaaaacaagaagatgtaatggctgaactgtaacgaaaaacaaaataggaataattactattattgacatttaaaactagatgtgatagaatacagacatgaggaaaacaacggatgaccgttgaaaaaacagcacggataaacagaagaaaagaaaggcagactgaatacgggaatgccgaaaataaaaatcaagatctgaaaggagaccagttttatgagcaaatacgcaggaacaaaaacagagaaaaaccttgaggccgctttcgccggagaatcccaggcaagaaacaaatatacctactttgcatccgtagcaaagaaagagggatatgagcagatctccgcattattcttaaagactgctgacaacgagaaagagcacgcaaaaatgtggttcaaggaattagaagggattggcgataccgcagcaaaccttgcggcagcagcagacggcgaaaactacgagtggaccgatatgtatgatgagttcgcaaagaccgctgatgaggaaggtttccatgcactggcagcaaaattccgtatggtcggcgagatcgagaaacatcacgaagagcgttatcgtgctctcctgaaaaatgtagagacagcttccgtattcgagaagagcgaagtaaaggtatgggagtgccgcaactgcggacatatcgtgatcggaacaaaagcaccgcaggtatgtccggtctgcaatcacccgcagagctattttgagcttcacgcagagaactattaaaagtacggaccagttgaaaataaaagtcgaaaaaaagtggccttcatcccagaatcggatgaagaccattttttatgtaacaggaaattccggggaatttcctgttacataaaaaggcacattcttttatcgttggggaattcccatgggatttttgccttcaagtcaatgtcatcttacggtcagcgcagtaaatgcgcagacttgctgaatagttacatcatttttataacttctatttctggtaagcagcccgctctccgccgatatatttgagtcttgttctcgcgcagaccacatgggcggagccgatggactggatcttcgtgcggaccggaacggcaacatggcgaaggtgcatgccgatcagggtatcgccgatatcgatcccggcgtgtgcctgaatgtattccacggcgcacggagattcaaaaccgttccatgcggcggtggagaaggaaccgcctgcttttaactgcggttttacattcaccatctcaaggccatatttctcggcacattcttcctcgacgatcagagcgcggtttaagtgctcacagcactgggcggcgaggtagaggccgtgtttctttgtcacatgggaaagggcggtgaagacagcctgtccgacttcgctgctggagtagcagccgatcgcgtgggcagcgatctcactggatgagcagcccaccaccaggatctgccccggtttcattgcggcggtattgatcagctcctcggcgatcgcttttgtctgttcataaattaagtcaaggtccacatcgacggatgtggcgatatctgttgcgctcatagtatttccttcttttt

SEQ ID NO: 2083 - DNA, 775 bp, Unknown
  gut microbiota DNA sequence
aggaagtcgccgtcgccatccagaaagcggccgaccaatccaacgtagccgtgacgatgcactacatgggttcgctggagattatgaacgcgctcaaggccggcggccaggatcacgacgccgtctggcctgcctcctcgatgtggatttcgatgggagacaccaagcacatcgtcaaagacgcggccagcacctccaccacgccgatcgtgttcggcatcgccaaatccaaggccgtcaaactcggctgggctgacgacaccggcgccaccaagcccgtctccaccgcggacatcctcgccgcggtcagcgacggcaaactcacgttctccatgacctccgccacggtgatcgacagcgcgctcaacgtctaccagaccgcgctcaggaaacccagctggaccatttgggtggtcgattactccggttcgatgtctggagagggcaagaacggcgtggtcaaaggcctgaacgcggcgctcgacccggaccaggccaagaagtcgtacatcgagcccgccagcggcgacgtgaacattctcatcccgtttgaaaccgaggcccaccgcccggtcaaggccactggcacaagcaccagcgacctgctgcatgaggccgatgccaccgatgccagcggcggcaccgatatctatgaaggcctgctgagcgcgctcgacgagctgcccagcgagtcggaagcctcgcaatacaccaccgccatcgtgctcatgaccgacggccgctccaactccgatcatcaggatgaattcgaaag

SEQ ID NO: 2084 - DNA, 347 bp, Unknown
  gut microbiota DNA sequence
aagatacgaaaaaaatattttggttgttgaagaaactacatctgctggtggatgcggctccttcaacgcggcttcttcatgtcctgcgtcagcctgtctttatgacagtgcggcgtggggcattttttattgttcggaaagaggtggcctgatatgaatttaccaaaacgaaatagtgcggacgggcgctgttactggatgaagccagaggtgcaggaagaactgcaaccgctctttgaccagtgcatccaggatgccattgacgggaaaatcacgcggcttgatgattcccactggccgccggtagtggtcagcagtcaaggtgcaccctttgaggtatggcaact

SEQ ID NO: 2085 - DNA, 208 bp, Unknown
  gut microbiota DNA sequence
ttagaccatgaatgagaacattcagaacaaaacctaacaaaacagtagaacggtttaaaaattagccaagctaagttttgaacctggatacaaacactttaacatgagagtttgatcctggctcaggatgaacgctggcggcgtgcctaacacatgcaagtcgaacgaggtaaatgagatgaagttttcggatggattcttatttacc

SEQ ID NO: 2086 - DNA, 1769 bp, Unknown
  gut microbiota DNA sequence
gttgttacttctccaaccttacgctgttcccaagcgtccgtctttttcgcccattttcctgtcttttactgcccggaatgatgtctgatctgatcccgcaccatcattaaggcgtatccaagcagattttgaccacgccactgggccggatcgagccgttttggatcatccatcgcaagcccgatcccccagatccggtctctgacagcgcattctgccaaaattgtatccccggtactcaataattgttcacaaagttctgaattctgtgaaaatttttcaatcagcccttcatataccaccatctgccggattccactccagatcaaatcctcatatccggctaccatccgcccgagttccttgatcctcgcagcgtcctccgttgcaaggatcttctccgcaatctcatgatcctgaaaccacacggcttttcggtacatcataaactgctccatcgatgtgaagcagattccgtccacaacaaattttgatggataccagttgctgaaagctccatactcctcatccggattgtgaaagcctatcacacgcatcagacctgccccactttccggactgcaagctccagttccagatcgtgcagtccatagtatgctttttcaagaaaatccagagggatcttcttcactaactccgcactcggaatattgtaataccactgataatacgcataaaattcaccgatccagtccggcataaatccaccgatcgactttcccggcttcatccggtactgttctgtctccgtaaaataatcccagagttctctggcatccatggtattgacatatgccttcgcctcgtcgatactctttcgtgttttactggacatatacgccttaataaagtctcctgtatctttgtctggaaacgactgtgcaacaagatcaaacagttttccctgattttccactacatcttccagatatgcatcggaatatgccctcatatccatcacctcacaagcagcgtactaaatacgtttgttaccgtatttgcatccgaatttactagatcccgcatcttttttcgtgccataatatctcttgcgttatatcggtcattgaattctgtgtactcgacgatttccagctcatcttttaattcatgcagtctggcatacgcccgttctgtcttgatacagtactggattccgagaccaccgagggataacagttcttccagaatatcaacatcgatattgtcacgcacaaactctttcgcgatgtaaaagtaggacgcattcgctcgccagcctttgatcacgtcgtacgtttccgtgtcgattccatatctatcaatgaactttgatgccagcatccggtaacgtttggaatccgccgcatccctgtgtttcatcagctcagccagccatgcgagaacatttttttcctgaaaatccagaattttcagtccatcgcactccagttcgtacttgtggacccagccgtttttctcgtttggcctgcacaccgcccattctttcgccagttcgatgttctctgtcaggtaaaatccccgtccgtaatcatgtttatcatctccaccaccaaacttcggggtcacgatctggtccggagtgccatggtacaatgtaattttcttcattttttcacagctcctccctaaacaaacatcttttccaacatcgatttcttgattttttgcagtttttcgagctcacgctgatgaagggtgataaggtggtcgagatggtctaagtattgtcctattactcgctgttc

SEQ ID NO: 2087 - DNA, 10793 bp, Unknown
  gut microbiota DNA sequence
actgtaacaggattttgccgatgcttcgcattccgaatcggcaaaatccgcggtcataacggtatcatacggaattttcagttcagaaaattcctacccatgaaaagtaacggaaagctaccatacatatgaaacgtattgattttgaaaacggaaccataacgggaaatatcctcggagccgcgctccccatgctggttgcccagatcttaaaccttctatataatatcgtggaccgcatctacatcgcgcggatcccggagatcggaacagccgctctcggcgcggtcggcttatgttttccaatcattgtcatcatcacagccttcagcaacctctttgggaccggcggtgcgccgctcttctcgatcttccgcgggaagaaggatcctgacacagcaaggcgcattatgaacacttcttttacgatgctctgtgtctgcgcggtgatcctgatggtggtcggcttcctcttcgcccgcccgatcctgatcctcttcggcgcttccgctgaggctatcgtttacgcttatccgtatatgatgctctatctgatcggaaccctgccgtcaatgatcgcggtcggcatgaacccgtttatcaacgcccagggctactccagcatcggcatgttatccgtcgcgatcggtgccggaacaaacctggtgcttgatccgctctttatttttgccctcggactcggtgtccgcggcgcggccatcgccaccgtgatctcccagtgcctgtccgccgccttcgtcctgtttttcctcacgaaaaaatccgagttaaagctgcggtttcttcataaaaatgagatcccggaatgtaccggacatgcgaagaatatcctcagcctcggcgcggccggatttatcatgcagctcacaaacagcctcgtgacgatctgctgcaataatatcctttccgtcaccggcggcgatatctatatctccgtcatgaccatcatctccagtgtgcgccagcttgtcgagacgccgatccacgccatggtagagggaacttccccgatcctgagctacaactacggtgcccgcagaccgggacgcgtgcggaaatccattctgatcatgagtctcctcgttttcggttacacggccgtcatgtggagcatgatcatcctcatcccggaaacgctgatccgtattttcagctcggacgcgacgctgctccaggatgcagttccggcgctgaacatgtattttgcggcttttatctttatggacctgcaatacatcggtcaagcggtatttaaatccctgaacaagaaggtctttgcgatcttcttctccctgctccgcaaggtgttcatcgttgtaccgctgacctactttctcccctacgccatgcatatgggaaccgacggcgtattcctcgctgagccggtctccaatgtcatcggtggaaccgcctgcatcctcacgatgctgatcacgatcatgcctgagctgaaacggatcgaggttgagaaccgcagggcggcataaaagcttaaattggtttttgcaaaaaaaatagaagctcctcgcggtgcttctatttttttctgatcttcgccacaaaaaatccctcaaacaattcatccggtcccacgaggagcgtccccggcatcgcgttcggaagtaacggaagttccttcgtccactcttccccgatcggtacaagttctccgcctgcactctttaaaacgcgctttaagagaccttcgttctcctcttttaagatcgagcaggtggagtagaccatctcatgtccggattttaaaagcttcagcgctttttttaacagttcttcctgggttctcgcagatctttccacaagttcctttgagatctttgtccggcagacgccgtcccgcacttctacggttccgcttccgctgcagggcgcgtctaagaggatccggtcgaaggaaaagaaatcgtcgagctttcttgcgtcctccaccatcacgtaggttcccgatgccccctgtttttccagattgtattttaacttttccgaccgcgccttattcttctcacaagccgtgatctgcgcctgatttcccgtcatcgccgccatctgggtcgtctttccgcccggggcggcagccatatcgaggacggactctccaacctttgggccgagaaacagcggcggcagcatggaggaaaggctctggagatagattccgccttccttgtagatcggaagttcctggatctccggctcccttgcgccctcgatgatcatcgcatcctcataccacgatacatttttaaacgcgatccctgcgccggtaagtgcctgttctaccgtgtgccggtccgcctttaagggattgacccggagtgtcaccgggcgtcttgcctgatatcccgcgaggatcttcgcgaaaacttcctctccatactgttttttcaacatctcttccagaaatcccggaatcatctgttccataacctgctccttatcgatcttttcttatctcttatcacaattcacaaaaatatgtaacgatttagtaccttcgcagttacctttctgcactttaacacttgaagttaaagagattgagtcctgtctcatcatctcttacgcggtccacaactccgtcgatcaccgtgatcaccatctcacaggttgctccgatgatgccatgacttaaatgcccgccgtacacattgcccttcgcatcggctgccgccgcgtggatgtggctgtaatactttccgtccatcgtgttgatggttcctgtaaaggagacgatctcaaacattccctcgaaatcattccccataaactgacgtttttccagatcataaattcctacggtcatggaagaaaatgtacctaatgcgctgacgctcgcaagcttcacatcctcaagcatcgcgatgcgcttcatcttctccagaacatcctcaccctgatcgatccttgctacgatcgtatttccaaatctgcggtattccataatgattacctccttattatgcacgttcatacaaccgaaactctgatttcaaacttcttttgtaacggttccatatactcacagttacgaacaaaaatccattaaaaattgtctgcagcaatggtatttttactcgcagccaatattttcttacttatactctcttataatccggtgccaccgcacaaccaattcccattccgccaggtccgatatggcaggaaacgccgagagaaaggttatcataaaggatcggaacacccgggaatacctccttgatctcctcgacccacgctgcattctcctcatccgttccgctggaagacgctaagagatgcagagcgccatcgtttaaggcatcctggaaattctcgcggatctctgtctgcatcgcctcgatggctgtctttttggccttctgcattccgtggcacttcttaaaggaatccagttttccggtctggagctttaagatcggtttgatattaaatacagatccgagcgcagctgcagccggagttactcttccgccttttttcaggaattccagcgtctgaagggcgatatagatcatcatccggtctcccgccttttccaggagttcgcggatatgttccgcttcatatcctttttcgatcatatccagtgtgtccaggatcatctggtgaagcggcgccgcaacctgtccgtcgtccacaacgaggacgcgtccttcatatttttcctcctgcgccagcatcatcgccgtattgtaggaactgctgagtccgctgctgatcggcatatacaggatcttttcatattcttcgagtgctttgtcccagatttccatcacagcggtcggagatggctgggaagtcgaaatatcggctccggatgtcagcttttcaaaaaacagttccctggaaagcgtcacactctcataatagcactccccgtcgatatagaacggcatcggcaggacaaagatcccaagtttctttgcctcttcctggctgatgctgctgtgactgtctgttacaattccaattttcttcatatatgtatttcctctttatatcctggattcacgcatgagattgctgtcttttgcgcaattttaacgttttgcgtatctaataatcgtaacatccaaaatccttccagtcaatagggtggaggcaaaaaatgacagattgtcactattttctcttatgtaaaaagaatgtgtcctggcacattctcgcaccgggcgcgcggtcgcttgcgacgatcttcatcttctcgcgaatgtgccttttttcataggaagttccattgaaatcttctatgaaaaaagcgctgtgtcacagcccattttctatgacacagcgccaggatgtacatgtactatttgtagttgacgatctttccgaaatcagcctttaaggacgcgccgcctacaagtccgccgtcgatatccggctgtgcgaacagttctgccgcattgcctgcgtttacagatccgccgtactggatgcggattgcttccttcgttgcttcatcgtagatctcaccgatgcacgcacggatcgcgccgcagacttcctcagcctgctctgtggtagctgtctttccggttccgatcgcccagatcggctcataagcgatcacagcagtcttcgcctggtctgctgtcacgttctggaatgcgatcttgacctgtttgcggatccagtcgagtgtgatcccctgctctctctgggtcagggtctcaccgcagcagataatcggggtcagaccatgctcgaatgcctttaagactttcttgttgacggtctcatctgtctctgcaaagtactctcttctctcggaatgtccgataatgacgtatttcacaccggcatctgtcagcatgttcggggaaatctcgcctgtatatgcgcctttctcctcgaaatacatattctccgcgccaacctcgatgttcgttccctcgcatgcctttacgacaggaataatgtcgatagccggtacgcagaatacaacgtccgcttcctccgtcttaacgagcggctttaatgtctcaacaagtgcgacagcctcggacggcgtcatgttcattttccagtttccagcgatgattttctttcttgccatggttatttacccccatatataccaattttatatcacaaaatccgggacgggatcgccgtcccggatctggaatctcggacactataatatttacagtcagggaagtaaatgcgtacatctacttcccaccgtgcatcttcttgtttttatttcataaaaacaagaagccgggggcgcgccccctatgcctgaaaagacctgaaaaggcttatgcaagcgagcttgcagcgccttttcatgccttttcaggcgcacggtgtactggtttcattcattcatttacttatcgtcagctgctgcaacgcccgggagttcttttccttccaggaactctaaggatgcgccgccgcctgtggagatgtggctcatcttgtcgccgaagccgagctggttgacagctgctgcggagtcaccgccgccgatgatcgttgtcgcatctgtctcagcgagtgcttttgccactgcgatcgtaccagcagcaagtgtcgggttctcgaatacgcccatcggtccgttccatacaacggtcttcgcattcttcactgcgtccgcgtagatcttgcaggtctccggtccgatatcaacgccctctttgtcagccgggatcgcatctacggaaacatactcaacctcgaccggagcatcgatcgggttcgggaattcggaaacaaccgtcgtatcaaccggaagaagaagcttcttgccaagcttttctgccttctccatcatctctttgcagtaatcgatctttgtatcgtcaactaaggacttaccgatctccttgccctgtgcctttaagaaggtgtaagccataccgccgccgatgatgagggtatcgcacttctcaaggaggttggagattacatttaacttatcagcaactttcgcgccgccgaggatcgcaacgaacggacgaaccggattttcaaccgcatttccgaggaacgcgatctctttctccatcaggtatccgacaacgttggaaccgccctttgcggagatgaactttgtaacgccagctacggaagcatgtgctctgtgggaggaaccgaatgcgtcgcatacatagtcgtctgcgaggtcagccagctctttgctgaactgttcgccgttctttgtctcctcagctccgcggaaacgggtgttctgaagaagaacgacatctccctctttcattgcgttcacagcctttgttgcagcttcgccggttacgttgtaatcggatacgaaaacaacttcttttccgagtttctcagaaaggctctttgcaaccggagccagggattctccctcgttcgggccattttttacttttccaaggtgggagcaaagaatcactttgccgccatcgttgatcagcttctggatcgtcggaagagccgcgttgatacgtgtctcgtctgtgatcttaccgtcctttaacggtacgttgaaatcgcagcggaccagcactctctttccctttacgttgatatcatcaactgttttcttatttaaagacatgttggaattcctcctttttataaatcgaaaaaagggtccggtcctcatcagaccggaccctttgctgagtctattttcttcgataactgcgcgaaattaagcgtttaacagttttccgaagtgcttgatggtacgaaccatctggcttgtgtaggagttctcgttgtcgtaccaggatacaacctgaacctcagatgtgttctcgtcgatcggaagaaccattgtctgtgttgcatcgaagagagaaccgtatctcataccaacgatatcgctggaaacgatctcatctgtgttgtaaccgaaggactcgttggaagctgccttcattgctgcgttgatggattcctttgtcggctggcctttaacaacagctgttaagattgttgtggaacctgtcggtgtaggaacacgctgagcagaaccgatgagcttgccgtttaattccggaattacaaggccgattgcctttgcagcacctgtgctgttcggaacgatgttgatcgctgctgcacggcttcttctcttatcgccctttctctgcggtccgtcaagtgtcatctggtcgcctgtgtaagcgtggatcgtgcacatgataccggactggatcgggtaagcatcgtttaatgcttttgccatcggagcaaggcagtttgttgtacaggaagcagcggagatgatgtggtcatctttgcttaatgtctcatggtttacattgtaaacgattgtcggaagatcatttcctgccggagcggagatgataacgtgcttagcaccagcatcgatatgagcctgtgcttttgctttggatgtgtagaaacctgtgcactcaagaacaacgtctacaccgatctcgccccacggaagctctgctgcgtttgctttcgcgtagatcttgatctctttgccatcaactgtgatggaatcttcactgtaagatacggtatctgcaagagcgtatctgccctgtgtggagtcatattttaaaaggtgtgcgagcatctccggagaggttaaatcgttgatcgcaacgatctcgaatccctctgcgccaaacatctgtctgaatgcaagacggccaatacggccaaaaccattaatcgcaactttaactgccatttttcttttcctcctagaaaatgatgtgattgttcacgttgaacagtcatggattgttaaataataatcaaccttaaggttattgtacccaattccaatagaaatagcaagtcctttttgaaatcttttcctaaataaagtcgtcccgaagccaccaaacttcacctcgtcatcccaccaccctctaacgcgcctgtaaggccccaaacagaatcgcccgctcccggactctttcttcttccctcgctcaaaaaaagtgctttgacctgtcagtaaaacaacctctttactccctccagtcccccagccagccggtgagagttcgaatggatgcgcctgatcccgggagctggcttcctcttggctcgcgggagaatgcgttaggaaacagacggcacttgtctgagcgcagcgagttgtgccgtctgtttcctgcccttagcattctttcgcaagcctagaggaaccctcccggcatccccagcacatccagtcgaactctcaccggcccgccaacaacctaattttgcaacacaattttctttctctcccctcttgcatctccccctcattttctatatactaagtgataaatattttccatcccactcccggaggacccacatatgatacagaaattccgaaaactatccctggagagccagctctttttaagcttcatggcagtatccatctgtctcctgctcctctccctgagtatcaccctgttctcgacgatcacacgccagcgacaggaaatcgataaaaatatcagtgcgctcgcctcctacatcgcgtcgatggacaacgtgatctccatgctggaaaacggatatccggatgactctgccattgaagagctggattccctgtccgaaaacttttccgacctcaacgtcatcgccgtctacaacaccaacggtctccgcttttatcacacgaaccgtcaggagaccggcgagacatttgtcggcggcgaggaagaagcgatcttaaaaggaagccagccctacatcacgaccggctacggcacccacggaacacagcggcgcgccttccatgcggtcctcagtaaggacgggcgcatcatcggctttatcatggcatctgtcttcaacacgtatatcttcgagcagatgcagacgctctttcctacttatttactggctgcaatggtcatgctgttggtcagcgtcctgctgtcgcacggactcgtatcgctcctgcgcgattccctgatgggccatcatcctaccgagcttcttgatctctatctccgccaggatgtcgttctgaatgcattggaagaaggtctgatcgcaaccgattcgaatggcgtgatcgcctatgcaaaccaggcggcaagacagctctttcagctgccgcagccggcgccggccactgaaggctgccattttaaggacctctttcctgcctcccaggcagaccgcgtcctgacttccggagttccgtcctaccaccgggcctgcaccaacgggaaccgcaggtttctcgtgagcgaagttcccgtcaactcccagacgggttcccatgccgtcctgaccatcatcaatgaccagaccgatatggagaccgtcatggatgagctcaccggagcaaaggcgatgctggacacactgagggcttttaaccatgaattcttaaataaactccatgtcatcctcggctacctccagacaggtcagacagaggaagccatcaaattcatcatcaacagcaacctcgtctccagccagtcgatccggcagacagccgactgcatccgcgtatcaaagatctgcgccctggtcatcggaaagatgatgcacgccgcagaactcgggatcctgctcacggtatcccccgacagccggtgtcttgagaaagatctgctgctgccgatggaagattacatcacgatcatcggaaatcttctcgaaaacgcgatcgaggagctttccaacggggagcatgagatcaaagagatcacgctcggactctactgtgatccggactgcaacatcatcacctgtgaggacaccggcggcgggatccggccggacctgatcgaccggatctatgagcgtggagtctcatccaaaggcgaaaaccgcggaaccggacttttcctgatcaaacaacttgtcgaagaatcgcacggagacatctccatcgaaacagaagaaggagaaggaacctgctttaccattacatttaccggaaaggagaaaccatcatgtaccatgtaatcatcattgaagacgacccgatggtcgcatccatcaataaacaatatatcgaagtcagttccaacttccgtgtggaacatctcttcaaaaacggagcggaggctctgccatatattaaaacaaatcctgttgatctcgtgattctcgattactatacgccagtcatgaacggcggtgaattcctcgacgcactccatgcggcaggactcaccccgtatgtgatcatggtcacctccgcaaatgacacggatatcgtccgctcgctcttaaaccgcggcgtcacggattatcttgtaaaaccgtttgaatatacacgttttaaggcggctcttgaccgttttgcggagatgaagaagtacctggaagattcccatgccaatctggaccagcacgccatcgaccgtctggtttccggaagcgagcccacaacagaggcaaaaccgacgctggcaaagggattgaacgagactaccctcaatatggtccgggaatatctgatggcaaatcctgacggcttcttcaccagcgaacagatcgccgagcagatccatctctcccgcattacgatccggcgatatatgaattatatggtggacaccggagagatcatcagcaccatcgactataagacgggaggacgcccttccatcaaatacggattcgggaaaaaataataaacaggcatttcttaagactccgcacggatctgatccggcggagtcttctgttcagagcgtggcgaacgaaagtgatttttccggttacgataattacataatttattagatacttacataaattgacattatatacaaaatattttattc

SEQ ID NO: 2088 - DNA, 408 bp, Unknown
  gut microbiota DNA sequence
cccatgttgatgtccagcacccctctgggcggctggatcagggcgtcctcatactgacacttccactgaatctctcggcacatctggccatccgccacgccgtctatggtttcaccatcctgaatggggttatcatgctccagaatataggacgccacattgtaggcatggtttactacccaatttgggtccatgtcgtggaagtggtactggaggtcgggcaggaacagggtgctcatgcccaccgtgtcgatgagcatatcctcagtgccctcaatgttaaagaagcggacattgaccccaaagcggatgaaccgatccggaccctcaatctggtgggagcgtacatcctctgccagaaacagcttgccgcagttctggaaatagaatgcctcacaggtggggtac

SEQ ID NO: 2089 - DNA, 2149 bp, Unknown
  gut microbiota DNA sequence
ggcatcgatgtcgacccgcgttccatcttcgatgttcaggtaaaacgtctgcatgagtacaagagacagctcatgaatatccttcatgtgatgtatctctacaaccagttaaaagataacccgaatatggacattgttccgagaaccttcatcttcggtgcgaaagcagcagccggatacaagcgtgcgaagctgaccatcaagctcatcaacaatgtggctgacgtgatcaacaatgataagtctatcggcggcaaattaaaggtcgtattcattgaggattaccgtgtatccaacgcagagctgatcttctccgccgctgatgtcagtgagcagatctccacagccagcaaggaagcatccggtaccggaaacatgaagttcatgttgaacggtgctctgacgatcggaaccatggacggcgcgaacgtggagatggcagaggaagtcggcaaggacaatatgttcatcttcggtgcgtccgcagatgagatcatcaaccttgagaacaacggtggctacaacccgatggatatcttcaacaatgatcaggatatccgccgcgtgctgatgcagctcatcaacggctattattctccgcaggatccggagctgttccgcgatatctacaactccctgctcaatacacagagcagcgaccgcgcagatacctacttcatcttaaaggacttccgttcctatgcggaagctcataagaagatcgaccaggcataccgcgacgagaagtggtgggcgagaaccgcaatgctcaataccgcatccgcaggaaagttctcctctgaccgtacgatcgaagagtatgtaagggatatctggcatcttgagaagatcaaggtagagctgtaatccgacacttaaaatattacgtaactgttcagtgccctcacacctacagaaacctcccccggagatttccttcggatgcatggcaagttacgagcaaaaatccattccagatcggcttctccgatgggatttttgccttccgtcccatgttttattacggtcagcgcagcaagtgcgcagacctactgaatagttacaatattactaacataaaagaatcacccgcttcatacactggaaatatcacggtgtatgaggcgggtattttttatgaaacgattttttatgctcctgttcgcgatggtcatgatcccctatgtgacgactctcgcgtggacaggcaggatccggacggatgtgggggagagcattccgacagaggagtttctcgtggggatggtggcggcggagatcccggcggaatatgggatcgagacaatgaaggcgcaggccgtgctcgcaaggacgtatgtgtaccggatcgtggatcccgggatcggtggggaaaacacggacgatccgggaagtgcggatccgggaacagacagcggcgccggagctgcgggatggggaaaacggagcaggactctggaccgggaccttatggaggaagagctggatatcgactgcctgagtgtacgggagatggagaaaaagtggggaaacgaacattttgaggagtactatgagaaggtccgcagggcggttcgggagacggaaggacttgtcgcggagtatgacggggaactgatcgagccgttctattgtctcgcgtcggcaggaaagacgagagagctggcggcgtatccgtatctttcttctgtggagagtccgggggatctggaaacggatggatttttatatgtccggacgttcacggaaagcgagtttgcggacaggatcgggcggatcggcggaccgcagccggctgcggacgggatcgcggagaagatccagatcatcgagcgggacagcgccggatatgtaaaaagggcgcagatcggaaatatggactatacgggagatgaggtccgggattccctggggctttcgtcatcatgcttttatttttcctccgcggacggaaagatccgggtatcatcgaaagggatcggcagcggatacggattttcgcaggctggggcggacgccatggagagagagcaggggagtgcgtttcaggaactgctgaaatattatttccaggggatcgaaatcgtgaagatcgcggagtagaggatctggcaggaatgtgccggggcatatgttctgttgtgagctt

SEQ ID NO: 2090 - DNA, 2163 bp, Unknown
  gut microbiota DNA sequence
caaatgtgcagacttgctgaattatcgcagaattttttgcttttgtgaataactttatcatcacgggtaaaaatataaccgaggtgataaacgtgaaagaaaaaggaaatcagctgttcagggacaaatttgtccttgtcatgctcgtgctcggcctgctgactattgttgcggcagcaggagttgtgaggatccagaaggggagagaaaatatcgaaaagagtccctatctggagatcgaagatccggaacatgtgatcgcgggggattccaacgcaggcgcagagtccggaggggatactttggccggggaactggcggcatcaaaagatgaaaccggaaacgtggaaaataccggagatggcagaaatgctgcgcttgcggaaaacgaggcgggaacaggcacggatcttgctgcagctgctccgggcgtttctgaggataccggtcttgcggatacggcaggcggagccggggctgcatcggatcgttccatggcggaagccggagctgccgtcacggagtccctggtgctcgactttgccgatacggacaagctcgcctggcctgtaaacgggaacatcgttctcggctacagcatggacaccacgacatattttccgacgctggaccagtataaagtcaacccggcaaatgtgatccagagcgaggtgagcaccccggtatcggcccctgcggacgccaggatcgtctctgtggggacgaatgaggagatcggaaactatgtcgatctcgactttggaaacggctacacagccgtctgcggtcagttaaaggagatcccggtcgtggaaaacgagtatgtccaccggggcgaccttttaggctatgtcgcggagccgacgaaatactatacggtggaaggaacgaatgtgttcttcgaattcttaaaagacggcgtgccggtggatgcgctggattttctggagtgagcgggacggatcaccccggtcagtgtcatacctgtgcccacgaatcaatccggttatgaatgcgcagggaagagacagtgtgcggcaataaaataaagaggagttttgtggaagagctttcagggagaaatttctgaaggctctttttcgcagtggaaagatcccatttttgattctgtgcataccataatatcagaacaaagaaaggagacatccgcatatgaattgcagaaattctgatctgccggataccgcccggacttctccctgcggctgcggcagacttccatctgatatttccggcccgggacctgtcgtccgcccggtgtcccgtgcctgctttgacggcaatgatccgatatttccggtaggcatgggctacgtcccggtgcagatgtggggaaccacatatccgttagccagaggctttgtccgggggacgatcttcccgactctggatcttccattcgcgatggggaggtgcagaagatgaaagaattctatcgatgcagtatgatgccgggaatgccggcagaaccgatccgtgatccgcgcctgtctgcgcagaatgtcgtgccggcgtgcggcagctgtcagggcggtggagacatgatatttcaggataaagaggcactgatgcgccagatcatggaggcaggatttgcgatggatgatgtggtcctgttcctggacactcatccggaaaatcaggatgcactccgctattaccaggctgtccgcgacatgcgaaatcaggccattgccgcctatgaaagccagtttggaccattgagatatgccgatgtgacatcctcatcctgggactgggtaactgaaaaatggccgtgggaaggaggatgttaagatgtgggtctatgaaaaaagactgcagtttccggtgaatattaaggagccgaatgcgaagatggcacagtttatcatgagccagtacggcggacctgacggcgagatgggtgcgtccatgcgctatctctcccagcgctactcaatgccgtatggggagcagaaagcggttctgacggatatcggaacggaggagctcgcccatctggagatcgtcgcggcgatcgttcaccagctcacgagaaacttaacagcggaggagctggaagcgcagggattcggcccgtactatatcgaccataccacggggatctggccccaggcagccggcggcgtgccgtttaat

SEQ ID NO: 2091 - DNA, 899 bp, Unknown
  gut microbiota DNA sequence
gtgagctaagtggtgggagtatgtcacgacagacataaagcttgtttttgaccttatcagatattcagacgatgaagaaaagctggctcagcttgtgaaagaggaaccaggatatcagaaactggaatgggacgcctacgaactggcggttatgtatacaggaataggagagaaactggatatgaaatgttatgaaactgggacagtgaacgtgtgcaaggggattcttggaatagaagaaaaggcgaggagagccggacattcagcgggaaaaacagaaggaaaaatagaaggaaaaatagaaggaaaaatagaggggcagcttttggaacaggtccgcctgataacgaaaaaagtacaaaaaggtcaaagcatggaacagatagcggaaatacttgaaaaagatccgaaagaaatagcagatatctatcgggcggttgtttcatcggcaccgaggtatgatgtggatgaaatctgcaaagatctgatggaaaaacagagactgtaactcagatcaaaaagtatcacaaaaaattcacaaacctcccttgactttgaatatctgatgtgttacattacaaatagaacagtgaggtggtgaatatgtcatcgacaaagagagattattatgaagtgctgggcgtagcaaaagatgcggacgctgcggcaattaaacgtgcatatagaaaactggcaaagaagtatcatccggattccaacccgggtgacaagacggctgagcagatgtttaaggatgtaaacgaagcttacgatgtcttaagtgatccgaagaagaagaaactctacgatcagttcggacatgcggcctttgatgagacggccggatacggacaaggtgccggaaatgccggtggattcggcggttttggcggattcag

SEQ ID NO: 2092 - DNA, 10828 bp, Unknown
  gut microbiota DNA sequence
ggccgcttacctggagaatacccatgcataaaatataataaatccaagcggcgggaatgcgagcaatgcgaccagtgccagaatcacacatacagcgcctacaagatccgacccggatgaatgatatccgtatcgtctttcgtcacaattgcaatacggtccttcacaatggctgtcatggtatgaattatggtcatattcgttactcatatggtttcctcctgactgatttctttgatatttttataatacatcaaaagctgtcccttaaaaaggactcgtaaatttttatcatgcagcacctcgttccttttcgatcattcccataagttcttcacagaattccgcataatcgctatgaccgagcaggagcatcttgctatacagtgattccatggtcctctcaaaaccggcgacgtccttcttccatacccggcaggtaataatacagtacggagaaccatttcgtttaaattcatgaccgaatcgtacgggaacctgattctgcgcaaacagagcatctgcaagatagtcttcatggtcgacgtacatatactggcaagagaggatggaaagtccgcccagtttcaaaaaatttttcataagtttttctctccttacactttttccgtatcgttttcttatagtatgattataagagagacgagccggaatgtcattgaacctgtagtttaagaagatccgtgaaaaagaaatatccccgtcaataacgaggatatcttcgatactggtatgtaacagtctgctgaggatgataaagttatccaggctcggcagagattttccggagatccatttatagatcgcctgcgggttttcaaaaccaaaagctccctggatttcacggatcgtatagttctgctccgagagtaactgtttgatccgcttcccggtttctactggccggattgacagatacattggttccatttgctcattcctccatgattctgctccatcccgaaacactgtccttatattaacataaaactgagaaaatgagtagcagaaaattgctttttcatgatggctggtgattttataggacaccatctatgctatgatacaggtatcagttccgccagtcggattttcattctggcaaatttaagaatttattgtatactatcactatatagtatgaaatagcttgcaaagaaaagggaagtatgattatgccaaaaggaaccaatcagaaattaaaattatatcgtctggctcaaattatgctggaacagacagatgacgagcattatatcacgatggcagagatcatggaggcgctaagacgatacgacatcactgcggaccgaaaaagcctttataatgatctgcgtgacctgtcctcttttggaatcgaggttgagggtgagtctgtcggcaatcgttaccattatcatgtggtcagcagaccatttgaactgccggaactgaagctgcttgtagatgccattcaatcatctaaatttattacagaaaagaaaacgaatattctgatcaaaaagctcgagaaactggtaagcaaatatgatgcccagaagctgcagcgtcaggtttatgtatccggccggatcaaaacgatgaatgaaagcatctattattcggtcaatacgattcatgccgctatttctgaaaaccggaagatcaaatttcaatattaccagtggaacgcgaaaaaggaaatggaattgcggcataatgggaaatggtatcatatcagcccatggggactcctgtgggatgatgagaattattatatgatcggttttgattcagaggctcaaaagataaagcattaccgtgtggacaaaatgctgaaaatcaatttatcagaagatccccgtgatggaaaagaagctttctcaaaactcaatatggcagattataccaaaaaaagttttggcatgtatggcggtaaggaagaaaaggttaagcttttgatccataatgatctggtcggggttatcattgaccgatttgggagagatatcatgctgttcccggcagatgcagatcatgtcaccgccaatgtagatgtccgtgtcagccggcagttcctggcctgggtattttcactgggcccaaatgtaaaaattctcggaccggaggatgttgtggaaaccatgaagagagaagcttcccggctgatggaacagtacggaggctgatatgtcagtcctccctcaatctcaccacattccgcgccgatcgtctgcgttcttcctcctgggcggcataatgtttccgggtcgtatttacgtcgttgtggcctaggacggaggcgacaagatagatatcgccggtttcccggtagagactggtaccgtatgtgctgcgtaatttatgcggtgtgatcttcttaagaggtgtgacaagcttcgcatatttctttacaaggttttccacgctgcggacattgatccgtttccgctgcatggagaggaagagagcatcctcatttcccgggaccgcatcgatcatttccctctcattcagataattttccagcacgtcacggacctcgtcgctgaaatagatgacggattcttttccgcctttccggtagactctggcgccgcaggtgtcgagatccacatcgttgatgtttaagccgacgcattccgagacacggatcccggtcccgagaagaagtgacatcatcgcgaggtcccgaacttttgttcgttcatggtaaagcttctgcttttccgtcaatttatcgccttcctcaacttcatcgaggagttttgcaacctcatcgatctccagacggatgatctctttttcatgaagcttcggcatgcggacaagggcagcagggttcttctcgatctgctcattccggaaaaagtagctgtaaaagctccggagagaggagactttccgcatgagtccgcgttcggtgttgacaatatcatcacttgtctcgcccggatggcatttcaggtagtcgatgtattcttccagatcggttaccgtcagtttttcgagatccgccggtgtgagcgtatgagccggattattaaaagttcccggattcgccgtctttaaaaactggaaaaagatcttcagatcatatgcataggcaatcctggtccgtgtggacgtgctcgtttcgatcccgcggaagaagtcagagcagaaagatggaagttctttctgaagctcccgcagttttttgatgttttcgatatctttttgttcatggtaggagagtgtagccatcaaaattcctcctttgttacagatgaagctttcggcagatcctgaccggcagcaggagagtgctgtccgggaagcgcccatccatcaatattaccggataccaccgcatggaacagccgttctttgatccccggattttctttatttagctgtttggttaaatttttaacatattcgcgttttgtgtgaccatcagccggacacggatttttgcacaccggaagctgatacttgtttttgaaaccgatcacatccgcctcggagacatacatgagcgggcggatcaccgtgagttccgtgcggtccagaaaggtcttcggaggaaatgtgtagaaccggccttcatacatcagtgacaacagcatagtttcgataatatcgtccttatggtgcgcgtaggcaattttattgcatccggcggtctttgcctcaagattgagggcgcctttgcgcattttagcgcacagagagcacggattggactcatgacgggtctcaaaaacgattttaccgatttcggtagggattatcgtgagcggcacctgaaagccgtcgcaaaaggcctttatgccgctgaaatcctgaattccgaaaccgagatcgaccgtgaatgcgtgaagtgtaaaatgtttcggataaaaacgctgcagctcatggagtgcataaagaagagccaggctgtccttaccgccggagacaccgacagcaatatggtcctgatcatcgatgagatcgtagtcatcaacggcctgacggaccagacttaaaagacgttgtaatttcataaaaaacctcatttcatggaatatattggaaatatgggtgcttttgcgtggaactattcgataaactgttctttcacgaatagttggaaatctatgaatagattactctctttttgcgtttttggcaatgtaggtacttttgtcacaatgatgtaggcaaattgtcacaaagtgctccttttcgaccattttgacctgcttttgatgaaaatactgtgtgccattatgtcacaaagtcggcaaatataggtaaacttatcacaaagtcgacacttaatataggtgtatttgtcacaaagtcgttattttcgtataggtgaagttatcacaaagtcgttaaatatgggtgaaattgtcacaaagtcggtttcattctgaagccgacatttttccactttcgtcatatctgtatacatgaagaatccctgaagaatcctctaccataagataccacagattatgaagcctgtccaatagattccatatgcgatccttcttgcatcgccatgaaagattctcttgctgcagccaactctcttccatcgccattttctttaattcattccaatgatatcgaatatgatcatcgatgcacactaattcccagtcactttcgtttaaatgttcccacggcagcgaatcctgtctctgttcaaggaaaagatccacataagccggtgtaattctgagcttatcatataaccctgtacatggacgggaaatcagccttagacttgattgaaaactgctctccctcctgatgacagccatttggtatcgttccagaagttttttgatcatttccgactcatcgatgttataagtccctgccgagcctggacaactttattattctcagcagattattacataccagtattgaagatatcctcgtcattgacggggatattcctcgtttatgggcttctttaaaccacaggttcaatgacatcttccatctcctgccttataatcatgtcataaggaattgatacgaaggaggcgaacatatcatgaaaatgacttcggcttatgccaataaactgctcaagaacctggcggacgaaaagtcctactggacaggcaaagaaatatcatccagaacttatattgctgccatcaacgaggaaccggtcatcccggagtatgactactccgccatgtcagagacattaaatgaaatcgaccgcaagaccatcatcatcaagcacgccctgaacctggccaatgccaccgcaaaaatcccgatcggcgatacggaaatgagcgttgacagtatcctggtaagaatggcacagcttaattcccgcaggacaaccctggacatcatgcggaaatgcctgcctaaaatgagggaaaaagaatactctttcaactccaggaatgccgttcctgaataccgctataccaattacgatctggatctggtaaaacgggattatgaacgcatctccaaggagatcatggaaatgcagattgcgcttgaccggtacaatcagacatttctgttcgaagtggatatttagatttattccgtacaggggactttttaaatgcaaatacgatggttaaacgttcaatggcatggattattttgttattttttatccgttgtatcttaaggttcatggtacgctaatcagataaatagaaatgggaattatcctcctgtagaaaacccgtgagagatcacatcggtgccggggtacggtttcaggtaccacagggtgcgggatgtaagttccgcatccttttccttgcagacaatcacaaaaaggagcatacatgaaaaattttctgagacttggcggtctctccattctgtccgtccagtatatgtacattgatcataaagactaccttgcggatttcctgctcgcacaaaaccatgtttctgtgcacttcggagacgaattttctcgggaagattccccgtaccgcatcattctttgcaaagtcagaaggaaggatacggcaaaatttgagaaatccatggaatcgctctacaacaagatgctgcttttcggacacaacgactacatggatttctgccatgacatcatggagatccttgagcagaatcgaggtgccgcatgaagaaatcatttgtcccgatcaacaagcagagtaaaaaggcaagaaaagcatatcattccgcacagcgttccacctggggcgtcctgaatccggcaacgcggaccatgccaaacggcagggcatataaccggaagaagcagaaagccaacgacagaagcggcagggaaccatccttcgactccctgtcgcttcctttttgtctggctctgctgatcaatcccacagattccagaaatactttgtcataagctccatgccccgcctcaggcactggtcccggtacttacgcagttctccctcagccgccagccacttttcagaaatctccgcatattctggcacatcgctcattgtatacaaacggagagtatgctcccgcttttcccgtgcaagatcctcttccgttttcaatttttctccgaacatgccgtattttgctataaattcttcctgtgccaactcatgttcttcctcgtatcgattcttctttctgcacgtatcctcatttgcttcccggaacagaaattccattcttctcagaatacggtcccattttcggatgttttcttcttccagcccctcaaaagagccagggtaaccgtggctgttaatgcgaagatcatgaattatgttcggaacaaccgtaaggaaccattgatcaatcgaccaggtatcgcgatagcaatatccgtaccgcagtcgctggtaaatgcagatcaggtcctccttgtacatggacaatctcttcaggatcggttcatgtttcatatgcggcagaaacacagaatatgtttctttccgaatcttctttgttttgcatggatgagtccgttccgcaattcttctgacattcatcattccatgcacctccttttctgcaatacttctgatacgatcattatcgcacattgcagaaaaatccgcattgaacttttggtttaacgcagaacttataagttccctttgtcttttaaaatctcaagcaggacctcttccactttcttcatatcgatcggttttgcgatatgtgcattcattcccacggaaagagccctttttgtatcttcctcgaacgcatttgccgtcattgccacgatcgggatgtttgctttttccttatccgagaatccacggataatctgtgttgctttgtatccgcccatgtttggcatctggatgtccatcaggatcagatcataagttccggccggtttctgttcaatcgcgctgacgtaacggattccgtccttgccccgatcaatctgaagccccagttcttccatcagtgttactgcgatctccgcattcatttccgtgttggattttaaaagcgaatcgaaaattcgacttcaaacctgtctttcaaaatgagccgttgattctgccgcaaggagacaatttcttttgccctatcggcttctgaatgccttttactcagcttttccaagtcctattgtaagaatctgctttcgctattctccggcctccagatacggcaacagcgccctcacgatatcgcaagagcgccagatatattcctgtaaaataacagatcccttactcattttcatgtttctgattttcccgtttccttttcagaacgatcagtccgatcattgcaagcagggatccctccatcaaaataagatacagccacgtcagagattcatcccctgtttttggcgggatttccgtagatgattcttctgttgaggattcctccgggattgtctccgtaatggtctccgtctgtgattcttccggagtggatgattctgtatccatcccggtcgtacctttactcggatcagaatgatctgtttttgtggtcgactccgtatgatcgtcatccgaatggtgatgatccccggaagaatgctccggtcccgtcgggtctgatccggatgttccggtttcacccggttttgtcgggccgcctccggttcttgtgaacttcggttccagctctacattcatgtaatctttgtctccgatccgggatgggattcggatcacagccggagcactgttgtatgtatatccatcatagacaaagtcggatcgctggatcatcagataaacacccggatccagatcatcgaactcaatgactccatcgcagttgctgcttccttccttttccagaaacttcttttccacaacatactcataaagatcttttgcagttttttcctgagattttgcatccgtgaaatccagctttcccttaaaatctgcaaaatccagtgtcagcatccagtcattgttttcccaggctgccacataatagagtaaaaaatccacatctttaatcccgacttcatgtcctttatcatcatcaacgatgacatcgatctggattttgccatgctgatgagcatcgtctgcataaaccggaaataccgcaccaaaacagagttctgccaaagcgagaaggaacattccacaaatccatattttttctttccagctcttactcttcatcattctcctccgatttcttccggctgcggaaccaacgaacaattcgtatgatcgtcacaactacccagatcaggaatacggcagccagacccatgatcagcaatttctgtgtcagaggcatctgcggcttgatctccagttcttcggcaacttcagcagcttcctcataagggatccgttctccccgcaccaataggcggtgcgtattgatcatatatggtgtacaggtcacaagcgttacctgatcggctcctgctgtgactgcaagggcttccgtttcgcttggaagcaccgtcaggatctgatccacctgatatacgagcgtctcatgcagaactttgatgtaaaatacatctccttcttccatctggtccagatccgtaaacagtcttgccgtcgttaatcccctgtgtccggacagcaccgcatgcgtactttccccgccaaccggaagtgacgtgctttccagatgaccaactccggactgcagaacctcttccgtcgtaccgtgataaattggaagcagtgctttgatcttcggaatctcaatgtatcccatcattccgtcccctcttggattcaagagagtttcatattcttcattttcctttttaattccacccgcaaacggatcacctgctgatgcaccgatcagtcgtttattgtatgcacgggcatcctccagcatctggttttccatatcttccgttgtatgcgaaacctgttgctggtaatcacttaccacgcttgttccgtgcagtgtattgacatatttgctgacggtcgggtacagcaatacagagaagccaatcaaatatccgcatgttctgattatttttccaactactttgttcatttcattaccttctctctgttgtcgtacttattttgatattccaggagggaacaaatctccctcccggaatgaaaatccatcatcagcagacgaacggattattttgcgtttttacgctttttgcttacaaggctgcttaccatcataacaccgatgattgcaacgccaacgatggtaaatacgataccgccattaccaccagtagacggaagcatggtaccagcattgtttcgtaccggaatttttgcttttccatcaatagcatttactttaacagtgttgcttgttttatccggcattgtataaacgacatcaaaactttccagtttcgttgcatcatcagcggcatatgttaatttattgatttctactttgatgtcgccaaccagcttgttaaatccatccggagcttttgtctcagtcagataataagtgccatcttttaaacctttgatagttacaattccagtatcgcctgttgtaatataatcaactttagtctctgtagcatcctttgcctgacggtaaactccgctgccttcatcgaccagactgatttcgtcgcccttttcatcgccatttgctgcatacaatttgaactgtgcgccagctaatgcggttctattgccttctgcatctgcctgctgatcatctgttaaggtatatttgtaaatgtcaaatgcaaaggtataaacatctgcatgtacttcctcagaagtaccggttccatctgtgctcggatcattgctgtatgtaacacttgccttattggtatttggattgatgccagtaacagccttctcatttacagttgcagtgtaggtaaccgtaatggtttcaccaaccggataaacttcaatattcggagtcatggaaccagctgttcctgttgccatattttttaattccagggttaagctctgcgcatcaccatcaaccggatttgttaatttatagtttgttttacccagatcattatcgccaatctttacacttgtcagttccttaaaggttaatcctgcagataaagtatcgttaatcttaaatacataaccgttgttgtaaccgctgacatccggtaccttagaagtaatggtataggtgatcgtatcgccaggttttactgttcctgcggcttctgcagtaccacctgcagttgtttttacttttttctctaccgtcggatattcactctttaaattggcatctacagtggaatttccatccacatccagtaacatagccggagactttgctgtatttttcagcacgcttgcacctgcagggaataccagataataaccagcatccagagaaagagtggttgtatctgctgttgcagcaaccgttttatctgctg

SEQ ID NO: 2093 - DNA, 3918 bp, Unknown
  gut microbiota DNA sequence
atctacagtagtaacgaaaacggtgaatataaggaatggaatgcagagaataaacctggactatggtatgtaaaggcagtcgtaagccagagccaaaattacaaggaagcggaaagcaccccggtcgcatttacagtctccaaagcgcggctcgttccttctgtaaacactcttcagtcaaagacttatgatggaggtacaaacgctgagggaacgcttacgctcagttctgctgacggaaaaccgatcctgccggaagatgcgggaaaattaaaggccaatggaactttccaatggacctccagtgattccgggacagatactgtgaatgtgacagagatcaaattggatccgaaatttgaggatcgttatgaacttacaacgagtgaactttccaatgtttcctgcagcggtgcaaagatcgaaaatgcccaaattaagaatgtttctgtacggcagatgatggaattgacctacaatggaagggaacagttgccggaagtcacggcaacaggaagtacgaccggtggaacggctatcaccttccgctatggcctcacagcagaacaggctgcagacgaaacgcaggcattaaaaactgcgcctgccttcaccgacgccggcatctatacggtatattacactgcatctgcagcaaaccatgattccgtatccggcagctttgaaatcgagatcaaaaatgcctcgatcacaggcgttgacgcagccggatatacaggaatctacgacggaaagtcccacggaatcaagatcacccttaccggaaacgctggagacggtgagatcctttacggtgagtccgaagataactgcacgctcacagaaagccctgtatacaagaacacaggcagctataccatatactacacggtgacaaagaaaaactttgacaccataagcggctccgcaaccgttgcgatcaccccggcacagctcactgtgacggcagaatcaagaaacgtgacctataaggacgaaccgccggtatacagcagcacgttcgaaggtttcgtaaacggagaaaacacagaagtcctcggcggaacactctcctacgagtgcgcttatgcggccggcagcgatgtggacgagtacgagatcattccgtccggtctcacagcggaaaatggaaactatgtgatcacatatcagccaggaaaactgaccgtatcccaggcgaagccggagttcgaacttcggaatctggatcagttaaaacgtgtctatgatgcgaaaaacaccgcaccggaggcatggacggacagtgatggaaacatgaccgtaacgatcaaaaagggcagcgagatcttaacggaagcgccgatgaatgccggaacctacacggtggaagttcatacggaagtcggaaagaactacgaggctggaagccagatattctcctttgagatcaaaaaagcaccgctcagtgtaaaagcggtggatcagaatgtcacagttggagatgcgattccggagtacgcagtcctctacgaaggatttgcaggaacagataccgcggatgtgctgaacggcagcctgaagtttacctgtgaatacgcgccagacagcgcggcgggcgattactcgatcctgccgtctggtctgacatctgagaattacgagatccactttgagaatggaacacttcatgcagtccgcagggcaagcagtggatccgatgattccgacaattccggcggttccggcagcacaaagaacccggtggcaacgaactttggaaagaatgtttctaacaacagctcttccgaaaagtatgcacagggaacctggaaacgcgataataagggctggtggttcgaattcaaggacggcacctatccggcaggagaaaagatcagtgatcagaacggtgaaaagctgggctggatccagaaagacggaaaatggtgggctttcggttctgacggctatctgaagaccggctgggtgttcgatggcgcaagcggaaaatggtatctgcttaatgagaagaccggaatgcagattggctggtattacgatgagtcaggacgcttctggtattaccttgatccagtgagtggagctatgctcacaggctggcagctcatcaatggaaaatgatactacttttcaaagacatccggagctgtgccgcttggctccatgtacagagaaaccaggacaccggatggatattatgtcgacaaagacggtgcatgggatggacttgaagcaaaagaaaattaaggcatgaagtaactgttcagtaggtctgcgcatttactgcgctgaccgtaagaaaacttagaatagaaggcaaaaatcctatcggcacagccgatttggaatggatttttgcgcgtaactgtgagggcactgaacagttacgacatgaagtaaaaaagatccgcaggatcctaaaaatgggaacctgcggatctttctttttctgcaatcgaaattcgtgtgaaatgaaaccataatacgcttcacttccggcatttatgcgatatttaagcgaaaaaaaaatctccccatgcattgctgcatgaagagacgatgattttcaccgcgttaccactctgattcgtccatagaagacgctgctttacagggtaccggccggataccctttccctgtaacgggagaacccgtttccgcctaccgttcaatttcagcggaaccgcaatgtaagatagtcaagaaaaagtttgagaaattacagtgaacgatcgaaattgcccggaaacattttgctatttctatcatgattctgcagacggaattaagatcaccgatgcgtagaacatcccgttcttccattcaaaccgtgcatctccatggtgccgttcagcgatgagacggatagactgggtgcctatgccggggccactgtgctttgtggagagaaaacgctttccttcaagaactggcgacttccggcaaggattgtccactgtgatggctatgagggaggtgccggtctggcggatatggaccttgatcgcgcctctttctttgttttcccgacatgcgtccaccgcgttttccagtaaatttcccaaaagcacgcagaattccggctccgggaccggtatttctttttccatctgtgcctgaatctccagcgtagttccggcgttttctgcaatctgagcgtagtagccaaggatcgcgttgacggcctgattttcacagtaagcaggcagccattccggcatcatatgtttctggaaggacgcgagatagtctgagatcgcgtcaagatctttgttcgccgcgtatcccgagagcaccgtgagatgctgacggaggtcatggcgggcgatccgcgtctcatcgatggagcgttggagattgcggtactgggcactctggagctgcagaagctcattttccctcaaaagtctcgtgttctggttcatctccgatgccatcaggtagaacataaaatagaagagcaggaggaaggtcagaagcgccagaattaaaatcgggtaaaacttcatgacccggtttgtgtagagcgtctcgtagtagcgcggacgaatcaggcggttcagcaggaagaatgccgccgggaatacccagaatatataccaggtcttcgccatttcgatatcgtccaccagccatttcgcggcatgggttgccggataccatacgatggccacgatgagaacggagagcagcaggtggatccccgcgcccggaagcgtgaacagaccggagatgttcgtccggtcaaagagggcatctgcgacgagtgtcaggtttgtgatacaggagaagaccgcgcagacggcggtcaggatactgaacggcttccagagggcgagatcacagacccgatggaagaataccgcaaacaggataaaggacggcaggacccagaagtctctcgcaatcccgaa

SEQ ID NO: 2094 - DNA, 347 bp, Unknown
  gut microbiota DNA sequence
gtttacaactaccttgatatgggacttctgactgccagaaacgttgatctgaaacgtaaagtgaagtttaaacccagaaaagtccataaatcacagatatctgaccgccgtgtctttaatggcagaacttacgctgattttcaacagttgcacctggaatcttttgtagagatggacaccgtccactccgctgttggttcctctaaaacactgcttaccttcttttttacaagggaaaagctgtttcttgcgttcctcatgaaccggaatacggaaggatctgtacgactcgttttggaccgtttagaaaagcgttttggtaccttcgatttcctgactctgtttga

SEQ ID NO: 2095 - DNA, 166 bp, Unknown
  gut microbiota DNA sequence
gaactgtgcgcccggtccgaacttcgggaagagaacagaaaagtcctcggaacccattgacggattcttcacataggaaacatggtcagcaccaatggtctttgcagcggcctcagcaactgcctcgatgatggaatcgtcatttacgagcggcggaactccgatt

SEQ ID NO: 2096 - DNA, 422 bp, Unknown
  gut microbiota DNA sequence
ctcacagcaaagtatgaagatgaaatgattgccattcgcagacatattcatagacatccggagctcagcaacaaggaatataagacaacggagttcatccgcgaaaaactgacggaatacggtgttgagatcgctgagatcgggatgaagaccggcgttgttgccgttatccgcggtggaaaaccgggaaaaaccgttgcgatccgcgaggatatcgacgcacttccgatgaaggaactcacaggacttccgttcgcttccgaaaatgatgacgcctgccattcctgcggacatgatatccacacaaccgtgcttctctactgcgcaaaggtattatcagagatccgcggggagcttgccggaacggtcatgctgatcttccagccggcagaagagcatatgggagccggagagcttgtcga

SEQ ID NO: 2097 - DNA, 681 bp, Unknown
  gut microbiota DNA sequence
attcgcctccgagaatgatggtgcctgccattcctgcggacatgatatccacacaaccgtgcttctctactgcgcgaaggtattatcagagatccgtgaggagcttgccggaacggtcatgctgatcttccagccggcagaagagcatatgggagccggagagcttgtcgactgcaatttcacgcaggttgcgaaaccggacgcatttatcggtctccacgtatcaccggagatcgatgccggaagcatcggattaaaaaagggaccggcaaacgcgtccaatgatttctttaatatcaagatcaaaggaaagggcggacatggcgctcatccggaaaactgcatcgatccggtcgtaatctccggttatgtgatcacacagcttcagaccgtgatctcccgtgaaaactatccggtatatccgggtgttcttaccatcggcagcatccacggcggaacagtaaacaatatcatcccggattatgtggagatgcacggaacactgagaagccttgatccggactgccgcaaaaaaatgatggctgccatcgaccgcgtcgtaaaaggctgcgccgagtccatgagaggaactgcggaggttgaatgggaaatcggagttccgccgctcgtaaatgacgattccatcatcgaggcagttgctgaggccgctgcaaagaccat

SEQ ID NO: 2098 - DNA, 801 bp, Unknown
  gut microbiota DNA sequence
gatacgatccgacgccggttcgaagttcttgccccgtacatggcgaaggagaatccggaacttgcggagctgttaaagaacccggatgagaatctggaaaagctggttccgtatctgaaaaaggatccggcgctggatgccatgttccacacgacggttgttccgacgatgctttccggatctgcccaggcgaatattcttcctgcaaaggtgactgctgttgtgaacagccgtgtccttgaaggagatacggttgagagcgtaaagaaacatctggaagagatcgtgccggatgaggtggaggttcgtgtactgaagggcagcgatgcgtcaccgacatctctgtatgacggcgcaatgaaggatctgcttgtcgagatcggcggtaagatctatgggtatgtgatcccgtgcccggagatgatgctcggaggaacggatgcgcgcttcgtctatgatatgagtgatcgcgtttatcgtttttccacaatctatgcgagagaagaccaccatgtccatgcagccaatgagtttacgggagtagaagagttggcggacagcatcgatttttacatggaacttctgacaagatacggggagactgcgaaataaaggcgaagattgcaaaaaacgcttctgagggagattctcatgttggaatcttctcagaagcgttttttcacttgtttaggcatcctgacacttccggacctgtttctgatactgctcaccccacgtccacatggcgtccatgatcggtttcaggctgcagccgaggtcggtcagggtatattccacgcg

SEQ ID NO: 2099 - DNA, 2448 bp, Unknown
  gut microbiota DNA sequence
agtcgacggaaaacctgtggatctgagcaacaaggaattcgagctgctcacctactttatggaaaacaaaggaattgcactttccagagaaaagattctgaataatgtctggaactatgactatttcggtgatgcgagaacgatcgatacacatgtcaagaagctgagaagcaaacttggtccgaaaggcgacaacatcaagaccatctggggcatgggatataaactcgaggtggatgcatgatgaaatcggtacgttcccgtctgacggtcacgttcattggactgatcgcggtgatcctggctgtgatctggggcgtcaacaagtggtacctggaagacttctatgtgacgaagaaagtccaggcattaaacgccatgtacacggcgatcgatgcccagatcgcggagaataaagacaacgggatcacgatcgaggaagcgatggagcgcgatcgcgatgcgaacggaaacatcacggaaggaaacttacagcgcctgatccggaacttcagcgacagtgcgaatgtttcggtcctgatcattgataacagcacggaggacgcgacggtctactcgacgtcccgggatacgaagttcttaaaagaccgcgtggaccggtatatcttcggctgggcaaaggcaaagtatacgatcctggaagaaaacgaacagtacaagatccagaagacgtacgacccgcagcgcgagagtatgtacctggaaagctggggctttttcacggacaacagcacggccttcatcatgagcgcgccgctctcgagcgtcggggagagcgtccgacttgcaaaccagttcctgctctatgtgggaatcatcgcagcggcgatcggaggtctggtcatctacctgacagcgagacagatctcaaaaccgatctaccgcctgtcgaacctctctgagcggatgtcgaatctcgatttcgaagcgaaatatgagccggaaaagcatgagatggaggagatccaggtccttggcaacagcatgaacacgctgtcagaacgcctggaagagacgatctcagaactgaaatccgcaaataaccagctcacgaaggatattgaggaaaagacaaagatcgatgagatgcgaaaagaattcatcgccaatgtctcccatgaactgaaaactccgatcgccctgatccagggatacgcggagggacttcaggaaggaatgggagaggagaaagagagccgtgattactattgcgatgtcatcgtggatgaagccaacaagatgaatcagatggtaaaacagcttctgacactctcttcccttgagagcggaaacgacaagccggtgatggaccgctttaacctgacggaactgatcaaaggcgttgtgaatgcgtcaaagatcctcattgagcagaaccagatccaggtggagttcgacgatcagacaccggtctatgtctgggcggacgagtttaagatcgagcaggtagttaccaactatctgagcaatgcgatccaccacattgacggcgagaaaaagatcatcatcaggatgatcccggagaacggactcgtccgtgtatctgtcttcaataccggaactccgatcccggaggaggcggtcccgaatctctggacaaagttctataaagtcgataaggcgagaacccgcgcatacggaggaaccggaatcggtctctcgatcgtcaaggcgatcatggatgcgcacaaccagcagtatggcgtaaagaactgggagaatggtgttgaattctggttcacgctggacggaagaaattcataaatatatatggaagaaagagaacccggaacattttggatgtgaacccgggttcttttttgcagtccgggaatctgtgaaaatatgaatagatgagcatatatggtacatgataatggataaaatatactatatgccgtaaaaatgaaacacatgcataacaacgccgtaaaagatgtaaagaaaagcgaaaaaacatgtaaaaaatggttgacttttggacggggatttgatattataatactcgccttgagaaacagggcgaaacttattgagagtcattaagaaaacttcttaatcgcttcaaaaaaagttttaaaaagttcttgacaaaccggaaacggtatgatagaataaacgagttgccactgagaacgaaagcgacaacgaaacaaagttccttgaaaactgaacagtatgtaaaaccctgaaaattcttataaaaatggtcttttggtttagaccatgaatgagaacattcagaacaaaacctaacaaaacagtagaacggtttaaaaattagccaagctaagttttgaacctggatacaaacactttaacatgagagtttgatcctggctcaggatgaacgccggcggcgtgcctaacacatgcaagtcgaacgaggtaaatgagatgaagttttcggatggattcttatttacc

SEQ ID NO: 2100 - DNA, 28206 bp, Unknown
  gut microbiota DNA sequence
tgttagcaaggttctgaaagcatttttgagcgatgttagcaaattcgcgattttgtttgcaacttcctctaatttctgctaacaaatgtttgcaagttcctttggtaaaaatcgaacctctgacttaccgcctttcttagcaaaaggccaaatctcgttagcaaatgttagcaaaccaaggttttttgcaaaaaagccacaaaagccgcagaaataagaaaagccgaaaaccctgataaatcaaaggttttcggcgtgtttgctggcgtccctggcgggattcgaacccacggcctttcgcttaggaggcgaacgctctatcctgctgagctacagagacttatattaaattgagactggcaacgatcacttttccccgtaaggcagctggtagagcacaaccttaggaggcgcttgttatatccatttaactatgggaacaaatgccgtattttcgggcttttcagccttttcggtcacggcgaccaactttatgaactccatcgctttcgtgatggagcatctgatttctcattttgacatttgtagttgctttccgcagaaaacgataatccacaaagcttcccgaaaaactacgatatatatattaacaaacaagtgtcaaaaagtcaaggtatccggaatttcctgtaaagcaaaataccgcacaacggaattggcgttaacgttgtgcggcaataatttttccatgggtgttagaaaaattatgaaattgtgaaaaagaaattatgaaaaaaaaggagcggtcagcgcccgaaggcactgaccaaatgaacagttattcatctattttaaatctcattttcccccgagaataaccttctatctatattgaaattactctgtaaaaatctggatccattgatgaccccattctgaactattgtcactataatagccaaatcccattttatgagcatctggatttaagatatttgcgcgatgaccttcggaattcatccaatctgtaacaacttcctgcggtgttgtctgtccccatgctgcattctctccggttgcttcatcggcaactccaaattcatcgagaactgtaaagcagctggaaccgtccgggcgtgtaattcatgtaaatccaaatgcaagaagagtattgtaaaggcacctaaagcgcaatttacaatactcttcaaagtgcaactggctgccattttacaggccctatagctttgcgtcacagcctttcgactgctttgccgatttatgaatttacaatcctcttcaaggatcttctaattatttcaaaacaaaaagagcgttgttttaaatacagtaaaacaacgctcttgcgagtcatttataagtgcaactggctgccattttacaggccctatagctttgcgtcacaacttttcagttgttttgctaaatatttaattaaacagctttctgtctaatctcatactaccactttcgtccgtcttcgtcaagtcttgacaagataattttcaatatttgtactatttatgtgcaacaattgcaacataaccaccactctgatatccaggaacaacatcctctacatcttcattggtgtacatcggatttttcaaaagtgtctgataaaaatcaaaatcatggaaaccgagcgccttcaaagcatcgattttctcttctgtggaatgccatacacctgcacagcataattccaacggatacggcaatttcggcataacgccattcagatatggatgatcaaacgtaccgactgtctttgcaagaagatacatgaaaccgaatgcgctttcctttggaacatctaatgaaataaatgtgccatttggcttaagtgcctttttacaaacatcaaaagcacgtgtcagatcttccatataactagagctaccattcaggtaaataacatcgtaagcattttcctccaattctgcttcctcaattgcaccaaatgcaataacatttacaccgcgcttctgagcaattgcccccatatctcgcgaaggttcgattccctcaatgccactgcaatcaatcatactttcaaacagaccgctgccacatccaacagaaagcacacgcttaccggcaatgtcgccaagtactttctggaacaggcgaagctcgctgtgaaacaggttctcgttttccataaaccaggcgtcatactgcgccgcatagccatcaaattttggggtcatcgtcaaataatcctttctgattattaaaaataatttcgcacggtttagacaaaaaccgacattatttgccatatctcccattattcagttgaagttttaccctttgaaagttataataaaaccatctatatataaatatatgaaacaacacacttgcaaaaggggatcatacatatgacattaagagaatgctatgaagtgatgcacggcgattatgagggagttaccgggagactcgtttcggagagtcttgtcaggaagtttgcggtgaaatttttaaatgatccgagttttgggcagctgcaggccgcgatcgagagtggtgacggtggggaggcgttccgcgcatcccacactttaaaggggatctgcctgaacctcggatttactgctttatgtgatgccagctccgctctgacagaaaagctccgcggaaacaatactctggacgatgagagcaaatcgcttttcgcacgtgtccatgaggaatatgaccgcacgatccaggcaattgaaaagctcgatccgcagtaggcaatgacagtggacctgaagtaaccggctataaatttacattggggatagaatatggaaaagattgcgttccagctcgcgtggctgggggaacataaggtattgatatttctgttttttgcggaattgctggttgcggcgtgccttctgatcgttttttttcatctgcgcctgtcctggcgcaggttaaattttaacaaatctaacgacaagggaaatcttaacgggtttgacctcgtggatgacccctgttttcttctccgctcttcggacctttttccactctatgtgacaaaggattttgaacggcagttcggtcttacgaaggaacagtttaagaacgacgctctctgccttgccccgaagcttccggaggaacaggcaaaacagcttcggaaagcatataacgcctgggacgggaaaagtccgatccggatggatatcgaaccggtcgggatggatgcctgctaccgcctttctgtgacaaggaaagacggtatggacctgttccacttccgggatatcacggaggaaaagagacagcttgatgagatgcgggcagatcttaaggccgccgagaacgtaagccagtcgaaatccgcttacctctcagagatgtcccatgagatccgtactccgttaaacggaattatcggtatgctgaacctggcgcaccgccagcttcacggacacagcaccgaggactatatcgtgaaggcggaacagctttccgagtttcttctgaccgttatcaacgaagttctcgacatgtcccgaattgaggtcggtaagatcgagcttgaaaataagccattcgacctctatcacctggcagaccagatccggaacctgtttaagaagacgatcgaggaaaagggggtctcctatatcgtcgagatgaaggacgtggacgtccgctatgtggtcggcgatgaggagcggatctcccagatcctcgtaaacctcctctccaacgcctcgaagttcacggaaaaaggcgagatccgcgtgacattccgccagatgatgcggaatgaaaacagtgtggagttcctgttccgggtccatgataccggaaagggaatggatccgaagttcatcaagcggatcttccacccattcgagcaggagaacgccgggatcacaaaacagtacggcggttccggtctcggtatggcgatcacggacaagctgatccagctgatgggcggctcgatcttagtcgagagcatgccgggcgagggatctgatttcagcgtatatctgacgctgccgctggcggatcacccggaaaatcttgctgcagatgatactgcacaggacagcgacgactttacatatgaaggctgtaatatcctgatggcggaggataacgaggtgaacgcggagatcgccgtgagcatcctgggattaagcggtgcaagcgtcgatgtagccgtaaacggacgtgacgcggtggataagttcgctgcctcgctgcctggaacttacgactttattctcatggatatccagatgccggagatgaacggacgggatgccgcccgtgcgatccgaaagctggatcataaagacgcgaaaacgattccgatctttgccctgtccgcggatgcctttgtggaagatcagaggctgtccatcgcgagcggcatgaacgggcatttttcaaaaccgatcgatttcgagaagattcggaaggaaatcggacggacgctaaaggagaagaaatgaaacacgataagaaaccggaaaatgatttgaagcggcttacgatgctggccgccggaactgctgcctctgtagcggtcctcgcgggaggtgtgcgggtctggaacggataccagaacggaagtctgtttcgcccggacctttttgtcagcacccacgattaccaggaaaaccagatcatgttcccggagaaaaatgattacggacagccctcccagacagatacctccgacgataaccatcgcctcgaacgtgatccccaggcggatgattcctacggaagggataacccggaagcttccggctatcagatgccggaggacggacatgtcgagacggaccttaaaaacgccagcaatcttctggtcagtccggagacttctgatatgccgtctggcgggaatctgccgcagggagttaagaattctgcggcggtgatcgccgggacatccaataacagctctgaccgatctgtgatcaagcttccttccggcaacggaaccttttccggaaacgggatctccgggcgggatgattccgatgacaattccggctcaggagcttcgggacgttatccgggcggaaatgcctccggcggtggtgccggcggcggtggcggaaatacaaatagcagtggaacgactcctgtgccgacaccgaccccggttcctgccccgacaccggctcccgccccggttccgacaccaactcctgtgatcgatcctgattatccgaataaaggtgataaaccgtctccacccgatctgccgcctgatataaattacccagcttttccatccgacggcatcactacagacagtacagagcatatttctcttaccttcattccgtcctccgtttttgactccggtgagacactgtacaatggcgcggttctcactgactggaagatcctctgttccctgtatgtattcgtggatgtcaaagataaaaacaataatatagtctcccggcatcgtctttcagactataatgagaatttccggatcggcgaatttccatctgtggcaaacggaaatttcactgtaaatttttactttcgccaaaacgcggatagcgactggatcgaatttccatgtccgatcaccgttaattatgcgaaatttatcgttctcgatgataatgggactgttctgagcgagtcatttgccgaaaagtccggggatagtatctgcctgttaaagcagatgcagcagtattatcttgagcacaaggatgaatggggcgacccagatgccctgaattccatctttcccggctggtccctgactgaaggcggcgaaccgcttggaaactggtttactccggcagaaccggggcgttatgtcttttatccggtggaccgcgtttctgtcccggacggccttaccgtctctgcctccgcaggctgggatccgacgcattctgacaactgctatgccgcttttctgcagcggctgtcttccgcgccggagggacttgatgtccttgaagttcctgaaggaatccaggaagtcggagaagatgacttctccggtatgtcttcgatctgcaatatcggcactctggtacttccaaacacggcgatcctggtgtatccgaaatattatactgtcctggacgcgtaccaggtccgggatgacaatccatgtttttctgtaaagaacggcatcctttataataaagaaggtacaaagatcatcggtatcccgcagagccgttttaacgctcttgccgttcctgagaacgtaacggatgtgaaacttcctctgaaaaattcgatcaacaagatcatcttttcttctgaggttccgccaaagatcgacctgtcccgtctttatggcacagagttggtcgttccaaaggaatattacacagcttattttgtagcgtggaaccagtatctgctttttaataacctcacattgaccacagatgacggacagaccccggaattcacattaatcgacggcggactttattccgacagcggaaaagtcctggaatatgtcctcgcggatcactccggtttctttaccgctgccgagagtcttgaagttgtaagggaaactgcgacggcggactgcaaagaattataccagctcctccttggcaaaaatctgaaggagcttgagccatacagcctgaccgcgccaaacctgacatctgtctttatttccgctgtgaacccgccaaagatcgatgtgaacaccttcggcgatatttcggaagcgctggaaggaggactccatgtcatcgttccggaggaaagtctcgctctgtaccaggatgcctggagggacgtcctgggcgacgcaaccacgcagcttttaaagggaacgaagctgggaacagtcgaaaccgcgagcggcttaaagtatatgactacggacaacggctctattctcctgcacgcgccatccgatatcacatcctttgatgatatcgaaaaagagactgacggaaccgtactctggagcgagatcggaagcaacgcgttcagcggctgcgcggaccttaccgcgttagctatccctgacacggtcagcacgatcgattcaaacgcgtttgccggatgtgggaacctgcagctgactcttctggagaccactggtaagatcacaattaaagaagacgccttcgatcctgacagtgctcttcagcttgtggctttcaactcgagggacattaccttcagcgatccggatcttccatataaagtctcctgctttgtcccatatgacagtactgtcaattccaagaatgtaagtatctggggcgatacctatacgttaaaacagggggacaccggcatctttgcttacggaatcgatacactccagggagaatcctatatgatcggcgcaacaaaggacatttccggcgcgatcaagccgccggatggtacatcgctgacacagtttgccccgtacgcgctggctgactgtaccggaacgcttacgatcgacgattccgtgggctcaacgatcttttatatcggtccttacgcgttcagtggttccggtatctccggtgatctctatctcggaaatatgttccagatcgccgattccgcgtttactgactgttcgcagctgcatgacattgtaattgccccgtcctattataattttaccctcagcggctacgcgttcggggattcttccctggaacgcattacgctccctccaaacctggtcacacttggaagcgctccgttctcttactgcggaaacctgaaggaagtgatctttaccggtccggaggcgccgactctcgagtcccactcccgtggttttgattattcatttggatgggatgactgggcaactgacaaggcgccgaacgtaaaaacaacactgcagggtgccgcaaccgaagaaaattaccttaaaaagtggaaatacaatcttaagggatactcctcggagaatgatcttctggaggataagggatttgctttctactatatctttgaatggttttacgcggctggttcttctccgttgactgcggacctcgattatattccggaatttaaggagtacgtggaagcacgcgcggaggcggaggctgcaagcacactgaacgggacgatccaaaaattctactggtacctggacaaagatgtcccggacggtatgatccaggaggtcgttttcccggatatcatggaatatgtaaagaaagccgaggaatccaaagccagtgattccaatgcccagaaggccaccggctccaatggccagaaggtcaccgactccaacgtccagaaggccactggctccaatgcccaggaaactaccgcttcacaggaggaaatttaaacatatgatactggaacagtccggactcatcgttcaggaagttaaaaaagcctttatgggaaaggatgacgtgatcgcccgcgtgctgaccgcgatctacgccggcggtcacgttctccttgaggactgccccggcgtcgggaaaacgacgctggcactggccttttcgagggctttggcgctggatttcaagagaatccagtttaccacggacactctgccgtccgatatcaccggttttacgatgtacaaccgtcagacagacaaatttgaataccgggaaggtgcggtccagtgcaatctgcttcttgcggatgagatcaaccgtacttccccgaaaacccagtccgcgcttcttgaggccatggaagagcggtccgtcaccgttgacggcgagactcaccctcttccgaatccgtttatctgcatcgcgacccagaacccggtgggcgctgccggaacacaggcactgccggaatcccagctcgaccgctttatggtccgcctctccattggctatccgtcctcagaggaccaggtcaatatcttaaaggcgaaaaaatacgcagatcccttagaccagatccgtccgctcgtgaccgcggaacatatctgtgaggtccagaactacctctcggcgctccggatcagcgacgagctcctctactatattacgcatctctgcgaggcaaccaggacgaaccagatggtggatctcgggatcagcccgcgaggcgttctcgccctgacccagatggcgaaggcccaggccgtcttaaagggacgttccttcgtcgttcctgaggacgttcaggatatctttatcgatgtctgcgcgcaccgtctgattttgaagccgcaggcccgtgtccagggtatcaccgagcggtctgtccttgaagggatcttgaaggaggtatacccgcctgcttccccgaagaggtgggatcatgactaagatccggatcgcctacggagtcgctatggtgatgacagccgccgcctttttgtggaacggcacgtatttcgccctggatgtcttcctgttcctgctcgcgctgtttctgagcctgaagatccttctgcgtctggaaatggcacggctgaagttttccgtctctcttccggcggcctgcgcctgtggtcagagcgtaaagctttatatctccgcgtccaatttcttcgtgctggcggcggccatcatggaaggcgatcttgtctatgagaataagatgctcggagaggtgacccggtcccggttttccgtgaatctctcctcccacaggctcgctctttccctggattttaagccggaatcctgcggaagctacctgatccggctggaacatgtccgctgtctcgacatctttggtctcaacagcgctccgctcccggtcccggtctcccgcctgatcaccgtctacccaaagccgatcaccatcagtttttcctcccacactactccccgtggacggatggaggaaggttcgcagagcgtcaaccggaaaggcagtgatgcctcggaggtctttgatctgcgcacgtaccagcccggggacgatatccatacgatccactggaagctttcccagaaaacggacgagcttctcgtgcgggaacctgccgattctccgcgctttgacacactggtcctgatggacatcgggcgtttcgaccatatgatcccgcaggatccgaaacagctttccctgactgccgccctgacgctttccatcagccaggcattcttaaattaccagctccctcactacatcggaaccgttgtgggcggtgatctctttatcacggagatccgggaacaggcggatctggaccgcgcttcggacctctggatgagcgtaacgatcccggaggagaaaggtctcgggctgcggcttctgtccatgaaagccctggaatttccttaccggcggctcttctatctcaccgccgggggatatccggatgagatcgacacgctttcccctgatctcaacgtcttcgcgttctccatccataaaatcagctctgaggcgggtatgagccgccgcggcagccgtattttcatgaacctgtccgaagaccagctcaaaaaggacagcttaaatatcaccttataacagaaagggtacgtctatgacagacacaccgattttcatagaaaaacgagagcagtcggatcagatctgtgcgatagagactgcgcttctctgcgggatcctgaccgcagggatctctttttccattttctccgtcgtcgaggccggacgggaacagcagtttatggtcctcgccttctcggagaccgcgatcctgatcctcagcatcgtcaatctcctgttatccccccagaggaatctcgggatctttctcgcgcctgccgcaagcctcgtcaccgcggtctccatcggaccattccggttgtttaatgggatgaaatttttctttaacagctatatctccgtctggaacctgcgttttgaggacggcgtccggttattttccgtagatggcgcaggaaactgggacggggcgctgttctttctttctgtcctcctcctgatctccgccgtcttctggttcctgatccggaaacgggcattcttagtgacagaaatactggtcttcctcttttttatcccggagcttgtgctgcggatcttttcgcctctcggcgcggtcctggtcctctcctcaatgatcggattctggctattctcctaccaggcaggatcttttctgcggcgggttttatggctcttttcactcacctgcgtgctcttcgtgttccggtggatctccggaagccagacctccgtttccatcctccgcgctcagactgctgcgagggaagctgcggaacatctcatttacgggacggatacactgccggagggcgatctttccaacgcatccggcatggagatcggggacgaacctcggctttccatcacgacggaccaggtcaaatccctctattttagaagctttaccggcgcggagtacgcggacaacgcatggacgccattaaagaagtcagcctatggcggcgggcggtacggatttttaaagtggctgtcacagaacggattcgatccggcagcccagttcgcgtcctacatcgaagcggggaatacagccctcccggaagatcagaaggtagaaaagaaccgcgtgaccgtaacgaaccgcggggcaaaccggaaatatctctacacgctttattcctccgaatcccccggcttctcctccgtgtcagcgtaccgggacaacggctatctggaacatgggatcttcgcaaaaaggaaatactccctgtcggaatattcttccaatcttcccggtgagctgcagcacctctcagactgggtctacgagccggaaaatgacacgcaggaacaatatttaaacagtgaatccgtctaccattcctttgtccatgagaactatacggatatcgatgatacctgctctgatctcattacctctctgtttcatgaatcggacaagcgggatgtcaccggcagtctcggcgtctacgaggtcaccaggcggatccggtccgttctcgagacaaatacccggtatgagaaagaaaaggttcttctggacctggaaacgtctgagaatgaggatctgctgaccacgttcctcctcggggatcatgcgggaaactcagcctattacgcctcggcggcagtcctcgcgttccggagcttcggtatcccggcgcgttacgcggaaggttactttttaagcagccgcgctatcgaggctgcgggcggcagggatgtacagctcacctcctccgatgcccacgcgtgggtggaagtctacatggacggcatgggctggatcccggtagatgtgacacctggattctactatgatacctacgcgctcttacagatggtacaggtccccggtgatatccagcggacagcggcgctggaagacagcggcgagaaagtggatgccccggattccctgcactccggaaatcggccggactccgagatcatcggccggttaaagaccgccgtaaacatcctgtggggcatcctgctggtcgttctccttctcatggggatcggcatcgtcctcctggaattccgccatctgatcacggagcggcagcttttaggcattctggaactgcctccgggcgaccggaccggcatgatattccaggcgatccgccattcgcttctcttcttcgggatctccatccatccaggatggaactgtggtgagacggaagcgcggctctccaggatccttctggattacgagccgggactttacacccgtgtgaatgagctgatggagaaatactattatggtggtgaggagctgaaggaatatgagctgcggctcctataccggttcctgacgatgatccggtccagtcgtaagaatctgacgcttctggaacgctttcggatgcggtatgatctgtaacacaccgcaaaaacgcccaagagcagctttcccggctgctcttgggcgtttccttatatattctccagtccttccttctcgccgtaccatcggttttttccttctgattttgcctggtagaggcaggcatccgcccgttttaagagggcataatagtctctgccgtcccgcggcgcgatggcgatcctgacactgccggagattcctatactgtttcttcctcctacggtgatgttccggatccccgcgaggatcttttccgcggtctccctggcgcggtcctgctccgtctttacaaatacgacaaactcgtccccgccgacacggcccgcgagattctccggccccgccacatccttcaaaacgtgcgccacctggcgaaggacctcatccccggccggatggcccatggtatcgttgatctgtttgaaattgtcgagatccacgaagcagaacgcgtaattgtcatccgtatccgtcagcttctcgctgatggcgtcaaaggtcgcctggaagttgcagatcttcgtgagtggatctgtctgggcttttaagagcagttcctccagtctctggctcttcttctgctcctcgagatagacgttcgtcacgtctgtcctggagagcaggatcatctggcattctttatcgtaatagcggtagtccaggcgctttctcgtgtagccatcaggctccatgatcccgcaggtgaagctgtggacctcgtcgtgttccagaacctccaggatccgggatatccgcgtctcacggatcaccatctcctgatcttcctccaccacatatttcctcacgtattcgatcttagatccctcgtaatcattgcacgtcaccgggggaagcggggttcccgcccggctgctgaacatctggtagctgttatgcttcgcgtccagatagataaaataatcgcaggtcgatgatacatactggttcgcgatggaccacataaagtattcctgtccggccttgcgcagcaggatataaatcttttcctgactgtcgtttcccggcgcgaacgccagcaccgtaacatggttatccggtagtttcccgttcatagtcgaaaagttgttggagaacagacctttgcccttttcgcattcatttctcagctgccgcaggcaaaagttgtctctcatcctctcgtgatccgacggttggatcttatttttcatgtatttctctaactggctgtcccagatacattcttttccgcggtctgaaggatccgtgatgctgtggaggattgtcgcttttcccgtcttcaggtcaactttgatgatctcctgatataattcctggatagattcgtaaatttcctgggctatattcgttggaatacccccccccgataattttttaacaaagttgtttttttcacacttgccacctgccctgctccggccggatctgcttctcagtatccggccaggtacttttttactccatcatcagcggatttaactgcatgttggcaatatccatgttttcctgcgcatccgcgtctcttacgaagtcctccgtgctcgcaacgcggatcttctggcggatctcatcctggatatccagcatacactctaaaagcaatgggttgaagttcccgcattctccgtttaagatcatctggatcgctacctcatgcggatatgcttttttgtagatacgctcgctgaccagggcatcgtagacgtccgccacggatacgacctgggcggagatcgggatctcgtctccctttaagccatccggataaccctttccgtcccagcgctcatggtgccatctgcagatctcgtaagcgagctgtacaaggcgctcactgtggtacaggtcgatctttccgatcatggccgcaccaatggtcgtgtgggtcttcatgatctcaaattcctcttttgttaatttaccaggtttgtttaatatcttctcatcgatattgatctttccgatatcatggagcgccgacgccgtagcgatcaggccgatttcctgccaggaaagatggtatttgtttttctttttgatcagctgctctaaaagcaatctcgatatgatattcaggtgaatgacatgaggtccgctctcgctgtttcggaattcaacgatctggcttaaaataccgatcataatgcggttgctgcgctctttttcctggatctggtatgttacaaggcggagcaggcggcgctgtttggagtacagcttgatcgtatttaacacgcgctggtatacgactctcgcatcaaatggtctcctgatatagtcgctgacgccgaatccgtaagcttcactgatatatttccctgagtcctcactggagatcatgatgaccggaatatcctccaacaggcgtctctcattcatcaccatcaggacctggaatccatccatcttcggcatcacgaggtccagcatcacaagggcgatacctgttccatactgctccagcatccttaaggcaacttcgccgttttccgcctccaggagctcataatcctgtttcaggatctctgtcaggatctcgcggttcatatcggaatcgtcgacgatgaggatcttcggcttgatggtctgtgtccttaagtattcccgcatcgtctcgtccagatactctgtcttttcctccgtgatgaccatgtttttctggtctttcgcgaaatacatcagacggtcggccctgagaactgcctcctcgatactctcgccatcacgggtgatcacacctccgatgctgacagaaaggcgaagattcccgcaatccgcaatagcggtatcatggatcttttcctggatcttttttaatttttcgttgaagctctccttgctgatttccggcaggatcaggaggaattcatctccgccgtaccggatcaggctgtccgtcttcctgatattctgtcggatcacgttgaccatcatctcaagggcatggtcacccgcccggtgtccgtatgtatcgttataaaccttcagatagtccatatcgatcacggcaactcccgctgtgttggtcttattttttatctcatcctcaaaataacgacggttgtagactccggtgagagcatccatgtagaccatatggctatatttcatcaggcttcctgcgagttttttgcatccttcctcatcgataaagttcttgccgtcctgcttctgcagcatctccatcacatacggctcaccgtcgatctccacgtatctcgctgtcacctggtacatctcttcgccgagaaattccagctttgatgcctgaccatgctcttccagcattctctggctgatgcagttgctgcatggcttattcttctgccagaaagcaaaacactcgcagtgtgggactgtctccgtctcgtcctggtcttccattattcccgtttttccatccagatccagcactgcatgcccacgcacaaggcggacgatcgagaagatctgccggagtacttccatcttcttttcggcctcttctctggtcataatatcgtaatcttccatgaactacagttcctcccctgttctatggattcctgtttaataaaaaagaatgtgccttggcacattctcgcgcctcgcgcggtcgcttgcgacagtctacatcttcgcgcgagcgcgcatctttggcacgtcagtgcctttttatgtaacaggaaattccgaggaatttcctgttacataaaaaagcagtttcctatgtctctatatcttcgagattgcaggaaactgcatgccagtctatttttcgggtaaattcaagccgattcgaatgacataatctctttttattataccctatgattctgtttgttgtccagactttttatcgcttttgatccatcggtcttgcctcgtaaggtaccagatttaaggtaccctgcatccagatctgtcctttaaaacggcggcccggctgcggttctcctaagaggtccctgctgttgatgcagaccatgaattccaggtcatggctctcgatcttcatgcgataaatctcttcttttgtataaatatttcggattttctcaacttctttgatttctccgataatggaatactggtcgcactccactccgcagggcataaagcaggagtcaatgatggagtagaggtcttccttcatggctcttctggagatctgggaataaaggtcaatatcctcgatggtcagggtctccatggcatcctcgtccccgttttttgcggcctcgatcaggctgttgcgttcttttgcggaaacttttgccttctggatctgtttctggctcttcttgatcggaagaaggacctttccgtcaatggacaggccggaaaaacagacagctccgattctggagtggtgctctttatccagcattttctcccggaaatccagaaaattctggatgtagaagatcagcgagatgccaactttattctcatccaccatgccggcgtatgtctctttctccgtgtgtctctggacagagcactcttccgtagagccgacgacatcgctctccaggtacggaaagtagaattcccgctcgaaatttccctcttccttcagttctccgacgatcgagattccaagtcccggggcgacttccgtgcgcatttcgcacacgttactctcctcatcgacctggacgcacttcgtcaccgacggctgccgttccagcagatccagaagcttttcgatatcctttttctttgtatacatgctgaaaccagctgcacgtaaaaatttatgcatatggatcaataatctcctttatcctcgccgttgaaatcatccgggatcgcatcaaaatcctcaatgttgtctgtctcgatctcaacctcttccacatcgtatgcgtccgcatactgctttacacgttcttcttcatcctcacggcgctctgcctgacgttttctcagttctttcatgcgctcgctcttcttccgctcgctgctcggaacctcgatatcctgctcgccggagcctccttttaactcttttttcttgctgtttgcggccttttcctttattgcgagacgttcatccatagtcgggcgcttcacatagcccagagcctgctccagcgcttcctgctcttctccgcctaaaagaacttctgtcgcgccttcctctacctcttttaagtaaatgtagcagccctcgcggctgtgaacaacatccaggacgaaaccgctgttgttgttgtccaacattgcgataacaaagcttaagttgccgcccatgcccttgaaggcattatacttgacgtatccgaatttctggaatgaggacttgatctgcttggacagctgtttcattgcgtccttgctggcccggtctttcgcctgcagctcctccatctcatccatcatgtccatgatcgtatcttccagtgtctccgcatcttttccgcgcatgaagatatcatatctgcggtacagtttattgagcttcacgatacaaatgatcaccacgatcaataataccaatgacaagattgaaaatccgatgatcagtgccattggatcgatgggaagattgtataacatactgttttccatattttgttttctgtccttccgtatgtgtctgtgcgtttagtgattttagtctttttggttcaattttttcctgttcgttagcttccgtttcatttaactttcatcttgggcaaaatgcctgctttctgcttttttgcttaatttcaggacaccctaaatacagccggctttttcagcattttctttccaaaaaatcccatcagcgaagctgatctggaatggatttttgcgtgtaagtaactatgaagatactgaatcgttacgctggattattgattggttatgctcttaaggattccatgagctcgatcaaacgttctaactcttcctgggagtaatactcgatctcgattctgcctttatttttgtctttctggttgatgacaaccttcgtgcccatgatagactttaatttgtcctccgcctggcggtagatgagatcgatatccggtcctttttccggcttcttttccttcggcgggcgattcatcattttcacgagcttttccacatcgcggacgcttaatttttcctcgatgatcttcaccgcaacctggtactggcgttcgccctcctcaaggccaagaagcgctctcgcatgtccgctggagatctttccatctgccagcatatcctgtacacggacgtcaagcttcagaagacgcatgctgtttgtgatcgttgcgcgattcttggatacgcggttcgcgatctcttcctgtgtgagatggaactcctggatcagctgctggaatgcctgtgcttcctcgatcggatttaaatccgcacgctggacgttctcgatcagcgcgatttccatcgtctgctgcttgtcatactcgcggatcagcaccggaacatccgtgattcccgcaagctttgcggcgcgccagcggcgctcaccggcgatgatctcgtagtgattgccctttttctggacgatcaacggctgtaaaattccatactgcttgatagaatccgccaattcctgaagactttcctcatcaaaattctttcgcggctgttcattgttcggctcgatcaggttgagctttagtgtctgctctactggcttttctacgatcttttcaacgggtttttctaccactttttcaacgatcttctcgaccggtttctcaacaattttctcaacgatcttctcaaccggtttctcaacgatcttctcaaccactttttctacaatgatcggctcagaattaccggcagtccgggaattattcttttgggatgggtcagtgcttacagccgtatttcctgctgtatttcctgctgtcttcgctgcgtttccgctgtcactctttgccacggttccatttttttctgtatttttagcggttccctgattcgccatcaggtgctcttttctctcacttctgcttactttttccgcagcgttctctttcgtagttgtaacttcttccccgaagaacgcgcctaaacctttacctaaaccacgcttcgccattataattcttctcctctgctgatgacttccgctgctaaaagtctgtagctctctgctcctgatgaccggctgtcatagagattgattggcataccgtagctcggtgcttcagccagtctgacatttctcggaataattgtcttgtaaatattttcattcagatgctcttttacgttctctacgacttccagggacagatttgttctggaatcatacatcgtaaacacaacaccctctacttccaatgccggattcagctttttctgaacaagatttactgtttttaacacctgacttaatccttccagtgcgtaatattcacattggatcgggacaagcaccgtattggccgcggtcagtgcattgattgtaagaaggttcagagacggtgggcagtcgatgatgataaaatcatattttccatccaacagttcaagatttttcttgaggatgctctccttttcttccatatcaagaagctcgatctctgctcccgccaggtcgacatccgacggcatcacatccagtcgctcctggacactgggattgatgcactcttccacggtgcactcccccatcagcagttcatatacagtattgtcaatatttcctttttccaatccaagcccgcttgtcgtgtttccctgcggatcaaagtccacagtcaacactctctgccctgcttcagccaggcaggccgacaaattgatagctgtcgtcgtctttccgacaccgcctttttgatttgtaattgcaataatacgtcccatatctctatcctttccgcaggtcagctctactctttttatcgtatatctctctcgattcagtccagatttatcataaaatccgtttttttacgggcttttctctatttttcttctactatttactatcaaaacattcgcgaaacttagtataacacaatttttcctattttcctattgatttaccctataaaattaaaaatgtttcacgtgaaacatttttgcaaaccctacaagccatattttctgagttccgtgtggcaagtgtttcacgtgaaacactatactctcttcttgatttttcttcttgtggttcattgatgtttcacgtgaaacattcatatttatcactgtttgccttgcgtaaacagtaactcatattctgttacagtacacgggcactccatgcccgcacactgtaacaggattttgccgatgcttcgcattccgaatcggcaaaatccactaccaccactgtattgtacggaattttcagttcagaaaattcctaccataaaaagtaaccatattcttcagaaacatttcacactttcgcctgttgtatctctctggcaattatattataatacaatcagggattgccttagagaaaagtgataaaactactgctcttctctcacagcattcccactatatttctatatcccatcatctaatttcgaggtgaatttatgaaagcaaaaaacaaaatcatcactgctgttctcctgtccgccggtgcggctgtcggaactgcgctgatcaacaaatacatcaaaatgtctgccgttgcaagaaatcttcttacccagccggaaccccgttgctatcgttggaggctcggcaatatctgctatacaaaagtaggaaccggaaagccgcttcttctcgtccacgacctgacgcacgcgtccagcagctgcgagtgggattccctgatcccgctcttaaaagattactacacggtttacaccatcgaccttttaggctgtggccgttccgaaaagccaaaccttacttacacaaattttctctatgtgcagctgttaaatgattttgtaaaatccgagatcggtcgacgcacaaatattgttgccaccggtgcgtccgctccgatcgtgacaatggcctgtggatacaatctggatctctttgagcagatgatgttcatcaatccggattctctcctctcctgcagccatattccgggaaaatccgcaaaatgttataagtttatccttgacctcccgatcattggaacacttctctacaattttgcatccgcaagaagtataatctccaagaccttctccgagagttacttctataacccgtacgatgtgaatccccacaacatcgacaaataccatgagtccgcccacctcggcgactccccgaaatctatctacgccagcgtccagtgcaactacacaaaatgtaatattacaaagactctggaaaaaatcaacaacagcatctacattctcggcggcgaagccgaaccggatatcgacctgacaatcaaagaatatactaaatgtaacccagcaatcgagtccagcaccatcgccaacaccaggcatcttcctcagctcgaaaatccggaggaagtcagcgcaaccgtgcagatgttctttaactagtttcacacaaccatatttcaatgtttcacgtgaaacattcccattaactacaaaaaggcgccgctgcttttcttctgacagcgacgcctttttatttctattgcgttccaatgatttatctatttctgttctgttataaatcccccgatgttccatcgcaaatgtttcacgtgaaacatcgtgacatttttatctccttcattcaaaaaaagaaccccattatcctaatttataaagataatgaagtcctcaatttttctttaaattttactttaacggttccttccccggaagtcccgcttttctcggatatttcttcgctgtaatcgcaatcttctttaccggaacaaaggtgcgttccacgtccgcctccggaagaatttttacgataatatccttcatctctccgccaagcttcttcacagcagatctcgcctgggcgatctcctcgtcagcttttccagatttatatggaataaaatatccgccctttttcacaaacgggatgcagtactcggaaagggtggacatatttgccaccgcccgggatacgcagatgtcgtactgttcccggtatttcgcatcgcgtccgtagtcctcagcacgtccatggacagcagtaatatccgtaagtcccagtgcctcgatcacctcatttaagaatcccactctcttatttaaagaatcaagcagagtgatcttaagccacggaaacgcgatctttaacggaattcccggaaatcctgcacccgtccccacatcgatacagctgtattctacggatccgtcaagctttaacccaagctccggcgctgccagaacaagcagaaggctgtccacaaaatgcttcgtgatcacatctgaaagctccgtgatcgccgtgagattcatcactttattcttctcgatcagcatctcataatacttgaaaaactgctctttctgctgatctgaaagcgtcactccgagatccgcacagccctgatccaataattttacaaattcatctgtcatgttattactttctccccatctgctccagatgtaccatcagcacggaaatatcagccggagacacaccggaaattctggacgcctggccgatattttcaggtttatagagattcagtttctggactgcctctcttcgaaggctgttcaccgtcgtatagtcgagatccgccgggatctttcttccttccagcttcttgaactgagctacctgctgcttctgtctgcggatatatccgtcatatttcagatttatgtcaacctgttcccgcacatcagccggaagttccggtctcttctcgtcgagttccgccaacatctcataattcagttccggtctcttaatgagttctgcgagtgtgcttccggattttaatgttgtacttccatgtgcctcaaggaacttctgaactttctcgttcgctccgatcgtcgccttttccagacgggcgatctcctcctcgatggctttttctttccagaccacgtattcatactgctcatccgacacaaggccgatctcatgtccgatcccgcgaagtctgaggtccgcattgtcctggcgaaggagcagacgatattctgctctcgatgtcatcatacggtacggctcatggttctctttcgtgacaagatcatcgatcagaaccccgatatacgcctgggaacggtcaaggaccactgcactcttctcctgcagctttctcgccgcgttgacgccggccatgaagccctgaacggcagcttcctcgtatccggagcttccgttaaactggccgccggagaataatccatcgatatttttaaattcgagagacgcttttaactgtctcgggttgatgcaatcatactcaattgcatatgcatttcgaacaattttgacattttcaagtcccggaacagtccggtacatcgcatactggacatcttccggaagagaactcgacattccgccgagatacatctcgttcgtgtaaagtccctccggctctacgaacacctgatggcgctccttatccgggaattttacaaccttatcctcgatcgacgggcagtacctcggtcccgttccttcgatcgcaccggagaataacggcgaacggtccaggttgttccggatgatctcatgagtcttctcatttgtgtaggtcagccagcaggaaatctggtctttctgcaccgactccggatccgtagagaaggagaacggaacgacgcgcttgtctccgaactgctcttccatcttcgaaaaatcgatgcttctcttatctgctctcgccggagttcctgtcttaaagcggtacatctcgatcccgtttgcctttaaggagtctgtcagatggttcgccgcctgcagaccgttcggtcctgtcggattgctgacatccccgtagatgcatctcgcgcggagatatacgccggttgcaagaacgaccgcgcggcacttatagatcgcgccggaatacgttttcacgccgatgatccgctttttcaccggatagctgctctcctgctgcccgttttctccgtgttcctctttaaaggtcccgtattctcccgggatctcctccgtcaggatctcagccacctcggcctggcggatcgtcaggtgctccgtgttttcaaggacgcggcgcatggatctcgtatactcctgcttatccgcctgggcgcgcagggaatggaccgccggcccctttgactcgtttaacatctttgactggataaatgttttatcgatattttttcccatctctccgccgagggcatccagttcacggacaagatgtcccttggaacttcctccgacgttcgggttgcacggcatcagagcgatgctgtccacgctgaccgtgaacatgatcgtctcaaatccaagtctcgctgccgcaagtgccgcctcgcatcccgcatggcccgcaccgacaactacaatatcatatgtctcctctactaccggcattttatttcctcttttctattttcccatacagaatttgctgaagatctcgttcaccagatcatcctccacggattccccgacgatgagtcccagcttctcatacgcatccatcagatcgatcgagtagaagtcctccggcatgccgttctcaatacttttttcaaccatggacatgctctcaaaagcatcctttagagccctcacatggcgcacattcgtgatcatgacctggtcgttgaagtcgatctcgccttcatagaataaagcctttatctcctcttccaggaggtcaattccggtctcctcctttgcggagatcccgatcaccttatgtcccgaccgctcttccacttctttcgcagacacgaccggttccaggtcgctcttattcaagaggacaacggctttccggtcttttatgaagtccatgatctgatgatcattctcatccagctctctcgatccatccacgacgtagatgatcagatcggccttctttgcctcttccatcgcgcgggagacaccgatcttttcgaccacatcctccgtgtcccggatcccggccgtatccacaacatttaagctgatcccctgaaggtagatatgttcctccagaatatctctcgtggttcctgccacatccgtcacgatcgcgcggtcctcaccgactaaaacgttcatcagcgacgattttccggcattcggcttccccaggataaccgtcttcacgccctctgagaccacacgtccgtttgaggaggagcggatcagtttttccagttttttcttcacgcaaaggaccacgccgaggagcttctccccgtatccgtccagggaaatatgctccgggtcatcgagtgccgattcgataaaggcgatctcgtagatgatctgatcccggatctcatggatctccttcgacacgcttccgcgaagctggctgacagacgactgcagcgcatattcatttttcgcgttgatcacgtcgatgacggcctccgcctgtgagagatcgatcctgccgttcaagaaggcgcgttttgtaaattctcccggctcggcgagtctcgctccggcctttaagaccgtctccaggatccgccttgtgacgagcattccgccatggcagtcgatctcaacggtatcttccgccgtatagcttctcggtcctctcatgagcatcagaaggacctcatcgatcgtctcatctccatcataaacatatccgtaatggatcgtgtgactcgcagcttccgagagtttcttctttcccggggcgcggaacactttttccgcaatttccaccgcgttctcaccgctgatccgcacgatcccgatcccggaatttcccatcgccgtcgcgatcgctgcaatcgtatctgtatattccataatctccatcctgatatccctgctgcctgtttcatattccagacagacagcatcgcaatttttcctgttccgcacattttggaagcagaacttctgtcatctgatcctgccgcaattcggtttccaaaatgcacgggaattcacacaatttgtcaccctatcatagcacaaaggggctgccataggcaacccctctttcattccgatatgcttgttttattcctgctcacgacgagtattttcgtaagcggatgttctctcacgtctctcgtatctcggtcttctctccctgcgctcttccttctttaatgcgatcacaacatggcggaacggctcctcaccttcgctctttgtgaatacatatttatcgttctgaagtgcagagtggatgatccgtctctcatacgggttcatcggctctaaggaaaccgggcgtcttgtcctttttaccttgtaagcgatgttctttgcgagagtttccagtgtttcttttcttctctctctgtaattttcggtatccagcttgactcttaagtagtcctcagattccttatttacaacaaggcttacaagatactgaagggaatcgagtgtctgtcctctcttaccgatgagaagtcccatctcctcaccggtcagattgacatccatctccttttcctcttcattcattttcacttccacgtcaacggcaaggcccatcgcgtcaaaaacggaattcaggaaatctacggccttatcgtcaacggtctcgatcttcttcgcacggatcactgccggcttggaaccaaaaagtccgccgagaaccccggcacttcccttttcaacgacctcatactgaatccgatcactgctcacaccgagctgcagggatgcctgtgtgattgcatcttccacagttttcgcagtcactgtaatcatttccataacagaacccccttatttatttcgcttgtcatgcgcctcattgtacttctggaccatcgctgccttggaagcgagacttcccggtttcgcgttggtgttgtagtacttgctggactcttcgatctgctttgcgatcttctctttcttgacttcctcagctactttttccttctcctcctcagccttgattgcttttaaggatgcagtagcattctgagttaccttagccggcggaagtccctgtttcgcacgtttcttattgaccttttccaggttctttgcaatcatatcgtcgatattgaccttatccatgtacgcgttaacgatgagctgctggataattgtaacaacgctggtcgcgatccagtagataccaagacctgccggcatagtgatacagatgaatgcggagaataacggcatagtcgttgtcatagtcttcatggactgcgccatcggattctctgcatctgcggatgtggacggctgatttccgctcatgagctttgtgctgaaccactgggacactgccgcaagaaccgggatgatccatgcgaaggacggaacccagcccggtgcctctgccatatttaagccgaggaaggtgttcattctctcgacaacagcagcattctggccgatcacatcagagattgccgggaacagtgcctgaagctctccccactgggatgtggagaatttatagagca

SEQ ID NO: 2101 - DNA, 15284 bp, Unknown
  gut microbiota DNA sequence
agcatagtcagcctgtcccatcaacggagtgacaacgttgtcgaaataaacgcggacagacggaacgtatgccggaatattgtagatgacacggtacagtgcaagaaggatcggcatctggatcaggagcggaaggcatccgcctgtcatgcttgtgccgtacttctcgtaaacagcctgaatctccacgttctgacgctgcatggactcctgatccgactttcctttatacttcttctggatcgcctggatctccggattcatgacagacatgagttttgtggttttctgctgtttgatcgtcagcggtatcatcagtgttttcattacgatcgtaaacagaatgatgcacagacctacgttgaacacgccgaagctgctcgtaaatctgaagaggatgtccatgacatagccaaggacagtcgcgatcggtcccagaatggaaccagccttcgtcaaaaccatatcttacctcctggggttttctacgggactggatcataaccgccttttgcaaacgggtgacatcgcagaatccgcctgcaagcaagataagtaccttttatagcgccgtatttcttgatcgcttccatggcgtactgggagcaggtcggcgtataaatacagtgagggccgatacagggagagataaacttcctgtaaatcttgatcagaccaatcagtacccatttcataaaccactcacttcgattcttttaaaatgttatgaagcccgcataagtgcagaaatgcactctcaatcttgtcgaaatttttgtcttttgccgcgacccgcgcgacaacgatgatgtctttgccgtcttctaatatgtccttatttaaccggaaactttcacggacaagtctcgcgaaccgatgtctcacgacgctgtttccaacctttttgctggcggaaatgccgatcctcgtgtcctcccgtcccgaatccatcacgtacatgaccagatatttgtttgcgtaggactttccaccgcggtaaaccgtctggaagtcctgatttttctttaacgaattgaaccttttcattcaatacctctctgaataacaaaaaagagtatccaaaagttttcctaaacttccggatactctcttggttcattaagcagataatctagctctaccttttgctcttctggcagctaaaacttttctgccacctgctgttgccattctcgctctgaaaccatgaactctttttctctgagtgttcttcggctgaaatgtcatcttcataaacccggcacctcctcttactataaattcaagtaccttctcatgtacatataaactaagacatattgaagcatcgtatcgattatataaaaattgccgtccttcgtcaagaccaaatttcaaaaaaatccttaaatcatggggatttccgactcatatctttgtaatttttccgcctgttatccacattccggctttccggagagtcctcagacaaacgcccgcctttctctctccgtcatccaaaaagggggacagcttttcgccatcccccataaaatgtatgtttcgattttatgtcactatatttagtatctcttcattattatatagaagctgcagctctctatttgctgcgatgcacactcttccggctcacgatcagccgttgtttttcatgatcttaaacagaaccttcgtgatcgctgttgtaagaatacctgcaacgatcgcctccggaactccaaatccgaggatgatcccgaggatcacatcgtagatgtgctcgactgctttgttggacgctgcggcatagctctgtccgaagaagatgtagattccattcatgacaagcagtgtgtttgtcatagctcctgcaataccagccacccagagggcaacggtctggctgcctttgatcccgtgagcgaccttcatgatcagcttatatacataataagcaacgatgccgatgcatacacgcggcacgatcgcgatcacggcgctccacatgtttccgctgtatccgccgatcgtaacgaacgggctgaatacgaaggaggtcacaccaggggtaatggtcgcttttacgaggctggtcacaccaaataccagtcctaagtaagcgccgtacttcggtccgagaatgatcgctccgatgatgaccgggacgtgaatgatcgtcgcattcataaagcctaacgggatataaccgagaaacggtacgaccgacatggcgatgatgatcgcggtaaagatcccggcgagggacatgtccagaactttcttttcaattttcatttttcaattcctcctgctactgttctcttgcgagatacaatgcaatatagtcacgacttgcattataccgtgtcagcgtgccagagtcaaactgttttcctgcattttccaatttttccattttacagatttcttctcccggtatttcgtgccctgcattttttcttcctatacacaaaagaaatttttctcagcatctctcctgctgcccgcctgatttcagcctctctgcccggcctgtccatccttcgcggacacaacctgttgtatttttcgtgtccgttcctggcgtacatcttgttatgtgggtattcacatgttttccacccgcaattatcaacttatccccaaatcgtggataagttgtggataacttattggaaaagttgtggattttcacatttgacattgaaaattatcctcttttacgttagaataagattagattgggtctatgtgcttttgtggacaggtccccaccttttccacagctatgcacatcgttatacacatgtttaggagtatgaatatgctggaagaaatcaaagctaaatgggacgaaatccttttaaatatcaaagaagaacacgatatttcagaggtgtcctaccgcacatggctgctgccgctgatcccggattctgtggataaagatatcctcacgatcctggtgccggattctgccttcatcagctatgtgaaaaagaaatatgaattcctgttgacaattacgatcgaggagatcacaggttttcagtgtaaactggatttcaaactgaaatctgacgtgaaggaaccggaaaaagagaatcgtctgatcaacgtgaacaataatacggtcagtcagcttgctcttcagaacgcaaacttaaatccgcgctacacatttgataccttcgtagtcggaaaaaacaacaatcttgcccatgctgcatccctggctgttgcggaatctccgggcgagatctataacccgttatttatttatggaggcgtgggactcggaaaaacacacttaatgcattccgttgcccatttcatcttaaaaaataacccgagcgcaaagatcctgtacgtgacttccgaaaaatttacgaacgaactgatcgacgcgatccgtaacaaaaacaatgtttccaccacggaattccgtgaaaaatacagaaataatgatgttcttctgatcgatgatatccagttcatcatcggcaaagaaagtacccaggaagaatttttccatacattcaatgccctctatgaggcaaaaaagcagatcattatttcttccgaccgtcctccgagagaaatcgaaacactcgaagaccgtcttcgttcccgtttcgaatggggacttaccgtagatatccagccgccggactatgagacccggatggcgatccttcggaaaaaagaagaactggaaggatacaacattgacaacgagatcatcaaatatattgctaccaatgtaaaatccaacatccgtgaactggaaggtgcgctcacaaagatcgtcgcttccagcaaattaaataataaggagatcaatcttgaacttgccgaggaagcattgaaagatctgatctctccgaatgctgcccgtgaagtgacgccgcagctcattattaatgtagtttctgagcatttcggcatcactcctctcgatctcatcggtcagaaacgaagcaaggaactcgtatttcctcgccagatcgtcatgtatctgtgcggtgatatgacaaatgagtctctccagaatatcggaaaagctctcggcggtcgtgatcacacgacgatcattcatggaacgaaaaagatcgccagtgaattaaagactgatgagaatttaaagaatacgatcgatattttaaagaaaaagatcaacccgcagtaggcgtgtgaactgtaactttgaatgcgcaaaacagctttgtggattttttcgtggaaatcccgttgaaaatttgtggataaaaatcggataattttcccggatttttgcctgtggaaaactcttcggttgtccttccggatttttttagttacccacaatggttttcacagcgtttttttcagtgtttcacagggctttttccccttattaacaaattcacaccccctactactgttaagacgaatatcttttatatatttctttatcttatgaacgtttctcaagaaaggaagttatcaacaactatgaaactgacattccagaagaccgctcttttaaacggtatcaatattgttctcaaggcagttccgtcaaaaacaacgatgccgatcttagagtgcatcctgattgatgcatctacagatgagatcaaactgacagctaacgatatggagctcggcattgagacaaaagttgaaggtgatatccttgaaaaaggtaaaattgcactggatgcaaagcttttttctgaaattgcaagaaaattatctgattcagattcccttgtaacgatcgaatctgacgaaaaattcaatactgtgatcgcctgtgaaaactctgtattcaaaattcagggaaaagatggtgaggaattctcctatcttccgtatattgagagaaataaaaacattacactctcccagttttccttaaaagaagtgatccgccagaccatcttctccatctctgtcaatgacagcaacaagatgatgacaggtgagctttttgaggtaaacggcgatacattaagagttgtttctctcgatggtcatcgtatggcaattcgcaaaattgtattaaaagatgaatatgaaagcacaaaagtcatcgttccgggaaaaactttgaatgaaatcagtaaaattctgaccggagacaacgaaaaagaggtccagatcttcttcggagcgaaccatattctcttcgaatttgatgatacgatcgttgtttcccgcctgatcgagggcgaatatttcaaagtagatcagatgctttccagtgattatgccacaaaagtgactctgaataagaaagattttctcgacagcatcgagagagccatcattctaatccgcgaaaatgataaaaaaccgatcattttgaacatcgaagattcaaaaatgagcctgaaattaaattccagtttcggtacgatgaatgcggagatcctgatccacaagacaggccaagatctgatgatcggattcaacccgaaattcttaagtgatgcactccgcatcatcgatgatgaggaagtaactctctatatgatgaacgcaaaatctccgtgtttcatcaaagatgaggaagaaaattatatttatctgatccttccggtaaactttaacgcggctgcgatctaaaaacagatgaaattttcccgaaattccggaaaaatccggagtttcgggctggttttttcataaaaccggaataaaaaaggagaaaaatggaaagtattcacttaaaagatgaatttatcaagctgggacaggcattaaaacttgccggtcttgttggctccggagtggacgcaaagtttgtgatccaggacggacttgtaaaagtaaatggggaagttgagacccagcgcggcaaaaaactttaccctggagatactgtttcctatgacggaaagacatttaaggtagaaaagtaaggattttttcatgttcatagaatccatcgagctgtcagattacagaaattacagtcatttacatatcgattttcataaaggaacgaacgttctttatggagataatgcccagggaaagacgaatatcctggaggcagtctatgtgtgcagcacaacaaaatcgcatcggggcagcaaagataaagagatcatcaggttcggtgcagatgaatcccatatcaaaatgatggtccgccgggatggaattccctaccggatcgatatgcatctgaaaaaaaataaggcaaaaggggtcgcagtcaatggcgttccgatcaaaaaggcaagcgaacttttcgggatcgtcaatgtgatcttcttttcaccggaggatctgaatatcatcaagaacggacctgccgagcggagacgcttcgtcgacctggaactttgccagctgaataagctctatgtctacaatctggtacagtataacaaaacggttatacaacgaaataagctattaaaagacatggactacaatgcgtctttaaaagacacgctccccatgtgggacgagcagctcttaaagtatggtaccgaactaataattatgcgttccgagtttataaaagagctgaatcccctgatcgccgggatccatgccggactgtccggcggaaaggaaacactttccatcgcctatgagccgaatgtgacggcggagaatttcagggaacagctcgcaaagaaccagtttcaggagatcaaacagaggcagaccctgacaggaccgcaccgcgatgacctgaatttcatcgtgaacggaacagacatcagacgtttcggttcccagggacagcagagaacggcagctctttctttaaaacttgcggagatcgagctggtgaaaaagatcgtaaaggattacccggtgcttttactggatgatgtcctttctgaacttgacagcaagagacaggaacatttactttcagaaattacccacatccagaccctgatcacctgtacagggttggatgagtttgtaaacagcaaattccggatggacaagatttttaagattgttgaaggaacggtagagagcgaagactaaaggaggaacttcatgagcgcagaatataatgcagatcaaatccagattctggagggacttgaggctgtaagaaaaagaccgggaatgtacattggaagtacgtcttcgaggggacttcaccatctggtatatgagatcgtggataacgcagtggatgaggccctggcaggatactgcgacaccattgatgtgcagatcaacgcggataattcgatcacggtcattgatgacggacgtggaatcccggtcgatattcagaaaaaagcaggactgcctgcagttgaagtcgtatttacgatccttcatgccggcggtaagttcggcggcgggggatacaaggtatccggcggtctgcacggcgtaggtgcatccgttgtaaacgcgctgtcggagtggcttgaggttgaagtctaccacggaggaaagatctacaagcagcgctatgagcgcggaaaaacgatgtatccgttaaagatcgttggcgactgtccggctgacaaacacggtaccaaggtttccttcctcccggacaaggagatctttgaggagacggtctatgactatgacaccttaaagatccgtctccgcgagacggcattcctgacaaagaacttaaagatcattttacgggatgaccgcgaggacaagaaggaaaaggtattccactatgaaggcgggatcaaggaatttgtcagctatttaaaccgcagcaatgtgccgctgtatgacacggtcatctactgcgagggcaagaaggacaacgtgctggtggaggttgccatgcagcacaacgattcctacacggagaatatctacagctttgtaaacaacatcaacacaccggagggcggaacccacctgaccggtttcagaaatgccctgaccaagacattcaacgactacggaagaaagaacaagcttcttaaggacagcgagccggctcttaccggtgaggatatccgtgaaggtctgacggccatcatcagtgtcaagatcgaggagccgcagtttgagggacagacgaagcagaaactcggaaacagtgaggcgagaggcgctgtggacagcgtggtatcggaacagctcacctacttccttgagcagaatccgtccgtcgcaaagacgatcatcgagaaatccgttcttgcccagcgtgcgcgcgcagcggcgagaaaagcgagagatttaacgagaagaaagaccgttcttgacggtttatcactcccgggaaaacttgcagactgctccagcaaacacccggaggaatgcgagatctacatcgttgagggagattccgccggcggttccgcgaaggacgcgagaaataagagcacccaggcgatcctgccgctccgcggaaagatcttaaacgtggagaaggcgagactcgacaggatctacggaaatgcggagatcaaatccatgatcacggcgttcggtaccggaattcatgaggatttcgatatctcgaagctccgctaccacaagatcatcatcatgactgatgccgatgtggacggtgcccatatcagcaccctgcttttaacctttatctaccggttcatgccggagctcatcaaacagggctacgtttatctggcacagccgccgctctataagatcgagaaaaacaagcgggtatggtatgcgtacagcgatgaggagttaaacaacatcttaaaagagatcggacgtgaccagaacaacaagatccagcgttacaaaggacttggtgagatggacgcggagcagctctgggagacgaccatggatccggaacaccgaattcttttacgtgtgaccatgaacgaggagatgacatcggagatcgatctcaccttcacgacactcatgggagatcaggtagagccgcgccgtgagttcatcgaacagaacgcgaagtacggaactcttgacatttaatgcggcagcagggcgctccggaaagagataaaatccttccggaacgtcaggcggcgcagtttacgcaggtttaaggcgcagcgcaggctgcattggaggaaagaatggaaccgaatatttttgacaaaattcatgaaatagacttaaagaagaccatggaaaagtcgtacatcgactatgccatgagcgttatcgcgtcgcgagcgctcccggatgtccgtgacggcttaaaaccggtacagagacgtgtcctctactccatggcggaattgaacaacggtccggataagccccacagaaagagcgcccgtatcgtcggcgataccatgggtaaatatcatccgcacggagacagctccatctacggagcattggtaaacatggctcagaaatggtccatgcgctacatgctcgtagacggacacggaaactttggttcgatcgatggcgacggtgccgctgccatgcgatacaccgaggcgaggctcagcaagatctccgttgagatgctggcggacatctataaagataccgttgactttatcccgaacttcgatgagaccgagaaagagccgaccgtattgccgtccagattcccgaaccttcttgtaaacggcggaaccggtatcgcagtcggaatggcgacaaatatcccgccgcacaaccttcgggaagtcattgcggcagtagtaaagatcatcgacaaccaggtggaggaaggaagacagacctccctggaggagatcttacagatcatcaagggaccggatttcccgacaggagctgagatcctcggaacaagaggaatcgaggaggcgtaccgtaccggacgcggaaagatcagagtccgcgccgtgacaaatatcgagaccgcaccgaacggaaagagccatatcatcgtcacagagcttccgtaccttgtcaataaggcaagactgatcgagaagatggcggagcttgtaaagacaaagaagatcgacggcatcaccggcatcaccgatgaatccaaccgtgagggaatccgcatcaacatcgagcttcggagagatgtaaatgcgaatgtcctcttaaaccagctcttaaagcatacacagctgcaggattccttcggcgtgatcatgctggccctggtaaacaatgagccgaaggtcctgaacctacttcagatgctggagtactatctggaccaccagaaggacgttgtgaccagaagaacgaagtacgacttaaataaggcggaagagcgtgcccatatcttagagggcttattaaaggctctggaccacattgacgaagtgataaagatcatccgcagttccgcgaatgtcgctgaggcgaagcgggaactcatggagcgctttgagctcacggacccgcaggcacaggcgatcgttgacatgcgtctgcgtgctctcacaggtctggaacgcgagaagcttgagaatgaatataaagaactggaggcaaagatcgcggaattgcgcgcaatcctggctgatgaaaataaattattaggtgtgatcaaaaaagagatccttgtgatctccgagaagtacggggatgacagacggacaaagatcggcttcgacgatgatatgtccgtggaagatctgatctccgatgatgacactgttattgccatgacaaatctcggctacatcaagagaatgtccgtggacaatttcaagagccagaaccgcggcggcaaggggatcaagggaatgcagacgatcgatgaggacttcatcgaggatcttctcatgaccacgaaccatcactacatcatgttctttacgaacatgggacgctgctaccggatcaaggcgtacgagatccccgaggcaggcagaacagcccgcggaacggcgattgtaaaccttttacagcttcaggcaggagaaaaggtcacagcggcgatcccgatgcgtgagatcgatgatggcaagtacctcttcatggccacaaagaacggtatggtaaagaagaccccgatgcgcgagtacagcaacatgagaaagacgggtctccaggcgatcctgctccgtgaaggtgatgagctgatcgaggtaaaagtgacagataataccgaggatatcttcctcgctacaaaattcggtatgtccatccgcttcaaggaaacggatgcgagaattaccggccgtgtttcctatggcgtgatcggcatgaagctcgatgagggcgatgaagttgtcggcatgcagatggcaagccagggcgagtacatgctcgttgtatcggaaaagggatacggaaagagaacgagaatctctgaatttaagctgcagctgcgcggcggtaagggacttctctgctataatgtgacagaaaagacaggaaatcttgtcggaatgaaactgctcgacgatggaagagacatcatgctgatcaccaatgaaggaattctgatccgcatgagtgttgatgatatctccgtgatcggcagaaacacatccggcgtaaaactgatgagcattgatgccgactccaatgtccgcgttgcttccatcgcgaaagtgcgtgaaagcagccgccaggatgaggaggacgaaaatgtggaagatccggaatctgaggaaaatgaggacggagaaatcacagagtgatcatgctcatgaatagaaaaaacggttgtgagatcattttccggccgtaagcaggatttctgactctggagtgattggatacaggaatctggatataccgggttcctgtatttttttaaacattatttgacaatgaacataggaggatgcggcgatgggaattacaaaagcagaggcattaaaagcagttgacagagagcgcggaccggtgtgtgaagccagtgacaggatctgggaccagccggagactgcgttccaggaattccattccacggacgtattgtgtgaacttcttgaaaaagaaggattcagggtggagagaaatcttgcggggatcgcgaccgcgttttccggtacctacggatcaggaaagccggtagtgggcattctcggtgagtttgacgctctgtcaggcctcagccaggagtctgagagcctggaaaagaccgcactggtcgatggcgcaccgggacatggctgtggccacaatcttctcggaacaggctctgtagcggctgcaatcgcggtaaaagagtatctggagaagaacgggaaagagggaaccgtgatcttctttggctgtccgggcgaggaaggcggatccggaaagagctttatggcgagagacggcgtgtttgacaacctggattttgcggtgacatggcatccgggcgataaaaatgtggtttctgttggaagttcccttgcgaactatcagatcatctaccgtttctacggacaggcatcccatgcggcggcatgcccggagcttggaagaagcgcacttgacgctgtggagcttatgaacacaggtgtacagtatttaagagagcatatcatccaggaagcacgcattcactatgcgatcaccaacacaggcggatattctccgaatgtcgttcagccgtacagtgaggtcctctatctgatccgtgcgccgaagaacagccaggtgaaggagatctacgagcgcgtcaacgatatcgcgagaggtgcggctctcatgacgggaacaaaaatggagctccagttcgtaaaagcatgctcaaatctcgtggacaacacggtcatggaggagatcatgcagaagaacctggaggagatcgaaagagaaccgtacactgctgaggagatcgaattcgcgagaaagatcggcgagacgttcggcggaaatcatgtggacatccaggatgttcttgtaagatatgaaaaatcgagaaaagcggctgtggaacagttcctggcacctcatgcggatgatgtgatcaacgacttcatcgttccgcttatggatacggaggagtgtttaaagggatctacagacgttggtgacgtgagctgggtatgcccgacggcgcagatcaacgctgtgacggaggcagcaggaacaccgggccattcctggcagatggtttcccagggcaaatcttccattgcacacaaaggcatgcagtttgccggaaaggtcatggcgggaactgtcattgacatgctggaaaaaccggagcttatcgaagaggcgaaaaaagaattaagaagacgcgtcggcgcggagggatatattccgccgatcccggaaggaatccgtccgatggcgatcaatccaaaaaagtaatagggaggaaaatcgtctatgaggaccgttcaggcgagtgagatcacaaaaaatatccgggaaatgtgcattgaggcgaatcatttcctttcggatgacatgaaaaaagtatttgatgagagtgtaaagcgggaagaatcccctcttggaaagcagatcttaaaccagcttcaggagaatctggagattgccgggagagacatgatcccgatctgccaggatacggggatggccgtcgttttcatcaaagtcggccaggaagtacatattgaagggggaaatctgacggatgccatcaatgaaggcgtccgtcagggatacgtggacggatatctgagaaaatccgtcgttcgcgatccgatcgaccgcgtgaatacaaaagacaatacaccagcgatcattcattatgagatcgtcgatggggaccaggtggatattacagtggcaccaaaaggattcggaagcgaaaatatgagccgtgtgttcatgttaaagcctgcggacggcattgagggagtaaaagagaagatcctggaggctgtccgcgatgcaggacccaatgcctgtcctccgatggtggtgggagtcggcatcggcggcacgtttgaaaagtgtgccctgatggcgaaacatgccctgacgagaaatctggaagaagaatctccggtggcctatgtccgtgacctggaaaaagagatgctggagaagatcaacggtctcgggatcggaccgggaggtcttggcggccgcgtgactgccatggccgtcaatatcgagacatatccgacgcatattgcaggacttcctttggcagtgaatatctgctgtcatgtgaacaggcatgcgcatcgcgttatttaataagaggatcggaggaaaccatggacagacagatcagtgtaccaattaagaaagaagacgcattgtctctccgggccggagactacgtgactcttacgggaaccatttacacggcgagagatgcggcacataaaagaatgcaggaggctctggatgcgggggaaagtcttccgatcgagatgcagggaaatgtaatctactatatgggaccgtccccggcaagagagggacggccgatcggatctgcaggaccgacaacggcaagccgtatggataagtacgcaccgaaacttttagatcttggcctgggcgccatgatcggaaagggaaagagaagccaggctgtgatcgacgccatcgtaagaaatggttcggtctatttcgcagcgatcggcggcgcaggggctcttttatcccagcgcatcaaaaaatccgaggtagtcgcctatgatgatctcgggaccgaggcaatccggaaactggaagtggaagatttcccggtggtagtcgtgatcgactcccagggcaataatctgtatgagactgcgatcaaagaatatcagaaataatatgaaatagcagatggatcagaagctcagaactgcagcatgatcctgcagagggggattttcgggtagttttcccggagattgctgtgtgcaggatcaatttctgagcttctttctgtctggaagatgaataagcttcaggctgcacttacataatataggagtacaagcccattcagatcagttgtgcagctgctgatctgagaatattctctgcgaacacagaacgcaggaaaaacatgcagtaaaaaataataaaaaagatggaaaaagttgttgacaaaaagaaacagagcttgtataataaatcctgcgtctggcgagttcgcctgacaaacttaataaatgataattagctacggtaataaggagaaatactcaagaggccgaagaggcgcccctgctaagggtgtaggtcgggaaaccggcgcgagggttcaaatccctctttctccgttcatctgattgaaaatctccaaaaaagaatttcaaaaaagatgaaaaaagttcttgacaaaccggaaacggtatgatagaatgaacgagttgctgctaaagaacagagagcaacaaaaacaaagttccttgaaaactgaacagtatgtaaaaccctgaaaattcttataaaaatggtcttttggtttagaccatgaatgagaacattcagaacaaaacctaacaaaacagtagaacggtttaaaaattagc

SEQ ID NO: 2102 - DNA, 3495 bp, Unknown
  gut microbiota DNA sequence
gtcctctatatggtccgctccatctgggtaaaggacgcgctggagcttcaggagagagtcgaccgtattgctcttgcggcatccatgatgacagatacaaagatggagaagaagtttatcgacggctgctccaataccgttccgaacaaggtcctggagtcccttatgtgggataacttcaatgatctcggtgtctgccattacacggaagaagaattaaagtacgcgaaagtcctctacgattccgttgagatgaagtctgataagcttccgggagatgcgacggaggacagcagcgatatctacgaatatgttgatgagaagtccaaacacggcacaacaccgatgaatgagttccttgtcccgtatctctactatgagaaaccgagaatgggatccacggatgtcggtgatgtgagctggtgcattccgacggcgcagatcaatacttccacattcccggcacaggcgcctggacattcctggcagaatgtctcctgcggacggacatccattgcccacaagaacatgctgctggcaggaaaagttatcgcagcgacagcgatcgatctcatggagaagccggaagttcttcaggcggcgaaagatgagttcaataagaagatgaaacgctatggcggttacatctgcccgatcccgaaggatgcggttccggtcgttccgggcgagaagatgtaatggtgcagacggttacgaaaacagaatagactggtcgtaagtccggccggacagatcatgcagcagacgtttgctgcacagagctgtccggctttttacgcggacaacgagccaaagtccgcgcttgcgcgagaccttggcgactgtcgcgataacaaggggaaacacgcgaagcatgttttcacttgttacttcggccaattccgtaaaatgaaaccatatctgcagatttcgccaatttacagattttttacacatttttcagcgaaaagataggaatcgcggttctaaaacacgcaaaaatgtggtataatataaaagtatattttcagataggagaacaaatggttgctttcggtggcggaaattttctgaattgaagattccgtaaaatgtcgctgcggtcgtggagcctgctgatgtgttttcacggcagaaaggagcggatggatatgaatatcagggaaacgatggaacaatgggaacgccagaatctcagcccgtatgctgctctgagcagtgagacgctggggcgggaccgcgaggaagtcccctgtgatgtccgtcctgcctaccagcgggaccgtgaccggatcctgcacagcaagtcatttcgccgcctgaaagacaagacacaggtctttctggccccggaaggcgaccactaccgcacgaggctgacgcacacgctggaggtctcccagatcgccaggacgatcgcaaaggcgcttcggatgaatgaatccctgacggaggcgatcgcgctgggacatgatctcggacatacgcctttcggacatgccggcgagtacatattaaatgagatctgtgaggacggttttgcccactttaaacagagtgtccggatcgtggaggtcctggagaaaaaaggacagggattaaacctcacgaaggaagtacgcgacgggatcttaaaccacagaacgtcaggaaaccctgcgacgctggagggaaagatcgtccgtttctctgataagatcgcgtacatcaatcatgacatcgatgatgcgatccgcgggaagatcatcaccgagaaagatatccccagagagtttgcggatgtcctcggtgatacggtaaaggaccgcctgaatatcatgatccatgatatcatcagcaacagcatggacaagccgtcgatcttcatgtctccgaatgtggagcaggcgatgcgcgggatgagagagtggatgttcgagcatgtctaccggaatccggccgcaaaaggcgaggagggaagagcgcagcagctgatcgtgacgctctatgaatattatctgaaacatgtggacgagcttccggaggaattccggatgatgatggagacccgcggtgagaagaaagagcgggtcgtctgcgattatattgccgggatgagcgacggatacgcgatcgaccggtttgaggaattatttgtgccgaaggcatggaagatataaaaaatacgcattgtgggagggatgaaacgtgtattatccggaagaagtgatcgaggaggtacggacgaggaatgatatcgtggatatcgtgtcccagtatgtaaatctgaagaaaaagggtgcaaactatttcggcctgtgcccgtttcataacgagaaatccccgtcgttttctgtctccccatcgaagcagatgtactactgttttggctgcggagcaggaggaaacgtgatctccttcgtgatggaatatgaaaattatacttttgtggaggccgtgaagatgctggcggaccgcgccgggatcgcactgccggagatggaatattcgaaggaagcaaaggcccaggcaagcttaaaaaatacgctcctggagatcaatcgccttgccgcaaatttcttttattaccagctaaagcagccatccggcaagatcggatatgattacctgaaggaaaagcggcggctgagcgatgatacgatccgccatttcggacttggatattccagcaaagtgccggatgatctgtaccggtatatgcgatcgaaagggtatcacgatgatatcttaaaagagacaggcctcttctttattgatgagcgcggggcaagggacaagttctggaaccgcgtcatgttcccgatcctggacgtcaacaaccgcgtcatcggcttcggcggacgtgtgatgggggatggggagccgaagtatttaaactccccggagacgaagatcttcgataagagccggaatctttatggattgaacttcgcaagaacgtccagggcgaaatatatgctggtctgcgagggatatgtcgatgtgatcgcgatgcaccaggcgggttttacgaatgccgtggcgtccttagggaccgcatttacgtcccagcacgcgatgctgttaaagcgatatacggatcaggtgatcctgacttacgacagcgacggagccggcgtgaaagcggcgctccgggcgatcccgatcctgaaagaagtcgggatgtccatcaaggttttaaacatgaagccgtataaagatccggatgagtttatcaagaacctcggaaaagaggagttccagaagcggatcgacaacgcagtcgggagtttcatgttcgagatctcggtgatccggaaccagtacaacatgcaggatccggagtcaaagacaggattttataatgccgtcgcgaagaagctgctggaattcccggaaaagcttgagagggataactatacggaagccgtcgcaagggagtatatgatcccggaggcagacctcaaaaatctcgtgaattccatgggcggactcatcggagtgacgacaagagag

SEQ ID NO: 2103 - DNA, 5784 bp, Unknown
  gut microbiota DNA sequence
agagcggatccgacagaaaaaggagaaggaggacgggatccggaagtcccagcgactgctcctcacatggctcatcgagcggccggagttgttcgaaaagatccgcggcatcatcacgccggaggatttcgatgatgaactctatcgggaagcagcgtccatggtgtttgaggaatatgaaaaaacaggaagcgtgaaccctgcccagattctgaatcatttcatcgagggcgaggaacaatacagggaagtagctgccctgttccatgcaacactcagtgaatccttaaataatgaggagcagaggagagcgttttccgagacagtcaaaaagatcaagaaacacagtctggatgtgaagggaaagactgcagacatcagagaattacaggaaattatcaggcagcagtcggaacttgctgccctgaatatcacactggactagaatccagccgggaaggatggaattatggaggaaaagacacttacatttgacgagaagttatcaaaacttctggaactcgcaaagagcaaaaagaatgtcctggaagagaaggacattcacgatgcgtttgcgggggaagaactgacacctgagaagctggaccgcatatatgacttcctggataaaaagcatgttgatgttttaaaaatgtcaaacgatgacgatatggatccggatctgttcacagaggatgaagatccggacccggaggatgagatcgatatggaacatatcgacctctcagttccggaaggagtcagcgtggatgaccctgtccggatgtatttaaaggagattgggaaagtgccgctgctctccccggatgaggagatcgagctggcaaagaagatcgagcttggggatgaggcggcgaaaaagaagctcgccgaggccaatttacgtcttgtggtcagcatcgcaaagcgctatgtgggacgcgggatgcagcttctggacctgatccaggagggaaatctcggactcatcaaggccgtggaaaagtttgattaccggaagggatacaagttcagcacttacgcgacctggtggatccgtcaggcgatcacccgcgcgatcgcggaccaggcgagaacgatccggatcccggtccatatggtcgagacgatcaaccggcttgtgagaacacagcgccagctggtacagaaactcggaagagaggcaacgccggaggagcttgcgaaagagctcgatatgccggtagaccgcgtgagagagatcatgaagatctcccaggatccggtgtccctggagacgccgatcggtgaggaggaggacagccatcttggagattttatccaggatgacaacgtggaagtgccggcggatgccgcgacgtacacactgctccatgaacagctgatggaggtcctttcaacgctcacggagcgggagcagaaggtcctgcggctgcggtttggtctggatgacgggagaccgaggacgctggaggaggtcggaagacagttcaatgtgacgagggagcggatccggcagatcgaggcgaaggcgctccggaaactgcgccatccgagcagaagcaaggttttaaaggattatctggacgaataagcgaaaaaagaatggagaaacatatatgaaattatcagaacgcctggagatggtgctctcgttcgtggaaccgggagaatccgcggcagacgttgggacggaccacgggcatgtgccggtggaacttgtccggagaggaatcgtaaaaaaggcagttgcgatggatgtgcggaagggaccgctttcccgtgcaacggagaatattgcgctcgcaggactttcggagaagatcgcgacaagactctcagacggggtggcaaagctgctgcctggggaggcggactcggtcgtgatcgccggaatgggcggtgagctgatcattaagatcctggagaacggaaggcacatgtgggattccgtgtcccagtgggtgttgtccccgcagtcggagatctttaaggtccgcagatggcttctggaaaacgggtttgagatccgcagggaagatatgctcttagaggacgggaagtattatacggtgatggatgtccgaagaagaggttccggtgacgctgatcaggcggcagatgctctgaaaggtgcagatcaggcagatgggaatgcgcaggatgcagcctccgccagtgggctttccggactttctgaggacagccggatgctctacggggattatctgatccggacgaaaaatccggtgcttcttacatatctgaaagaggaagaggaaaagctcgctcgttttatcggggatctttccgcaaaggccggttcttcggagcgggcggctgaacgtctttcggggttaaaagtacagttgagggaaaatcaggaggtacagcatgaaatgcagggagatcattgagattttagagacgcttgcgccgaagtcctgtgcctgtgactgggacaatccgggacttcttgctgggcgtatggataaggatgtaaagaagatcctgctgacactggacgcggatgatgcggcggtggagcgggcgaaagagatcggtgcggatatgcttttgagtcatcatccgctgatcttcaagccggtgaagcatgtttccgatgaggattttatcggaagacgtcttgtctccctgatccaggcggatgtatcctattatgcgatgcacacgaattttgactcggcgccgggatgtatggcggatattgtcgcggaccggctgaattttgtggatcagaagccgctggagcttatgggagagctttcgggaactgcttatggaatcggaaagaccggaactttgaagaaaccgatgacgggtccggagcttgcgagagaggtgaagaaccggtttggactgccgtttgtcacggtctacgggagtgagctttatgaaaatgagccggtgacgagagcggcgacttgtccgggtgccggaggaagtgagatccgggaggcgcttcgggcaggggcgcaggtgtttattaccggggatatcagtcaccatgagggaatcgatgcggcggcccaggggatgatgatcattgatgcggggcattatgggctggagcatgtgtttatggactttatggagggatttttgcgggataaattgccggaggaagttgcgatcgagaagatggcggtgaagtttccggcggtggtgatataggatggattggaggcggttttatggcagttgtgaaggcgaatggaatcgggaaggtttatccggaggggactacatatctggagatcgcgagggattttcaggatcagtatgagaatgacattctgcttgtaagagtgaatggaaagctcagggagctggataagactttgacggaggattcagagatttcgtttatcacggcggaggggaatgccgggtataagacatatgagcgcagtgcgatctttctgatgctgaaggcgttttatgaggtagtcccgagagagaagatcaggaagatccagatcgattttgcgcttggaaacggaatttacggggagcttgtcggggatgtcccggtggatgagaagctgcttttaaaggtaaaggcgcagatggagaagctgcgggatgcggcaatcccggtcaagaagcggagcatcaacacggatgatgcggtggagctgttcggaaagcataggatgcatgataaggagcagctgttccagtatcggcgggcatcgcgggtgaatatttacagtatcggagagtttgaggactatttttacgggtatatggtcccggacacgagttatgtgaagtattttgatctggtgccgtgccatgcgggatttctgctgctgcttccggtgaaatcggatccgaagcatgtggagcatccggcggtcagggagaagctgttctcgatccttcgttcatcgtatcggtggagtgacagtcttgaggtcccgaatgtcggtgctctgaataagatgatcgcggacgggaagggacaggatctgatcctgatgcaagaggcactccaggagaagaatatcggtcaggttgcggaacaggccgtgaaggatccggaccgcaggatcgtgatgatcgcaggtccgtcttcttccggtaagacaaccttcagccacaggctttcaacccagtttgcggcgctgggatacaacccacatccgatctccgtggacaactatttccgaaatcgggaagagtatccgcttgacgagaacgggcagccggactttgaggcgcttggatgcgtggatattccgcagtttaatgaggatatgaacgccctgctttccggtaagacgattgagcttccgaggtttaactttaagaccggtaagagagaatacaaaggcgaaatgctgaagcttggaaaaaaggatattctcgtcatcgagggtatccactgcctgaatgacgcgatgtcctcagaacttccgaaggacagtaaatttaagatctacatcagcgccctgacccagttgaatgtggatgagcacaaccggatcccgacaactgacggacgactgatccgccggatggtgcgggacgcgagaacgagaggaacctccgcgttagagaccatcgagcgctggccgtcggtacgccgcggtgaggataagaatatcttcccgtaccaggagagtgccgatgtgatgttcaactccgcgcttgtgtatgagcttgcggtattgaagctttatgcggaaccactgctcttcaatatcccgagagaccgggaagagtatgatgaggcaaaacggctcctcaagttcctggactatttccttgccatcgacagtgacgtgatcccgaagacttcgattctcagggagtttattgggggaagctgcctaaacgtgtagttgtatccgttttttctgtggcattttcatatgagtgtgcatccatatggacattatctgtaaaagccgtaacgaaaaaaatataaacacacgtctggacatcaaaataaatatatgctaaaataaacaagttctgagtaggacagatggtcgctgctgcaattctcagggatgcaggagaggaaagtccgggcttcaaagggcagggtgccggataacgtccggcgaaggcgacttcagagacagtgcaacagaaataaaccgcatggaaacatgtaagggtggaaaggcagtgtaagagactaccgcctcactggtaacagggagggcacatgcaaacctcactcgaagcaaggccaaacaggaagcataaggcggcccgtctgcttccgggtaggccgcttgagccgtccggtgacggacggtctagatagatgaccatccaacgacataacccggcttatcgtcttgctcagaattgaataagaaattgagaccgtcttttgaaacttagcggaaacgcgaggttttggaaggcggtctttttacgccttaacgatgaaaaaaagttatgtaattagataaaaaaacgaaattttactttatgataatcggatgatatgatgaattcagaaagagaaatggttgatcagtcagacaagatcatacacagggaaaggatgaaattatgggattctggaagaaagcaaaaactgccgatactcccggaacatgggaaggaacggaaaaatacggaccagtgaaacttgcatcggtggatttccgcgacggtcagcagtctgtgatcgcaacgagaatgagaacggaggacatgcttccggtcttagagcagatggacaacttcggatatgagtgtatcgagatgtggggcggtgcgacgtttgactcctgc

SEQ ID NO: 2104 - DNA, 16611 bp, Unknown
  gut microbiota DNA sequence
caggcttatcactcccaagagttcacatcgacggagtggtttggcacctcgatgtcggctcatcgcatcctggggctgaagtaggtcccaagggttgggctgttcgcccattaaagcggtacgcgagctgggttcagaacgtcgtgagacagttcggtccctatccggcgcaggcggaggatatttgagaggagctgtccttagtacgagaggaccgggatggacggaccgctggtgtaccggttgagctgctaagctcatggccgggtagccaagtctggcagggataaacgctgaaggcatctaagcgtgaagcccccctcaagatgagatatcccattcgttaagaagtaagaccccttgaagacgacgaggtagatagggcagaggtggaagtgcagtaatgcatggagctgactgttactaatcggtcgagggcttatccaggaaggtcaagtggagattcaaaggttgatgatgttcagtatgtgattttgaaggtatgttaaataccttgtatggcccggtggctcagctggttagagcgccgccctgtcacggcggaggtcgtgggttcgaatcccatccgggtcgcgcatacatggttttgtatgtatttatttttaaatatgggatcttagctcagctgggagagcatctgccttacaagcagagggtcataggttcgagccctataggtcccacttttaaagatatgccgatgtggctcaattggcagagcagctgatttgtaatcagcaggttatcggttcgagtccgatcatcggcttttagtttcaaaaactaaataattcttatgggcggattcccgagtggccaaaggggacagactgtaaatctgctgcaacttgcttcggtggttcgaatccacctccgcccattaaaataggtattgatttttcgatatttattgtgtataataataaggtatcgcggggtggagcagtctggaagctcgtcgggctcataacccgaaggtcgtaggttcaaatcctgcccccgcaattttgcccagatagctcagttggtagagcagaggactgaaaatcctcgtgtcgctggttcgattccagctttgggcactacaacttcatagttgtatgggatattagctcagtcggtagagcacttgacttttaatcaagttgtccggggttcgaatccccgatgtctcattaagttacggaagccgagaggtttccgttttttcgtattctaaagtttgctaaaaaagaggttgctgcacattcacacagcaacctcttttttaggttaaagtatatgttgttgaaagtcgaagatcagtttgattttgtcggaatgaactgtgcaatgcgtccggcgaaatcagcgatattctgcgtctgaaggatcacacggccaggaccggtaagctttgtgaggaagagaccttcgccgccgaagaagatgtttccaaggcctttgatcgtctcaacttcatattttacggttttctcgaacgcaacgacatttcctgtatcaactttgatcacttcgcccggtgcaagctgtttctcgacaacatcgccgtcgatttcgagaaagaccattccggaaccggagatggattcaaggatgaagccttcgccgccaaacagtccggaagtaaatttctttgtgaaggtgacatcaagatttacagaatcctgtgcgcagaggaatgcacctttctggcagatcatgccgccgttttctgccgcgtcgatcggaagaacctgaccaggtacagttgacgcaaatgcgatcgtggcacccggagcatccgcacggtaggtagccataaacatggattcaccggcaaacatgcggccaagacctttcataaatccgccgcgtgtgtttgtggacatggaaatcccttcagacatccaggacattccgccggactgtgtgtacatggtttcgcctggagcatcaaatttgatctcaactgcagggatagttgtgccaataattctgtatttcataggatcctctctttctggcgtattgaacgatgaaaatacgcttgtattgctgtatccaaaagatacacaagggtgaataaatatattatatcatactctgccgatagttacagaagaaatactggaatgaaatttacagtgaaaaatcctgtttatgaaaataacaaaatgataacatgtttacagtttccttaaatatgggggtgctcgcttgtgtgaaaaaattatggatgatagaatatcggtaacaagttcagtgacaggcgagttcagttttggaaaaagaaggtggcaaggtgaaaaagatttggatgatgacggcagctttaggactgggaatctggctgacagggtgttcgccggcttttgttccggtagaagatccgagtgagccacagacagaggaacgaaatagtcctgaaacggaaaaagaagatcagagggaaaatctggcctttcagccactttcgaaggaagaacgtcggtggatcgtaacagaattggaatcctttgatggagatcataaattttcggatatggatccggaaaaggcagcatcctgcggcggagagatccgggatgcgtatgattttgttggacgggagacggaaaatggttacgggtatgtcctgggatttcgaaaaggcaaggaggatccgctgaaagatctcagcatttacagcattgatgatgtgatcgaggctgaaaagtggaacgaggacgaaagtatttttgaaaaagtatatactttcgaaaatgtttatgaaatgtattacacggaagcaaaggatgttctgttttttgttccgagcggaatggaagaaccggaagaactcagaaaagcgtttacatatagcctctgtgacggtgacgagggggtccggtatctggagactgtaaaggagcgcggtgtgcggatgtcaccaccggaggacggcggatatcttaccgtccgaagatttgaagctgcagaggtactggaggaatatattcctttgactgagaatcaggagaaagagatcaccggctcggatgagatcattgatccggtaatgtatggaatagatgggatcacatatgcggcaagccaggaaatttatgagtcagaaaacccggatccggatgagatcacggttccggcattaaaaatagcagaggaaaaatgtgaatttcagacggtcggaacggaagacatgaaagaaattacaagtgcggaacttgaggtgatcccgatttccaaagagctggagaaaggcttggagagcaaagattctgctgacgtggaagctgactcggaagtcgtgggaatatccgagacgctgcaggatccggaattgttaaaaaggctggaggagatcctgtcgggggcatcttttgatgaagagaaagactgtccgtataacgggatcctgacgcttacaaaggcggatgggacacagataacggtgagactggcatcggacggatgcgattcgatggcttacggcagctacggcttttatcaggcagccgggggtgaagtcgcagagatctgggatatgtttccggagttgaaataggatacctcggcagtgcgctgggatatgagatcatgaattggcatcagctcgacctaatttttgcgagtgttgtcatgggatttgcaattctcacttcattggaaaaggataagtgatcagtcaacaaattttgattatatgaaaaacaaaaaatttggaggattatcatgaaagagaacagaaaattattgaaagaagtgctgaaggacatccggcacgatatgacggatgaggaagttttgaaccttttagcagacagtaagatttcagtcagtcctgaaaaagagaaagaaaagtacacgctcgggcagcgggcagctgacacaatcgcaaaatttgcaggcagttgggcgtttatattttcctttacaggtgggctgatcctgtggatggtcatcaacacgattcttgcgtcaaaagcgtttgacgcatatccgtttatcctgctgaaccttgtcctgtcctgcgttgcagccattcaggcaccgctgatcatgatgagtcagaaccgacaggaggaaaaagaccgccggcgtgctgaaaacgattataaggtaaacctgaagactgagatcatgatcgaagacctctacgataaggtgaatgcaattcttatcagacagtcgcagattgagaaacttctctcggagcaaaaagagaaaaatactttataatgaatgaggatgcgaatttgacgggcaatttccagttcgtttgcaggcagatgggaaagaggagaataaaaattttgaattacagaaaagaaaaacagccgggacttttagaacggctgacagaatatgcgggatcggatgcgtatccatttcatatgccgggacataaaagacgggagattccggatgggatcccggggggatttccggacccgtatgggatcgatatcacggagatcgatgggtttgacaacctgcatcatgcggaaggaattttgaaggacgccatggatgaggcggctgcgatctacggggcggaccggtcctggtatcttgtgaatgggagtacatgcgggattttaagtgcagtttttgcgactacggaaaacggcggaaagatcctgacagcgagaaactgtcataaggcggtgtaccatgcgatctacctgaaccggctggaggcggagtatctgtatccggaggagatcacggaattcgggatcaatggaggaatccgtgcggaggacgtgagaaaagcgcttgaaaaggatgcgatgcgctgtgcgggaaattcgggggatgtgagaggaaaaaacacgaaaatccaggcagtgctcatcacatccccaacctatgaaggcgtggtgtcggatatccgggcgatcgcggatgcggctcatgaatacgggatcccattgatcgtcgatgaggcgcatggggcacatctggagtatgcagatcagtgtcacagctttccgaaatcggcgttggaatacggggctgatatcgtgatccagagccttcataagacgttgccatgctttacacagacggcaatcctgcatgtgaagggaaagtttgtggatcaggacagagtttcgaggtatttgtccatgtttcagacgtccagcccgtcatacctttttatggctgggatggagcggtgcatccggtatatggatggggacggaagaaatgggatggtccggtatgaggaaagactggagcactttatggagcggatggaaggacttcaggtacttgaggtcctggaccgggaaatctgtgggaaatatcggactgtggccggatgggatccgtcgaagatcgtggtttccacgatgcgcgcagaggattttcacggggaagagctggcggagacactgcggagaaaataccatcttgagatggagatgacagcaccggagtatgtgatcgcgatgacgtcgctgatggacacggaagaaggatttgagcggcttggaacggcgctgctggagattgacggggcgctgagacactgcgtggagtctgaacagcaaaaagaaaaaggtgagtcaaagggaaaaaaaagatgtgagactccagaagccacggaatccaaagtttcgcacccggtcaggagaacgctcatctgcgaggcaatggatgccgatacggagcgcacagcgcttcaggatacggtcggaaaggtatctgcggagtttgtgtacctgtatccgccgggaatcccgatcatcacaccgggagaggtcttcacggatgtgatcgtggagaagatcgtggcgtacaaggcagcaggacttcttgtccaggggccggctgatccggatgcggacgtgatcttaacatgccagacgccagggcttgttcataaaggatgctgatgagtatgctgctggggaaggaaatcgttagtgattcaattatttttccaagcaggaacaggaattcttacatcgtataagtggagacgcggatcccgtgaaattatcgagcgaggatggaaacaacggttgcacgggacctctgattttgatacaatgaaaagatagaacctgaaaagtggttgtaaaagttcgatcgaaaagtcttatctgacagggataaaaattataatacagaaggctgagagaaacaaatgggcaggatatattatcttcttggaaagagcgcgacaggaaaagatacactgtataaggaaatcctgaaacggagaccaaagctgcggacggtgacgatgtatacaacaagaccgatccgggaaggcgagacggacggagtggaatatttctttaccgaccgcgaggagctggagcggcagctggcttccggaaaggtgatcgagtcgagaacttatcagacgatcgctggtccgtggacttactatacggtggatgacgggcagtttgatgttgccgacgacgagtcctgtcttatgatcgggacactggaatcttacgagaagatgtgtacctattttgaagcgggaaagatggtcccggtctatatcgaggtcccggacgggatccggcttctcagggccgtcaaacgcgaggaaaaccagaaaaagccgaattatcgggaagtctgccggagataccttgcagacgaaaaagatttttcagaggaaaatctggaacgcctgggaattacaaagagatatcagaacacggatatggaaatgtgcgtggaagaaatcctaagggatttggataaataactttttataggcgttattttgtggtaagataaaatggaaacaccggtagcgggaacagttaaatgttctgttcgaaccgggaagctccggcgtaaaaagcactgccggaaccaacaggatgaggagggatgcggctatgtcagaagaaaagatcatgggatttgaagagatcctcgggaatgagatggtgaaagatcactttaaaaaggcgatccagaaccataagatctcacatgcttatatcctgacgggagaagccggcatgggaagaaaatcgatcgcgaatgcgtttgcgatgacactcctgtgcgagaaaggcggaagtgagccgtgtatgatgtgccattcctgcaagcaggtgatgagcggaaatcatccggatctcatctatgtgacgcatgaaaagccgggaagtatcggcgtggatgatgtgcgggaacagatcaatgatacgatcatgatccgtccgtacagcagttattataagatctatatcgtggatgaggcggaaaaaatgacggtccaggcgcagaatgccctgttaaaaacgatcgaagagccgccgtcctacgcggtcatcattctgatcacgacgaaccaggaggcgtttcttccgacgatcctctccagatgtgtccagatgaagttaaagccgcttaaggatttcacgatcaagagttacctgacccagaatctccatatcgcggagaaggatgcggatatctgcgctgcatttgcgaggggaaatctcggaaaggcgatccatctggcttcgtcggatgaattcaaggaacttttccagaaggtcatggttctcgtgaaaaacgtgggaactatggatatttcgatgcttctggattgtatccgggagatgaaagagcagaactttgatatcggcgaggtgctggacttaatgcaactctggtaccgggatgtgctcatgttcaaggtcacgaaggacatgaacctgctgattttcaaggatgaatataaaatgatcaacgagacgggtgagaaagtcgattatgccgggctggaagcaattctggcggcgatcgacacggcaagaacacgtttaaatgcgaacgtaaatatggaattagcgatggaattacttctgctgaccatgaagcatccgtcataaggagcgaagaatgacgaaagtaattggaatccgcttccgaaaagcgggaaaagtgtattatttcagtcctggtgagaatgagatcaagaccggcgaccatgtgatcgtcgagacagccagaggcgtggaatatggatatgtggtgcttggaacccacgaggtggatgacaagaaggtgatccagccgttaaagtgcgtgatccgtatggcgacaccggcggatgaggagacggagcgccgcaacaaggagaaagaaaaagaggccttcaaggtatgcgttgagaagatcaagaagcacaatctcagtatgaagctcattgacacggagtataccttcgataataataaggtgctgttctattttacggcagacggaagaatcgatttccgtgagctggtaaaggatctggcgtccgtgtttaagacgaggatcgagcttcgccagatcggtgtccgcgatgagacaaagatcgtgggcggaatcggtatctgcggaagaccgctttgctgtgcgtcctatctttctgagtttattccggtatccatcaaaatggcgaaggaacagaatctttccctgaacccgacgaagatctccggtgtctgcggaagactgatgtgctgcttaaagtacgaggaagatacttatgaggaattaaacggaagacttccgaatatcggcgactatgtgacaacagacgacggtttaaagggcgaggtccacagtgtgagcattctgcgccagcttgtgaaggtcattgtgactgtgaacaacgatgagaaggagatccgtgaatataaagtggatcagttaaaattccgcccgaaaaagagacgggaaaagcagtccacgaacgatgcggaacttaagcagttagaggctcttgagaaaaaagaagggaaatcaaaactcgatgacgattgagttaaaggaaaatgagcgtctggatgatcttcagagaaatggactgcagatcatccagaagacagatgggttctgctttggtatggacgcggttctgctttctggttttgctgctgtaaagcccggggagcgggtactggatcttggaaccgggacggggatcattccgcttcttctttccgcaaagacggagggagaacatttttcggcacttgagatccaggatgagattgccaggatggcggagcggagcgtaaaattaaaccatctggaaaataaaattgagatcgtacatggagatatcaaggaagccagccggattttcggagcggcttcctttgatgtcgttacgacaaatccaccgtatatgaatgactcccacgggcttaagaatccgacggaagtgaaggcgatctcgagacatgaggtcctctgcacgctggaggatgttgtgcgggaaggcgcgaaggtcctgaaaccgggcggaaggatgtatatggtccaccggccgcaccgtctgatcgagatcttcgggacgatgaagcagtataagctggagccgaagcggatgaaaatggtacatccgttcaaggataaggacgcgaacatggtcctcatcgaggcggtccgcggcggcggagcctggatgaaggtcgaggcgccggtgatcgtttataaggagccgggcgtgtatacggatgagatctattcgatttacgggtattaaattgttgagagggttctttaggcggatgagacggaaaaatgacaggaattttctaaacgaaaagctccggataatgtaggaatagtcgcggatcttgcaagccggaatggaaccatccgtaaactcgcgttacggaaatgttgagataaaaagctgtcggtgaaaaagcagcatcgggcagcaggaggaattggtcatgcagggaaaattatatttatgtgcaacgcctatcgggaacttggatgatatcacgctgcgggtgctaaatacgttgaaagaggtggatctgatcgctgcggaggatacgcggcacagcatcaagcttttaaaccattttgacatcaagacaccgatgaccagttaccatgagtttaataaggtggaaaaggcgagagttctcgttgagaagatgaaggaaggcacgaatatcgcactgatcacggatgccgggacaccggggatctcggatccgggcgaggagcttgtaaagcagtgctatgaggcgggaatcgagctgacttctcttccgggaccggcagcgtgcatcacggcgctcacgatctccgggatggcaacaagacggtttgcgtttgaggcgtttctgccgtccgataagaaggaaaagcagagaattctggaagaattaaagtcagagacccggacgatcatcctctatgaggcgccgcaccgtctggtacggaccttggaagagcttcttgaggcgttaggggaccggaggatcacgatctgccgggaactcacaaagaagtacgagacggcattccggaccacgtttcagggggcgttagatcattttgagacggaggaaccgcggggcgaatgtgtcatcgtgatcgagggaaagagcccggaggagatcaaaaaagagaaggaacagacatgggaagccatgtcgctcacggaacacatggacgtctacctgtcacagggaatcgagaagaaagaagcgatgaagcttgtggcaaaggaccgcggaatcgggaaacgggatgtgtaccagatgttgttggaagagcaggaatagggatttcgagaagaagatgtgtcgctggttattgagtgtgatgacgggtggtacgtcttcttttttacgaaaaaaatatagacaaataacgaaaaaataacaaatatcttaataatgaagcgagaaaataaatagtgattgaaaaaatgggggggggaatgatataattcaagtagatgaaacggaaacaatcagcatagcggggggcgatttatatgaagaaaaaaatgtggttaacattatgtaacttaggcgtttcagtagtatttttattatcgttatatagctatacaaagggtatgagaatgttttcgctgggattagcaatggcacttcttatagaaataggtatcagagggcttattgagcagaaatttgcgcaggagggcgctgaggtaaatggaaataagatttatcatgtatctgaaatattaagatatgcctgcgctattattttggcaatagcagtgtggcgcagttagtttaaatgacagtgattaaaataatagttttaatataaaatgcttctttttcccaaagcaataatgcagttgggaagaagaagcattttctcatatttatctgtggagttttgtgtcgtttcggagtatgatttaagaaaatggttcttctgaacgataaaatctgaggtgttttatgcttaagataacgattcttctcttagggcttttctggtgcctgagactttggatagaggggcgggatgcggcgaaaagccgcgcgaccctgcgtcacgtggtgcatgtaaacggcacacgagggaaatctacggtttgtcggctgatcgaggccggcttgcgggcaggcggtttgcgggtattctgcaaaactacaggtacggatccgatgacgatagatgtttccggcaatgaagagcctctgcaccgcagaggcaaagccaatattaaagaacaggtcggcattctgtgccgtgctgccgcccagaatgcggaagttctggtgatcgagtgcatggcattgcagcccgaatatcaaagatgtgcgcagcatcgcattttgcaggccgatgtgggcgtgattacgaacgtgcggcacgatcatgccgatgtgatgggggatagtcttccggaaattgcggatacgttgagcaacacgattcccaagggaggcgttttatttacggccgatgagaccatggcagcccgtctcaggagccatgcggaggtgctgggcagccgcttcgttctggcacgtcccactggggatgagccggattttgattttgccgaaaatatttccctggcgctagctgtatgtgaagatctgggcgtttcgcgggaaacagctcttgcgggcatggcacattataagcgcgacccttatgcgctggcactatataagatggggcaggggatttttgtgaatgccgtttcggtaaatgattctgattccacctgcatcgtatgggaagatctgcagaaaaaacttggagagaaggccggaaagcttattttgatcgtatgcaaccgggctgatcggggaagccgcacccgggatatgctgactgtatgtgagagactggctccggccgaggtctggctggcaggttcgcataaagactatatgactaccaaactgcaccggttcttgcctgattgcgccgtgcgcagtttttcacaggctgacgatatgcctctaaacgatacagaaccaggtacagtgctgtttgcagtcggcaatttgtatggagcggggcgcaaactgatcgcccgtgtccgcgaggagggagagccttatgtataatcaaatcattctgttaggtgtagtggtgagtatgatctttaccgagattaccgggctttcggctggacttatcgtacccggttatctggttctggcgttacatagccccggtcgtattgttactacgctgattatggcatccgtgagtgtgcttttatgccgtctggcatcgcaatggctgattttatttggtcgacgccggtttgcctttctgatcctgctgacctttgtgctgaattgtgtactttccgcatggagactgcttcccttcagtgtgattggcattttaatgccaggtattctggcgcgggaaatcgatagacagggattcttcgatgcctttctggcaattgccgccactacgctttttacggcgctgatcttactgcttatcgggcaaaagctgcccggcgtgtgaaaggaggcgttttcgcatgaaaagtttgcaaaaacgccgaagcacggcacttatcctggctgtggcctggctggccgtctgccttgtccttacattggcgatgggacagacgaaagccacggaagactatgagatcaaacttttggctgcccagaagctgcagggctggatggatgatatccgggattataagctggaagcaggactttccctcactccttatgatacgcacaagaccggaatgatcggcgatgaatatacgccaattaccaccagccttggctcggaggaggcgaagcggaccacagcaaacccggacatgggcgcactgctggtgcagatgctcaccgaggccggggtaaagtccggcgataccatcggcgcgggcttttcgggttcctttccaacgttgaatctggctgtgttggccgccggtgaggcgatgaatgtgaaggtgatctatatcgcttccatgggagcgagcacttttggtgcaaaccagccgcagtttaccttcccggacatggtctgccgcctttatcttgacggcaggctccagacacctccggctctgatcacaccgggcggtgattatgactgcggaggtgaaatgtttgaggaggaaaaagaggaggcacttgcccgcattgcgtcctatggcgtggcagatatcatgcaggagcgcgatttcgcggcaaacctgaaggcgcgtgaggacctgtatgagacgttaggtcccataagctgttttgtcggtgtgggcggaaacattacgaccatcggcctggaagaggacaagatgaaggccggtgtgatggttccctatacggttaccagtgtgcgcagtgatgacggactcttgcaatattataatgcacatggtctgccggttctgcatcttttaaacatcaagcagctggctgcccagtacggtctgccgtttgatccagagatgatcgtcccgccaggccagagtgccctgtattaccacacggtatatccacatcttccggctctggccggggtccttggggctgtgtgcatattagtttttgcctttaaaaggagatccatgagtgatgacaggtaatatcaaactggcgggtttcgagatccgcaaaatagaccgcaaagaaatgatgatcggtctggcgttgatcgcgctgagttttttaatgccggttttatttacggtacagaactttcaggtgcgggagtatatgcatcttgcgttggaaaagcaggagaagaccgatctgatggtggctgctttacgcctggtgatgttaaatgccctgcgcgctgctccgcattatatcggagcatattatattgccgagtcggtggaactctaccggagagggaaaaaaagttggatacccaatgcatgcatgattttactgatcctgccgcttgtatatgagggcattggtctggtgcacggtattcgttacgactttggtttgccggctctgcttctgggttcatccgtggtgctgtttcggcgtctggattatcaatatatatcattaaccaaaaagaacctgatgctgctgatttttactatagcttttcagttcctggacatcatgccgctgatgagcggtctgcccgtgggacgcggtgagatgagttctgatatcaagctatttgctgatgtgctggaggccaattctctcttaaatgccatcggtgcagtgggaattttagttgtgaccctgtttgcaacgattattctcctgcagctgcgggatgagaataatcttctgcgtctgtcggaggaaaaagaaaaaatgcagaccgtgcagagccgtgccgcactgctggaaatgaaaaaccgtacctaccgggaaatgaaatatctggtgcacgatttaaaatcgcctctgaccagtactcagactttggtgggaattttaaaaatgcaatgtgaggttgacggaagaaacagggaaatcgaatatctgagccgcattgaaagccagatggatcggatgagcagtatgatctcggaaatcttatatgaaaacaggcgcagtcccagcgacaccaagcacattttagatatggcacttgcgcagatatcggtagagaattatgcatctaacattcatattgacaatgaggtaccggagcttcaggtaagtgtaaacagtattttgtttacgcgcgtgttagtgaatctgatccacaatgccgcactggcggttgagaaggggcgggagcttgccatctggatccatgtacgggcccgcctggtggatgacttgccgtttatcactttttctgtttcagataacggctgcggtatgactgagcagcagcaggccaccatgtgggaacagggaatttccggctttggctccagcggcctgggacttgcctttgtgaaacagaccgtggaagccatggacggctcggtgatatcggaaagccagccgggcaagggcacacggttcatcatatttttaccggaggtagtaaaccatggaacgaaagattacgatactttccattgacgatgaagaaaatattcgctttgccttaggcgatctgtttcattttcagggctgggaggcctgcagtgccccaaatgtaaaaaaaggcctggagcagtttcgtttacacaaacctgacattgtattaatcgattatcacatgcccggcattaacggcgtggaaggagtgcagatgttgcgtgcactttcacatactgtgccaattatcgtgtttacaattgatgaaagtcaggaggtggctgaccagtttcttcaggcgggtgccagtgattttgccttgaagcccatcaaggctccagatattatcagccgcatcaagctgcatttacgccttttagaacgagagcatcaaaaacaggcacctttggacaaaggcttaagcgaggccacgatgcagctggtgctggattcgttaaaagaaggtgaggattacatgacagtaaatgaggtggctcgcagcagcggtcttgcatatcagacggtataccgttacctgcagtatctgattcagaataagaaagtggaaatggtgagcatttacggcaaagtcggccgcccgcgccagttattccgctgggttgaaaatatgtaagcgatctataatgaaacgaaaaaagttttaccttgagaaaacgaggcaaaactttttttgtttaatatgaaactcgatttaattgatcaaaggacattattacatttttgagaaaaatatgagaaaaaatagacttgaatagagcaattttgtataatttacacagttcctacagaacttcgacacagtttctacataaatattactcttatcctggggatcagctttccccccgacttgagatgtgatggtaaagctttcgcttactaataaaagacaccacaaaacagagaggagttgccgatgggcggcgaacctctcaaacaaaaggaggatgacaatgaaaagatcaaatcgtctggttgcaagatctgcagttgcactcagtctggcagcttcattgactgcctgcggaactgcttcctcaacgacaacgacagcggcgagcagtgaggctgctaccgagacagcttccgaaacagaagctgcttctacgaccgaaaccgttggtgaggatgtctggctgccttacaacgaaaacctcgagaagaagcgtgatgaccgtgacgctaccggtaaaaacggcgcggttgcttcctgtaactggtacgccagcaaggcaggtctggaaattctgaaggaaggcggaaacgcctttgacgcagcggctgctgtagcctacactctgggcgtggctgagccgtacttctccgg

SEQ ID NO: 2105 - DNA, 51163 bp, Unknown
  gut microbiota DNA sequence
aagttcaatatgtggttttgaaggtatgttacctatgcacgagtggctcagtggtggagtatcgccttgccaaggcgagggtcgcgggttcgaatcccgtctcgtgctctctttttgaggatatccagtgtgggtatcctctttttttgtggaaaaagagtttgcgatgcctcgtgctcttttttataaggatatccagtgtggatgtcctttttttgtgaaaaaatcatttaccagcggtgtctattataaaaagttgcttgaaaaagtttgcattttatcgaaaaagtcacttgaaaaagtttatattttatcaaaaagtcgtttaaaaaagtttgttatatcttatataactcccttgaaaaaatgaatattccgttgtactctatagaaaagaggtgaaatcattatgctgaaaagaaaaattgaaaaaaaattaatcgcttggaaaaacacagaaaatcgaaaaccattgattattaaggggtgcaggcaatgtggcaaaacattttctgttcttgatttcgcaaagaaaaattataaaaatgttgtgtatttgaatttttttgaaaatccagactatgttgctgtattctcaggctctctggaagtagatacgattgttatgatgctctcggccttacttggtaaggaagcagtctttgaaagtggcaatactgttttagtcctggatgaaattcaggagtgcccagaagctcgaacagctttgaaattttttcgcatggatgggcgttacgatgtgataggtacgggatcacttttgggtgtaaaaggatatggaaaagaaccaaaatcggtcccagttgggtcggaaacggtaattgatatgtatccactggattttgaagaattcctgtgggcaaatggaattgaaactccggtgattgaactgttgaaaacatgtttgcagaatgaaaaaacagttccggaagcattgcacaagcgcatgaaacagttgctcttgcagtatacagttgttggcggcatgccggatgtggtacagacatttgtaagcacaaaacagatggacgaagttctacagattcaacgagatattgttcggtcatatgaagatgatatgataaaatacgcagaaaaaaaagataaatcaaggatcaaagaatgttttcagtctattcctaaacaactcagtaaagaaaataagaaatttcagtattcaattgtcaaaaagggatctaccgcttcaaagtatgctggaagcttgcaatggatcgaggatgcaggtattattgtgcgctgttataatcttagtattacggaactgcctttagacggaaatgcagaagaaaatacatttaaagtgtatatgcgcgattgtggtctgtttgtcagcatgttggaggatggtacgcaatacgatattcttcaaggaaatcttcatgcttataaaggagcagttttcgaaaatctgattgctgatattttcagtaaaatgggaagaaaactttactatttccataaagacagtggacttgaggtggattttgtgatccgttataaaggtgaatgcacattggtagaggtaaaagcatctacaggtaatacaaaaagcaccagaacaatcctgaatcatcctgaaaaataccatgtcagtcatgcaatcaaacttggagactataatgttggacgtgcggaacagatacttacacttccactctatatggcatttttgctaaaagaaatataaaagtgtgcatctttttcagggagctacgtagtactgactttatctagatattatacttcgcaatatatcaaaataaagctgatatattgcgaagtgattgtctcatcattctgctattcgatctgtttacttctccttttatgtctttctgtgtttgggaatctcaaaaatccaaatttcgacatcttgtgcaggaagaattgattctgctgtgaaatccacttataatttcagatataaaagcttcaataaaatataaaatcttacggaggaactgtttcatgccagaagaaagatacataacgatcgtttcggagaggaaaacgatcgctttaagagtgagtacgatcttatatgttctgatgaatggaaaatacgcaaatatccatgtactgggagatcaggtgtatcggacaacgatgactcttggggagatcgaggagaagatcggggacggatttttgcgggtgcatcgcggctgtcttgtagcagtcatggcgatccataacgtcacggataccatcaatctcagcaatggggaatccctggggtatacggcccgtaagaaaggggagatcctgaaaacactccggaatgcccagcaggacgtgatccggggatttcagaatcatggggtcccgatgacggatgatgaataccatgactattaccgcagtttcgatcaactcccattcgcatttacggatatcgagatggtatttgatgaggagaaacgagcagttgactggatcttccgctatggaaatccggaacttgcgaggctggaaaaactgccgttagaccgtctgatcggaaattcattcggaagtcttttcagcaatatggattccaaatggcttcgaagctatgaacgggccgtcctttacggggagaaactggagctcatcgactacagcccggaaatcgatacaaatctgaaggtcacatgctttccgacttttccggggcattgcgggtgcatcctgttcaatatttcggagattgaattcgtgagcagcagatagcgctgagaataagcaagtaacttataaagagggcgcaccggagtttacggcagtttatgacggatttgtcggtgaagaaacgttagcaggtgttggcggaacgatcagcttcctttgtgaatataagaacggaagtccggttggcgattatgagattcagccggaggttaccggtcttgcaaactacgaggtgactgcaaataagggaacactcagcgttctgccgagaaccccggaatttgtggattccaaaaatctgtatacaactcgtgtctacgacggaaaagctgtggatctgactccggcaacggacggggacggtacgatgagccgcgtgatcacgaacagagagacgaatgagattttaacatctgatccggtcgatgtgggagagtaccgtgtggtttacagtgtttcggaaggacagaattacacggagggaagtgtttcctacgactttgcaatcacaccggctccgcttgtgatcactgcagagaataaggatgttgtattcggagcaaaagcaccggagtatacagttgtttatgatggctttgtaaacggtgagacggaagcggttcttacgggaacgctggttgtaacctgcgcttacacagaggaaagccgtgagtctgcttatgagatcgttccgtccggactttctgcaaagaactatgcgattacctggaagaatggcgttcttacaggacgttatccggagagtgacgatgacgactacgaggaaactggtgggcatttgatacagatggctatctggttaccggatggatctttgatccggtttacagaaactggttctacgtggacgtcaacaccggaatgaagaccggctgggtccagatcgacggaaagtggtattactttaatccggtttctgatggaacaaagggaatcatgttcgcgaaccgcatgacaccggacggctggtttgtccgggaggacggaagctgggatgagaagcggtaaggataccgagataaagctcccataaaaactgaataaagacaggaaaaggtcggcacacgggaatgtgccggccttttttcagacgcaaatcccgggaaaacacttgcaatccggccattttctgctatactaaactacattaacgctttattaaactaatatagcagactaaaatgagaggaagtatgaaaaatgaatggagcgatcatcggtgtttttcttgtgatcattgcctatctggtgatgatgctggcaattggtttcttttattctaagggaaataatgactccagtgatttctatcttggcggcagaaaattaggaccgtttgtgacagcaatgagtgcggaggcgtcggatatgagcagctggctactcatgggactgccgggtgtcgcgtatttaagtggcacctgcgacgcagcatggacggcgatcggactcgcgatcggtacctatttaaactggctgatcgtcgcaaagagactcagaagatacagtgcgaagacaaattcgatcacgatgccggatttcttttcgaaccggtaccgcgatgattcgaagctgctgcttggaatctcagcaatctttatcatcattttctttgtcccgtacacggcgtccggcttcgcagcatgcggaaagctgttctccacattattcggaattccgtatacggcagcgatgctgatcagcgcggttgtcatcgtcggctatacggcgctcggcggcttcatggcagcgagctttacggatctgatccagagtatcgttatgacgatcgccctggtccttgtcgtatgcttcggcgtgtccatgtgcggcggtcttgatgtcgttctcgcgaatgcaaaggaacttccgggatttttatccctgacagcgacatatgacagtgcatcaggaactgcatctaattatggaacaattacaacaatttccacacttgcctggggactcggatatttcggcgtgccgcatgttcttctccgctttatggcgacggagcatgaggacaatatcgcaatgtccagacggatcgcgacggtatgggttgtgatctcgatggcagtggcgatctttatcggtattgtcggacacagcctcacaaagaacggagtcatggtggaattaaagggttcttcctccgagacgatcatcatccaggttgcaacgcttttatgccagcatggattcctcgcgatcatcggagccggcatcacactcgccggaattttagcctgcacgatgtccactgcagattcccagcttcttgcggcttcctccgcagtttctgagaacctgttaaagggaatgtttggcgtgagccttacggagaagagaacgatccatgttgcgagagcgacggtcctctttatcgccgtgatcgccgtgttcctggcaggaaatccggacagctccgtatttggaatcgtgtcctttgcttgggctggattcggtgcagtctttggaccggttgtccttgcggcactgttctggaaacgttccaacaggaacggcgcacttgcgggcatgatcgcaggcggagtcatggtatttgtatggaaatactgcgttcgtccgctcggcggggtatggaacgtgtatgagctgcttccggcgtttatcgttgcaatggtcgttctgatcgcggtcagccttgcgactggagagccgtcgaaggagatccaggatgaatttgatgagatagttacttttcgtgggtaggaattttctgaactgaaaattccgtacagtacagtagtggctgcggattttgccgattcggaatgcgaagcatcggcaaaatccagttacagtgcacgggcatgaagtgcctgtgtactgtgactggcggtgagagaaggaaagtaatcctgttcggctgatattgaaaaactgcaaaaaaagaactataatgctcattaatagacctgacaagtaggtttttgtcgggtctttttcttaaagaaaaacgatgtggttatttgtaaacaacttagaagataaatgaaaaggagattgtggacaatggatgaattacagaagaaaattgtggattatgtagaggcaaacggcaagacatatcaacagatcgctttggagatccatgagaagccggaggtcagcaattatgagtttttcgcttccaaacggcttgcagatcagataaagagcgtgggatttgaggtagagatgccggcagccggtcacagaacgggatttgcggcgagctataagtccggaaagccgggcccggtcatggtgttcctcgcagagtatgacgctcttgtaggacttggacatggctgcggacacaacctgttcggtgcgacgtcctctcttgcggcggctgcgttaaaaagcgtgatcgatgaggtcggcggtgaggtccgtctctacggaacacctggtgaggaaggcggagagaacggaagcgcgaagggaagcttcgtccgtgagggatattttaaggacgttgacgcggctctttccgcacatccgggcgtcggtcatcatctgacagagaagacactcggctgcgtgccgatcgatatcgagttctgggggaaagcgtcccacgcggcagcagcaccggaaaaagggatcaatgccctggatgccctgatccagacatacaactccatcaatgcgcttcgccagcacctgagtgatgatgtgcggatccatgggatcatcgtaaacggcggtcaggcgccgaacacagttccggattatgcggcggcgaagttctacctgagagcggcagcagcagacactctgaaggacgtctacgcgaaggttgagcggatcgtggaagcttccgcgatggcaatgggcgcaaagggcagcatgaagccgtaccagaactgggttgagaacatggttccgactccgtccttcgatgcagtgtatgcgaagaatttgagtctgttcggggagactgcggaaccggcaggggagcgcctcatgggttccaccgacatcggaaatgtttcccaggtcgttccggcgatccagccgacgatcaacatcagcgacgagccgatcaagggccacagcaaggagatggttgcggcggcatgctcccagaagggacttgattccatcctgctcggagcgaaggtgctcgcattcacagccctggatctgatccgggagccggagaccttgaagaagatcaaggaagagcataagtacgaggttgagcatcaggcagactgatatcggtcagagaatgtgaaaaacgggggataaaaagacagtctattcttatgtgctgatttcctccaaaatatggaaaattgagattttagagttgtgcgcgcatttttgcagattccgcagatgcgcgcacttgtttacatcaatcatgcagcagaattacatggaatccggagtgaaaaatactgataaaattacaagaaaaggaaagcaggtatattgcagaaacaaaatgcctgcagattgcctggcgaagtagtcatctgcacaacgcaaacgaaaaagaaacagaagaggagaacatcatcatgaaatacgtcatcatcggtgccggcggtaccggaggaattcttggattttatatgacaaaggcgggaaaagacgtgacactgatcgcaagaaacgcccaccttgccgcgatgaaggagcaagaacttactgtccgccatctctgggatggaacgacggagacagtccctgtcaaggcggagaacatggagacttatgagagcatgatcgcctccgccggggaagctgcgaagccggacgtgatcctcgtgtgcgtgaagggatactctcttgacaatacagttccgtttgttcagaaaattgcaaaaaagagcacaattgtgatcccgatcctcaacatctacgggacaggaagccgcctgcagaagaagcttccggagcttctcgtgacggacgggtgtatctatgtctccgcgaatatcgaaggtccgggggcccttgtccagcatggaaagatcctgcgggtcgtattcggcgtgcgggagaaaagcgagttccgggaagaattaaaggagatcgcaaaggacttttccgacagcgggatctccggcgaactttctgagaacatccgccgggatgcgctggagaaattctcctacgtctctccgatcggggcagcaggtctctattatcatgcgacggcggccgatttccagagagagggcgaggagcgcgagacattcaaggcgatgatccgcgagatcatggcgctggcggacgcgatgggcgtcccgtttgagaaagattatgtgaaggtgaacctggagatcctgtcccacctagctccggaatccacgacttccatgcagagggatgtcatggacggaaaacagtcggagatcgacggactcgtctacgaggtcgtccgcatgggagaggagtaccatgttccgacaccggaatataaaaagatagcggaaaaattaaaaactacaatataaaatctggcagaaatatttatgggaaaatacagacagaaggaaacttattagcagctattctgtgcaagttagaaaagtgcagctgacttatttttgatagctctgattatagctcagggtcatcaaagagagtcagctgcacttttgatttacgcgaacaacgagctaaagtccgctcttgcgcgagaccttgcgactgtagtgatataatcaggttttgtctgcctgcaaagaaggttcgggcggggcagaaacggtgacatcaaaccagaacacggtttccgtgtcatcggacgataccccgtacttcatgccgtgggcgtcgagaatcgtgctgacgatcgagagaccgatgccggttcccatgcggcggccgctctggtgctggcttcgctggtagcgctcccagatgatctcctggtcctctttggagatcggggttccggggtttttgacggagagacggaccgtttttccggtctgtttcagggcgacggtgatgagttcgccctccggggtgtggttgatcgcgttgtagaggagattccggagaacctgactcagctttagcggatctgccgtgatgaatacagactcaggatctgactcaaaatggatccggatcccgtaggtttcggcggctgcggcgcagtgagaagtctcggattccgcgagtcccgcaaggtcaaagaattccggatggagccggatatagccggactggagctgggagtagtcgagaatgtcgttgaccatctcgctcatccggttcgattcctcgatgatgaggtcgagatcttcatttctggcgtcctcgtctttccagtggatgtcgcggacgagctccgcatatccggagatcacggagagcggggagcggagttcatgggagacattcgcgatgacttctttcctgaggacatcgactctcgcgagtgcctggccgagaagtccgaccgattccgcgagttcgccgagctcatcatgacgttttacatcggcgcgggcggaaaagtcgttcgcggcgagctgatcgaccgtgtgcttgatcgcgaagatcggctttgtgaaataccgggagcagacggccgcgaggacggctgcggcgatcgttaagaggatggtcaggagaatgagctggtagcggttgtagttaaaaacggtgtcagtccggatcatgttttcgatcaggagataggcgtcctcccctgcgtaggtaatcggaacgccgatgtggatggaaatcgttccgtggtcgccgtttaagactttctggtaggaaagacgttttctgacgttggcaaattcgtccgtatcccggataaactcccagacatggtactccggctcctgttccacgtcaaagagaagatggccgtagctgaaaatttcattgagttcccccgcatcgtcggcgagaaagatcgttccgtcgatcaggcggctgaggaacggaaggagcttgtcatcctccgcgagatcgcggtcagtcagatcgttcatgatcggctgcatctgtttcagggaggtcgagagcgccgcctccgcgtaggtgtgctcaaacaggaagacctggacgagccacataaagacggcggtgagcgcaacgagccccatcatcatgccccagagctggaagactagaccgggggctttttttttgtgtgctctgtgaaatgacgattttgtttgattattctgatttgatatatttttcatgtttattaaataaattgataatataatccggcagctgcttttctatgcctctgatattgagtttcgtgtattgtgcggtgcgtgtcattccgtctgcgcatttttccgttaaaacgggatccataatgcacagcggattcaaaaaatcgtgatccgctacagattttcaatcttcacgtccggatcaaacttatacccgactccccacacggtctggatcatggcgcggtacggaccaaggcggtcgcggacggattttacatgggtatcgacggtgcggccgtccccgaagtagctgtagccccagacatcctggaggagcttgtcgcgccgcaggacggtaccgggattttttgcaagctctaagagcagatcaaattcctttggcgccaggacgagctctttcccggcgacggaggcgatgcgggaatccggccggatctcgagttctccgtatgtaaaggaattgcggacgggagtcttccggttacgttttaagacggcgccgacccgcgccatcaattccttcgggctgaacggttttgagacgtagtcgtccacgccgaggccgaagccggtcagcttgtcatattcctcgctccgggcggtcagcatgatgaccgggatctcgctcgttttccggatccgctccagcgtctcaaagccgtcgagtcccggcatcatgacatcaaggatgacgaggtcaaaatctgagtcctgtaatttttccaatgcggaaagtccgtccgcggcttcctcacactcataatgttccacttctccgtaggttcttacgagttttctcagacggatatcatcgtccacaattaaaagttttgccatgccggtaaaccttctttcttaatattaaaaatctgaaaatgctcttaaataagatatatcataaaattccgatccggaaaagcttcctcacaaagtcctcacaaattcctgaaatttttctcacaaagtgttcacaattgacttttatagtaaaacgcgataatgaaacaaattcctgcttatggaatggaacgttaaggaaaattctgtggtgcaggagttgacaggaatgttataggaactgcaggaaagtgagagatagaagggagtatcagatcatcatgaagaaaaagaacatcatcctgtgcgcggcggctggtgtcgttgtcgttgcggctgcggccggcgtgacggccatgaaaggttcatccggcggtgataaacagggcatgggcggtggtccgggaggcggaccgggcggaatgggcgagatggaacagcagacccagacgaccgtggtccgcgccgaggagccggagacgggaaacatctacctgacaacggagctcaccgggactgtggagccggatgatgtggtccatgtctacgcgaaggcatccggggacatcacggcggtcaatgtcaaggcgggcgataccgtgacgaaaggccaggtgctctttacgatcgacacggagcaggtcgatacggcgaagaactccgtggattctgcggcggtcaatctccagaaagcgcagagcgacctcgcgagaatgcagatcctttatgatggcggcgatctctcggatcaggaatatgagcagtatacaaatgcggtgaagaccgcgcagctccagtataattccgcaaagacatcgtatgatcagcaggtcggttacagcagtgtgacggctccgatctccggaaaggtggagagctgcagcgcggaggtctatgaccgggcgaacatgaacggggaactctgtgtgatctccggggaaggagagaagaaggtgacattttatgtcacccagagaatgctggaaaacctcgcagtcggcgatacgctgacggtcgagaagagcggaaagacctacgatgccgtgatcaacgagatcaacacgatggtcgatgatgcgacgggactttttaagatcgaggcgcagctcgctgatgcagatgatgcggcgactggaagtaccgtaaggctcacggtcacggccggaaaagccgagaatgtcatgacgatcccggtggatgcggtgtattacagcggcggaaaggcgtatgtatacctctatgaggacggaaaggcgaagaaagcttcgattgaggtcgggatcaacgatgacgattatgtggaagtcacagacggactttccacagacgatctcgtcgtgagcacctggagcaacaacctgtatgaaggagcggatatccagcttgcgggaagcagcgagagcgcgggcggccagaatgccccgaccggaaatgataacagcgcagtcggcagcagtgccgcgcaggagggctgatcatgggacttacgagatatgtattaaaacgtccggtcacgacgatcctggcactcctctgtatcctggttttcggtatctcctcggtgttcagcgcgacgctggagcagatgccagacacggatcagccgatgctcatcgtccgtgcttcctaccagggcgcgacgccggaggacatggatgagcttgtgacaaagcccatcgaggaccaggtcagccgtctggagggcgtaaagagcatgtcctcgacctcgaacgagggaaatgcgatgatcatgctggagtatgattacgacgcggacatggatgacgcctacaacgaactgacaagatccttaaacagcatgcggggactcccggatgactgcacgacgagcgtcatggagatgaacatgaacggcggaaacgacatcatgctctccatctcccacgacacgcaggaagatctctacgattacgtcgaccagaacatcacgccggtgttcgagcagctctccacggtggctcaggtggaatccatgggcggttcctccgagtacgtgaaggtggagctcgatccggtaaagatgaagcagtacaaggtgacggtgaaccagatcacgagtgccatggcggcagcggacctctcttacccgtccggtgacgcgcagtacggtgatctttccctctccgtaacgacctccgcaaaggcagacacgctcgatgacctgaagaaggtgccgatcacgacccagagcggaaagatcgtctatctggaagatatcgcggatgtgtacacgacggaagaacagatgggcggcgtgtcccgctacaacggacaggagacgatctccctctccgtatccaagaagcaggacagctccgcaatgaaactttcttccgatgtaaaatcggcggttgaatccctggaagcggcagattccgggcttcacatcgagatcgcccgcgacagcgccgacagcatcaagtcatccctcatggacgttgcgcagacgatggtccttgcggtcgtgatctcgatggtcatcatctggctgttcttcggtgatatcaaggcatccctgatcgtcggaagctcgatcccgacctccatcctggtgtccctgatcctgatgacgcgagtgggattctccttaaacgtcatcacgatgagcgccctggtcctcggcgtcggcatgatggtcgataactcgatcgttgtcctcgagagctgtttccgtgcgatggacaaaatggacgaaaaaggctttgtggagtacgcgaaggcggctctggaaggttccggactcgttgccatgtccgtcctcggatcgactctcacgacctgcgtcgtatttatcccgctgacgactttaaacggcatgagtggacagatgtttaccccgctcggctggacgatcgtattctgtatgagtgcatccctgctctccgcggtcacggtcgttccgctgacgtacatgttatataagccgaaggagcgggaaaaagcgccgctttccggtctgatgaaactgttgcaggcactttacagacatgtgcttccgacagtattaaagcacaaggcgatcgtcatgttaggctctgtcggacttgtcgtcctgaccttgttcctcgcgagcggaatgcagagcgagctcatgacggcggatgacaacggaacgatctccgtgacgatcacgacgagaccgggacttctcgatgagaaggcggatgatattttaaatcaggtggaatcgatcgtgagcagccatgaggacgtggattcctacatgctccgctataacggcagcagcggtacggttagcgcctacttaaaagacgaccggaagatgagcacggatgagatcgtttcccagtgggaggacgaaatgtccggtcttgaaaactgtacgatcgaagtcgaggcgtcctcgtccatgagtttcatgggacggagccgcggatatgaggtcattttaaacggttccgattacgatacggtaaaagataccgccgacaagatcgtaaatgagatggttgcccgcgatgatgtgaagaatgtccactccgacgtggagaacacggccccggtcgtatcgatcaatgtcgatcaggttgcagcgtccgcggagggactgacggcggcatccatcggacagcaggtaaagacgatgctcgatggcaccgagatcgcgaccctgacgatcgacggaaatgaggtcagcgttaaggctgagtatccggacggcatgtaccggacggtcgagcaggtgaagaacatgctgatcacgacgggaagcggcggaagtgtcgcactctccgacgtggcggatgtcgtgttcaaggataacccgtcctcgatctccaagacggataagtcttacgaggttacgatcacggccgattataccggtcagaatgtcaagaatctgatcgacagcgaggtcgtacagccgaatcttccgaacggcgtgacgatcggaacaaactccatgaaccggatgatggcggaagagttctccgccctgtatcaggcgatcgcagtcgcagtattcctggtattcgtggtcatggcggcgcagttcgagtcaccgaagttctccttcatggtcatgacgacgatcccgttcagccttgtcggttccttcggactcttaaaacttaccggaacgacgatcagtatgacttccatcctgggattcctgatcctcatcggtaccgtcgtaaacaacggtatcctctatgtggataccgtcaaccagtacagattgacgatggatcttaagacagcgcttgtcgaagcgggtgcgacgcgtctccgcccgatcttaatgacgagctcgacgacgatcctctccatgatcccgatggtgctctccacaggaagcagcgcatcgacgacgaaaggtctcgcgatcgtaaacatcggcggtctgacggctggtattcttgtcgcgctgttcattcttcctgtttactatgcgatcatgaatggcaagaaggagaggaaggtgctggatatctaaaagttcagatgggttctgctcaggggaaatttgttgacagagtcttttgaaattgggaaaaaggattgatcaaggttaaggatttcaataaaataggataattttaaagggataattttaaaagaataattttcaaaaaaggattataaaaaggattataggataacaaggtttcaggaacaccctgggggaatattccccggggcggacctgtatctggcggagaaaggagctaacatgaaacgatggaagatcgcaggactgtttgccatggcgctcatggtgagcgcggcgccttttcaggcgtttgcgacgagtccggaatttgcgtatacagcggagaaatgggcgtctcttcgtgacaacaaactcgaatatggggagatcgccgatctgatccatgaatataatacgacggtgcgtcagaatgagctggactatcaggaatacaagggaaaggcgagcacggatatcgcagaggaatactatgattccgcaaatgaggtgtctgagcggatcagctatccggacgatgacagcgccaactatgcgaaccagatcgcatcggcgttgaacagtgagatctccgtgacgaacctgacggaacagggcgacagcaatgtggatgacggcgagatcaagcgcctcggatatgagcagcaggagaagaatctcgtgcagcaggcacagaaactcatgatctcctattacagcggaaaagcgtccctggccactctcgaggacgcggtgacacaggcggagaccgcctacacacaggcgcagacgagaaaagccgccgggatggcactccagtcagatctagacacggcggcggaggcggtcacaaacgcgaaagcatccctgcagtcggcaaagagcagtctcgagcagacaaaacagcagctcatcatcatgatgggctggaattacaatgactctgtcgagatcggcagtctgccggatgtggacacatcggtcgtctcaaagatcaacgtgacatcggatatccagacggcgatcgcgaacaactacagtgtgaagatcacggagcgccgtctcgcaaactcccagtcggagaacaaccgcgcgacctacacgaacacgctggcaaaccagaaggagacggtctccacaaatgtgaagaatgcctacaacagtctggttctcgcgaaggacagctatgaccaggcgaaaacgagctatgatcttgctgagaaggagcgcgcggcggcagaattaagactctccgccgggacgatcacgaagaaaacgtatgaaaagcaggaatctgcctgcctgtcggcaaaaacttccatggagacggcaaaactgagttttctcactgcgaaggtcacatatgactgggcggtggcgggactggcgtcggtgtcataaatccccgacagcgggttcccgcagctgccgcctgtcgttttgctggatcaaggagacggaaaatacgatgggcagcaggaaagaagagcggggatcgagcgcggaaattcggagatcagtggatgtgaggagatgaaaaaatgaaagttgataagaaatggctgggtggtctgatgttcggagccgtgcttttcgcggcggcgggaaacagcggctatgcgggatatgagtctggaaatatgtgggagagtctttcggatgtgttctcacaatacgggatcgtgtcctacgcggcagaaacatcttccgtggatcttagccagataaaaaaagtcgagtacggaaaccttcgggaactcatcaaggcaggaaacttttcctacctgcagagtgaggacagccagaaccgccggagcgagccgtatgagaagatgcatgagaccttgaaggaagagtatgattacctgaaaaagatggcagattcctacaaggatgatggcgacaccgagatgcaggcgctctatgaaaacaacgcgaaaaatatcaggatctccatggcgcaggtgcagtccacgatcaaccggatgaactcggcgagccaggaaaagaccatggaggacatggcggacacgctgacggcgtcggcgcagaacctgatgaactcgtataaccagatggcggcgaatgtcgcggccatggagaagagcgtggaagcggcgcagagctcctacgacgcggcggtaaaaaaacgttcggcgggactcatcaaggatacggagctggagtcggaaaagagcagcctgacgaggcagcagaactccctcgcgtccctgaaggagcagcagagtgagttgaaggaaagccttctgacgatgctgggactttccgggcgcaccgatgtggagatcggcacagttccggatccggatatggcggcgatccgtgcagtttctgtggagaatgatcttcagacagccatcagcaacgattccacctggggcagcgagatgaaatccaaggtgacgggaacggataaccgggagctaagaaagcagcggatcagcgaggcggcccagaatgcggagatcagcctgagatccacatacgagaatcttcagaatgccatatcccagtatgaggcggcggagagcgcctactctgcggcaaaacaggcgtgggatacggtgcagaagaagcaggcagcaggcatgctctcaaagaacacctacctttccggtgaggcatcctggctttccggcgaggcggcgatgaatacggcaaaactgaaacttgtctccgactacgagtcctatgtatggcaggtagccggtgttgagaccggcgtgtccgccggagcttccggcggtggcggggcaccggctggaagatagaaaaacgtagcaaaaagagtacatgtaaaagtgtgctctttttgcgcttttcagaaaaaataccggggtcgattttggatgtaataaaggtggtatatttagtttataaaatttagaaaatattcaaaataacttgttttggtaaaaattagtgctataatataccccgtatgtaaattgtaaaaattcttaaatcaagcggaagttataaggacttactttggcatgaccacacaagataagagaatataatacagatttgcaaataaaaagaaggagagactgcacatgaaacaacgatgcttatcgttggtattggcaattagtatgatcatggtctcggcaagtccattttcatacgcaaaagataccctgggggggtatcacaaaataccagaacgactactatagatgaaacagaagagatactgccgataaaggcaacagattcagaggcatctgatatacagaaatacccgttggatgacaaagaacacatagcaagcgcttctaacccagctctttttgccacaaaaaagaccaaacagaaggctgatttgcccgatggtatttatttatcccagtcagatggcaatgatggaaacacgggactagacagggaaaacgcagtcaaaacgtttgagcaggctaagagcttgatggaagaaaactcatttgaacatgtatatctctgtggaaattatgtgatagacggaacagaagaatgggatctggacggaaaaacattgaaccgttacggatttataagctatatgatcgacctgaagggtgagaactcaaatcttacgctcagcaatatcgtgatcgatgcggagaacaccattaagaatccggacgagagcgaagcaggagattcgatcattcaggcatttcatggaggaagcctgacactgaatgatggcgcgatcctggaaaacaataatgcccagatgatgggaacagctgtattcggaatcaatggattcaatatgacgatgaatgatggtgcggttattcaaaacaataccaaccataacgcgcattatggtggagcagtgacaatcgcaaataatagtacattcacgatgaacggtggtctgatcaccggaaacacggcgaaccgcggtggtggtgtagcggttattggatcctcaatggtcatgaatgggggttccattgagaaaaacaaaacctacacgataggcagccagttcggctatggcggaggaatttaccttgcggactggcaggatatgtcgggagtaggtgaaaatcacaatcagctgcttacttcattaccggcttcgtttgttatgaatggtggcgagatttcagaaaatgtggctcaaacctatggcggcggtcttgtaacgttcccccagtcaggaaacaatagtccggaggtttcggttgaaatcaataacggcataattgcggataatgaggtgacagacggaagcggtggagcgcttgcgatgtttttcaatagtacaaaattccgtatgaatggtggaaagctgataggaaataaagtatcagactttggcggtgggatttttatgtacagtatgaagggaaccggcgagatctcagatggtctgctttcggaaaatgaggcagcctttggtggtggaatcatggtacaagataataccgaacttttcataaaaggcggtacaatttcccaaaaccaggcgagcggtacaggtggaggctattatatctggcgtgggtcacagctacgtcagacaggcggttcctgtcagaaaaataaagcagaaaatgccgggggcgtatatatctccccaaattgtacatttaccatgacaggcggcgatgtatctggcaataatccgggcgatcagaaaaatactacgggtgatggaatatatgtaaacggcttttttgaaatgggagattccgcacaggtcacttccgacaatgatgtgtatcttccgaaggatcattatataaagatgatatcggaatatacaggaacaaccagtgaagcaccaatcatgattacgagtgaggaagatcatgtcgagaacctcagcgcaattggtacaaaattagtattatatacaaatgaagccggtggagcggaggcagcgaaaacggctgatctcgacagaatctttgttccgagtaaaaaaatgcgttcagggctggcgataggagaaagccagcatgaaacggattggatgacatatatttcggggataagaatccattatgagtgggtaggaacatgcacgccgtctgacgcaaagcctccagtggatgatgcggttcgcgttaacagcgcatatacagcaaaatcgcaggaggaatcagaagagggatataaatttgatggctggtatctggatcaggaactcactcagaaatatgtggatggaacgacattgagcacagatacggttctttatggagagtggaaagaagatccggattccgcatacgcgatcacgatcacaccgatggatattacggtctatgttggcggcaatggatacaaaggcgtaatcggatcggataaccaatttgcttccaatgatctgcctgagatgggatattacctgactcttccggcaaacatcagtcaggctcttcaagatgagggagcgggcagtgatgtgagcgatcatatcgaactgacctacgatgatggaaatggaacgacaatagtatggaatctgaagctttatggagatgaggaacacagctcctcgacgctgaatggaacagagcaccggatttatcggatccttccaggtaaggtaaacggcacggatgagaccattccggtcggcctgaaatttatggcatcggatggatctgtcattgtcagctctgatttcccggtcaaggaaaatgatacattccgcgactacaaggtagatatttattccgttaacctgaatgcgtctcttatccgcgcaaagatcaaagtgggaaataagacactcactcggacggtacgtgcgggaactggaaatttaaaagttcgagggaatgtggaggaaaagttttctgatgtgacatatggaggaccgaagctcgagcgcgatgcttctgagcggattctcgcaagtgccgcacagccagatacgatgtactttattaataagggaaatgtcaaagtaacagatccgtccggcgttcgcctactggtggatcagagtctgggcgatggttccctggcagagtatcttgataagaacgtcaatacagatggaagattttcgtatattttcaaataccttgatcttgtggacaaccataatggagacgcgtatgtgacaatggcagagggacagaaaatgaatgtctactggccagtaccgaaagacgcgtccagagattcggaatttcggatcatccattttgagacgcttcatcgtgaaagcaacgtggatacaggtgagcagttgagacagaatccaccaaccgagatttcatgtgaaaaaattgtgattgatggaaaggagtttatcacttttacgacacattcattttcgccgttcgcgctgctgtatgaaaaaggcggctctggagctacagatcagccggttgatccgaaaccggatccatcgaatccgacaactccggttaaatcaccgagcaacgcggacaaacagtcaccgagcaacgcgaaccgatcggattcctccgatgattctgatgactctggttcttcaacaacaacgagaaagaatcagacggtaactacaaataccactacatcgacgaatacaacggagacagatcagacagcaggaggcacggatgagaccaatcttccgggtactacgggggaaaataacgagtctacctctgagacggtagaaacagatgaaacaaagcttccgcagacaggacagacctggtggccggtatggttgttgatgatggctggcggcgcgctgatttttgcgggtcggtcattgaagaaacgcgagaaataaataaaatgcagagagggagatcgcatatttgagatactatgcgatctccctttttacagaaaagaaaacataaaaaaggctatcatgaaaagcaaatttttggtaggaaccggccttatcatgattgcggcggccttatgccacaggctaagtgagtcaaagaaatttcttcatatgatctctgagattttcttccatcccggtgagctcgtccgcgagttccatggcggcctttgaggcgccggaatactgatttttataaccacagatcgttttgatccccatattacagccgtcagtgacaatactggcggcttctttgtctccgccttttgccatcatcctcatttctgtggacatccaggaccaggcggatgccatcttgcccggttcttttccctgttcttccatggcacttaatgtctttttgatcctcagatcaagatcctgatgcttttcatagctcgcagtgatctcattccataatccctgatcggaaacaaaatcccggatctgttccagactctccgccgccatcgcgcatccggaatcgcattcccggagcagatcgactgtgtgttcttccattgtgatcatcctttctattaagaaggttttacaggtcagcttccgtgtgacggatgataaaaaatccgtcatggatcaggctgatccgtatatatgaaaagtatgggaaagacagaagaaaaatatacattttgttatgggcaggaagtgaaagcggatcgggaatctctttgaaaaatgcagacggaatttcggacatgcggctttgtgcggagaaatttacggatcgggctccggtatggacagaaaaatttaagaaaattaaaaataaagagaaaaatggatcagttgaatcaagaacctatttatgttatgatggtaacggtcgacaaaaaatggcagaaaatagaaatacagcgcgaaaaagaagtgccggtccggcggagcgcagtttctgccagatattggaggaaacatttggaaaagacagaagcagagaagatcctgagggaaaaactgggatccgcggagaagatccttgtcgggatcggctctgaatggaagaagaaagaaggcgcggaggaagaggaaatcctccatgcggctgaacaattaaagaagtttctggatggaaaagactactatatgatcacgtccctggcagacgaggacgcaaaaagactcccgtttgatgccggacatattgcggtcccgcacagcgtatcctttacggaagaaaactggaaatcgtacacgctgtggctttcctgcaccttaaacaggaatacggtgcttctggagctcggggagaattataaagatccgtccctgatccgctggccgtttgagaagacggcgatgttaaacaataaggcgtatctgttccgtgtccataagatcttttcgcaggttccggaagaactggccggaaaatcatgtccggtggcggaagcatccgtgaaatttgcggaagagtttttcgactgatgtatcaatactacaaggaggaaatatggctgcgatcgcaaatgactggttagccccgatgagcggggaattcaaaaagtcgtattacagaaaattgtatgagaccgtaaagaacgagtacgagacaaaggaagtctacccggcgccggatgacatcttcaatgcgttcgcgttcacgcctctcgccaaagtaaaagtcgtgatcctgggacaggacccgtaccatgagccggggcaggcccacgggctgagcttctccgtgaagccgtcggtggagatcccgccgtccctcgtcaatatttataaggaacttcatgaggactgcggctgttatattccgaacaatggatatttaaagaagtgggccgaccagggcgttatgctcttaaacacagtcctgactgtccgtgcccatgcggcaaactcccacaagaatatcggatgggaggaattcacggacgccgcgatccgcgtcttaaacgagcaggaccgcccgatggtgttcatcctctggggacgcccggcacagatgaagaagccgatgctgacgaacccgaagcacctgatcctcgagtcgccgcacccgagcccgctgtccgcctaccgcggatttttcggcagccgcccgttcagcaagacaaataagttcttaaaagaacacggcctggagccgatcgactggcagatcgaaaacgccaactagcaatctggcgtgcgtcagcgggttcggaaaaatgcgccgcaagcttgcttgcagaagcattttttgaacctgttgacatagggcggatgcccgaagcttcttgttttcatgacaatgaaaacaagaagaccgcacgctatattcaaaatataaagcataggagtgaatatgagtaattttattgaatttctgaagatcatcgtattcggtgttgtagaaggtttcaccgaatggcttccgatcagcagtaccggacacctgatcctggtggaaaatatcgtccatctcaacgtctctgaggacttcatgaacgtgttccgcgttgtgatccagttaggtgcgatcctggccgtcctggtcctgtatttcagacggctgaacccgtttgatccgggaaagaaaccggcacagaaacgtgcaacctggcacttatggttcaagatcgtgatctcgtgtctcccggcggctgtcatcggaatcctgtttgatgatgttctggataagtacctctacaatccgtatgtcgtagcggcaatgctgatcatctacggtgtgatcttcatcgtatttgagaaccacaatcagtatgcggaggcgcgggtaaagaaggtctcccagatcagctaccagaccgccttctatatcggtttattccagcttctcgccctggtcccgggtacatcgagatccggcgcgacgatcctcggcgcgatgatgctcggctgctccagaacagcagcatccgagttcaccttcttccttggaattccggtcatgttcggcgccagcctcttaaagatcgttcactacggactcgcattctccgcgatggaactcttcttcatgatggcagcgatggtgatcgcgttcatcgtttccatgtattcgatccagtttttacttggatatgtcaagaaacatgacttcaagttcttcggatattaccgtatcgtccttggcgtgatcgtcctgatctatttcggactgactgcgatccttgcaaaatagatcctgtattgttaaaaaaaacattcatatgaaatcccgggctgtatgaggaatggctgatctccttatatagcccgggatttcctgttccataggaaattcctatagaacgtccggttaaacgaaaagacactgtgtacagaaatgtgattccatttcacagaactatctatgattcatcacactttcatcacaattcactggtacactatgtcatgtagttgaggggaaggaaaaaagagatcccttaaatacgaaagacaagatctgaaagcatctggcagacaggttttacgaagaaaggctgatccggatgcagaagaaatgctcagaaatatcattcgttacagaaaggagatacctgttatgtatgatgaaaataaatggaacgaaatgaacaatgaaaatgaaaagaaggacggcggtgagccggtaaatgcgcagaatgcgcagaacgctcagcagccgcagaaccgcccgcaggatgcacagcagtcccagggacagagcgaacacaccggaagacagatctacggaagactcggcggtgctcagaacggtcaggcatataacggaaatgcccagaatcagaaccagaacggttcctactacggcggacagcagcatcagcagtattacggaaaccagaaccagtacacaaacccgtatcagcagtatgattactaccagggacatggacagaatccgaatcagaacggaaacagccaccatgctccgaagaagaaccagcatatgaagacagcggctctcgtcacagcggcggcacttctcttcggtgttgtctccggaggtacgatgtacggagtcaaccgtgcggcgaacaccctgttcccgtaccagagttcccaggcgagcgcttccagcgagacgatcggtcagacttcccaggtcccggcggcgaacacctccacatcatccagcaacggtgttgttattgaggatgtatccgcgatcgtggatgcgacacttccgtccgttgtatcgatcacgaatacccagctctaccagagcaacagctggttcggaccgtcccagacttacgaagttccgagcagcggttccggcatcatcgtcggacagaatgactcagagcttctgatcgtcacaaacaaccacgttgtcagcgacaccgaaggtcttacggtcacattcgcagatgagagtaccgcagatgcagcgatcaagggaaccgattctgaggcagacctcgcagtgatcgctgttccgctcgacagcatctccgctgacacaaagagcaagatcaaagcggcaacactcggtgattccgactccttaaagatgggccagggcgtgatcgcgatcggcaatgcacttggacttggccagagcgtcacagtcggacatgtcagtgcattaaacagagagatcaacgttgacgataccacaaagaccgtgatccagacagatgcagccatcaacccgggcaacagcggcggagctcttttaaactccaaaggtgaggtcatcggtatcaatgaagcaaagtatgcagatacaagtgttgaaggcgtcggctatgcgatcccgatctccaaagcaaaagcgatcatcgatgatctgatgacaagaaccacaaagatcgccgtttccgaatcagaacagggctatctcggggtccagttacagaacatcgacgagtccatggcaaagatgtatggaatgccgcagggcgtctatgtttacaagatcatggaagactccgcagcagcaggatctgaccttcatgagaaagacatcatcacaaagttagacggtgagaagatctccaactatgcagaccttgcaaagcttttaacttactataaatccggtgatactataactcttaccgtacagtctcttgtcaacggcagctaccaggagagagaagtccaggtaaccttaaagaaccgtccggcagaagctgacaatggaaacagccaggatcagagccagagccaggatcagaaaccggcacagagccagtcaaagatcggcaaataaaacagaaacagaataggatctgcagcccgcaggttaaggcgggaggcagaaagaaaagataaaaagcaggagcgccatccggatccatccggacaggcgctcctgctttttgctatccggtctgggaaccggcagcggggaaggtttggtatagaggtttttccctgcgcggtgaaaacacaggagccgcggcaggaatctatcagaaattcctgaagatggaatttacaggaaattcatgaatgtcgtcagtaccatggagttgaagaagtctacaaacagacttccgacaagcggtacgatgaagaatgctctcggagctgcgccgtagcgctcaacgagtgctctcatgtttgccatcgcgttcggggtagcgcccataccgaagccgcagaaagcggtggtcatagcagctgcctcgtagtcacgtcccatcacgttgaatacaacgaagtttgcgtacaggaacatgacaacggtctggacaagaagaatgacgatcatcggaagagcgagcgctgctaactgccagagctttaagctcatcattgccatggaaaggaacaggtttaaggaaagtccgcccagggcgtcgatctcgaccatcgggaggtctttgttctggacatcccagatattgcggatcgctgctgctgcgagcatagcgccgatgtaagtcgggaatgtcaggtggcatacatctttgaagaaggtgaaaataagagtaccgagaccgatggcaaccgctaaaaacattgcggatgttgtgaatttctgaccatcaacggccggcataacctcagctgtctcgttgccttcctcagctgcggtggatttcaagtggagtttttcaacacgggcgcgggcgatcgggccgcccatcatgcttccggatacaagtccgtatgtagctgccgcgagagcaacagtggtagcgccgacaacggcataatcagtctcaagaagcggtccgaaggaaccggatgttccgtgtccgcctactaacggcatggaacccatacataaaccgagcagcgggtttaaaccaaaggctgctgcgagtccgctgccgactgcgtcctggatgatacagatcgcgaccgcgagaccgaggaacatgaatacctggatgccgcctttctttaagagacggaagcaggctgtgaatccgacgctgcagaagaagatcgtcatgaagacactctgtaatgtcgtgtcaaaggaaagttccaggatcccggctgcatataatgccaggtgagccagcgcaaatacgataccgccggcaaccggtgccgggatgcagtacttgcttaagaatggaagtttgttgaccatgagtcgtccgagacaatagacgagtgcgccgagagcgcaggcctgatacatgtcgagctgtaaagtaatcataagataccccctcttattttttggtaattgttcaattatgcaaaaatctgtgcagggagacgaacggaaaatttgcatccataaacatctctgtgtacaagttgcacaaaaacttgaacttatcaccaactttttgctacgatttcatcataaaacctcactacaaaaaaactcaaaaaaatacagagggaaaggttcagatagcgctaagcaaaaaagtacatctgtctgaaattttgcggcaggctttttgttgcgagtcctgcggatttgcattataatagtggataattcgtaatcattcagtaggtctgcgcacttgctgcgctgaccgtaataaaacacaggcttgaaggcaaaaatcccatcggcgaagccgatttaaaatggatttttgctcgtaactgtgagggtactgaacagttacggtaattctgaaaaattcagaaagaaaaaagattccgtggcttttgagcgcattttgcagaaaaaagagcgtatgtggtggctgcgaaaatacgggatatttgcaacgatagaaagatcaggagaaatactttggaagacaacagaaataacggatatgaaaaagtctgctgcatgtgcagacggacggagaaccaggcgggaaagatgatcacactgccgggcggactgaacgtgtgcagggactgcatgcagagatcgtttgacatgatgatgggaagcggtatggactggacaaagatgtctgggtttacgccggagatgctgaaaaatatgtatctggatccggaaaaaaccaaagatgtgatcggacataccggtgacggcgaaaaagaggaagagcagactgctgcaaatacagctgatcctgcagacaatgcggatgaggacaaaacccagactgtggaggacgcggatgagtctgatgacaatgaagatttcgaagaagacggcgaagagatggaaggaatcccgctcggaaatattttcgggatcccggtcggtcagatcgacctcggagccctgatgggacagggacataaacgctcaaagaaaaagaagaaaaaagtgaagaaagagctgttcaagctcagcgagatcccggctccccacgcgatcaaggcgcagctcgacgagtatgtgatcggacaggaacaggcgaaaaaggtgatttccgtcgcggtttataaccattataaacgtgtattctcaaagacatccccggatgcggaaaagtacggaacagatattgagatcgaaaaatcgaatatcctgatgatcggaccgaccggaagtggtaagacgtatcttgtaaagacacttgcgaaacttctcgatgtgccgctcgcgatcgcggacgcgacttcgctgacggaagccggatatatcggtgatgatatcgagagcgttctcacaaagcttctcgcggcggcgggcggcgatgtccagaaggcggagatggggatcgtattcatcgatgagatcgataagatcgcgaagaagaagtccacgaatacccgcgatgtcagcggtgagtctgttcagcaggagctcttaaagcttcttgagggagcggatgtggaagtcccggtcggaacagggcagaagaatgccatgactccgatggagatggtcaacacggacaatatcctctttatctgcggaggtgcgttcccggatcttgaaacgatcatcaaggagcgcttgacgaacacaacgtccatcggattcggctccgacccgaaagacaagtacgataaggatccggacattctctcaaaggtcacaaaccaggatctcagggagttcggaatgatcccggagttcctcggaagacttccggtgacagtgacactccagggactcacgaaggacttcctggtgcggatcttaaaggagccgaagaatgcgatcttaaagcagtaccggaagcttctcgcgatggatgaagtcaacttaaactttgatgatgacgcattggaatggatcgcggaacaggctttaaagaaagacaccggcgcgagagcgctccgggcgatcatcgaggagttcatgctcgatatcatgttcgagatcccgaaggactcggagatcggttctgtgacgatcacccgcgcgtatctggaaaaacacggtggcccgcggatcgagatgcgggagtattctacggcggacaagaaggcggctgctctgccggggccgacggaagcctgttacaaagctgaataaatatgaatcctgctgatagtgtctgcacggcatcggatgttataaattaaaggtttctgagatgtaaaaaagcttcatacagattcagcgttccatatccgaactcacggttcgggtatgtgagcgctggatttctttgtgccccacggacgaagatggactttagcaccggcgtgttgagatacggataatttgcattgaggacgccccagttcaacaggatcgccgcggcaccggcgaggtgggcggcggagacggaggtgccggacattcttgtgagacgtcttcctgagacggacgcgcctaagatgttgacacccggggcagcgaggtccggctttatccggccggacaggctgtagccgcggctggcgtggatgtagatgctgtttttggtgtggtcgtaggcggtgacagtgatgggataccgggcatttccgggatccgtgatgatcgtatcgggatccgggcggagaaaataggtctcatcggagataaagccccggaccggcagccagatatgaaaggtctcacggatgtccagagagttccgtatcaggatccgccagatcccggacatgggggtttcgaagcgcataaagataaactggctcccggagctcacatcggcgatctgggtgtagactgtgatctgggtctgttccaggagaaaggacaccgtgttctcgccccggagcggaacggaaatctcccgcgcaacttcgccggtcggtgagataaagcccaccgtgtaggcccccatgttctccgcccaaagttccatggaaaaaccggcttcccgttcccccacccgcagctccgcggtgacttcatccgtatctgcgtccatgacagcccgaaagtgatgtcttgctccggtctcgttcccggcagcggtgatgacggcggaaccgtttgaaaggctgacctggtttaaatactgcccgaggcggctcattcccatgtggcttcccatattggtgccgaggggaatgcagacgacgaggggcatggagtattttctggcgagaaaatagagataggagacgcccatcatgatatcgttttcctggtaggcatctgccccgtcccggatcaggtagaagtcacggagatactgcttggcgggttttaatttcaccatggcgatggatgcctgcggtgccgccccggaaaatcccgcccgttcatcccggttcccggcggcaatggaagcgagaaatgttccatgtccgttttcgtcccgggtggggacgatggaggcgggattgtcggagttcagggccaggttgatctcctcggcagtgtattgcgtgccgtagagagctgagaaggcagaaaatggttttgcagtttcattctctatattgttagaattatctgaattatttgtctggtcccatatcccaataattcttgtacttccatctgcattccgaaacagcgaatctgtataattgatccccgtatccacaaatcccacaataactcccgcgccctgattgttcagcaccggaagctcccccgctggcgtgatcccggcagcatccatacttgtgacatccagaagactgtatagcttcggaactgccgaatatgtataggaagtataagtagaaggtgtcaccgtggagagcggaacatagacgaccgccagtgtagaattcacaaaatcaatgcagtctgtcccctgtgaacgaataaactcttcaggtgtagtaaaataaggtgcgataaaatccgcaaaatcttccgacgcgacagaatttgtacatgacatggctgatactccgcagaaaatggttcatactatatatgtatatgagggacaagggcacatgttccaaaaaaattacaggatcagaaaacgggaagaggaacgagaggcgtaaatgaaatgggtaagaaaacgtgtgaatatggcgccgcggtctgaccgtgaaataagaaatatatggacggaccctttaaaatgttgtaatataaggatatctgtgaaagtatgcaatcatgtaagatagaaaggggaatcgcaatgtttggatttttgacattcggaacgacgcttgcgcttacagatctggctgtgaaaaaagagatcgaagccagacccgatgaagaattcccgaaaaccgtgaaagaatcaggcggcctgatccgcctctacaaaaaccacaatccgggcttttccttcggattcatgaaggaatacccaaaacttgtggagatggtcccggtctgcatgctgtcggcggtagccggtgcatgggcgtatgtgatcggaaagaagggacgcgtgctggagaagacggcgctgaccctggtgctggccggcggagcgagcaacctttatgaccggctcaaacgcggatatgtggtggactatttcagcatccagtggaagaaactgaaaaaagtggtcttcaacctgggtgatatctttatttttgtcggatctgccctgtttgcggcagtccagctcgtggaggagctccgcgaaattcttccgaaagaaaaaatctttgttaaggaagaagagtaattcaggcagcaggacataaaatccagctcacccatgctgcaaaatacatcggcgcagaaaagccgggacaatgaggagaacagtctatatgaagaaacaatatgattacctgttagtgggcagcggacttttcgccggagttttcgcgtactacgcaaaaaaagccggaaagacctgcctcgttcttgagaagagagaacatgcaggcggaaacatctactgcgaaaatatcgagggcatcaacgtacaccgctacggcgcccatatcttccataccagtaacagggaagtctggaactttgtgaacggcctcgtggaattcaaccgctacacaaacagcccggttgcaaactacaagggcgagatgtacaacatgccgttcaacatgaacactttcagccgcatgtggggaatctccactccggaggaggcaaaaaagatcatcagcgagcagagaaaggtcatcaagggtgagccgaaaaacctggaagagcaggccatcagccttgtgggaacccatatctatcagaaactcgtaaagggttacaccgagaaacagtggggcagagactgcaaagaacttccggccttcatcatcaagcgtctcccggtgcgctatacctacgacaacaactatttcaacgatctctaccagggaatcccgatcggcggctacaataagatcacagaaaagctctttgagggctgtgagatccgccttggaaccgactatctggcagataaagcgaaatatgatgcgcttgcggacaaggtcgtatatacaggaaccatcgacagctacttcgactactgcttcggaaaactccagtaccgcagcctgcggtttgaaacggaagtcttagactgcgacaactaccagggcaatgcggtcatcaattacaccgaccgcgaaactccctacacgaggatcattgaacacaagcattttgagttcggaacacaggagaagacggtcatcacgagagagtatccggcggagtggaccgagggcatggagccgtattatccggtcaatgacgagaaaaatcaggaattatataagaagtacgcagaactcgccggaaaagaggagaatgtgatcttcggaggaagactcgcagaataccgttactatgatatggataaggtcatcgaatccgcattttcctgcgtaaagaaggaatttggaaatgagtaacagttcgaaaatgcctcatggatttgctcgcctcattatcggtgacggatccgcggtgtcggagcagaagaacattatctggaatatgatcggaagcttcctctacgcctttgcgtccatggtgctctccatcgcggtggtccagcttgctggcgaggacgcgggcggggtgtttaccttcgcctttacgaccttcggacagcacatgttcatggcggcgtacttcgggatccgtccgttccagatcacggataccggggagaagtacaccttcggtgactatctcgggctgcgtctcatcacctgcggcctcgcgatccttgtgggctttggctatgtgatggtcagcgactatacctttgagaaagcggtcattgtcttcctgatggtggtctacaaggtcatcgatgccctggcggatacatacgaggcggaattccagcgggggggaagactgtacctgacgggaaaatccaatgcgttccggacgatcctctccgtgacctgttttctcggaagtctcgcggtgacgggagagcttctgaccgccagtatctgggcagtgggcgcgcagaccgtgggatttttcctgtttgacttcctcgtgatccgggaactcccgaatgtgacatggaagtcggcgcaaggaaagaaattccagctcttccgggacaatgttctgttatttttctcggtggttctggacttctatatcttttctgcatcaaaatacgccatcgaggcccatatggcagaccgtgatctcgcagtctacggcgcgatctttatgccgaccagcgtgatcaatctggttgccggcttcgtgatccgcccgtaccttacaaagctcgcggtggactgggagaccggacacttaaaagcattccggaagatcatcaggaatcttgccctgatcattgcggcgctgacagtcctcgcagtgggcggcgcatggctgctcggcattcctgtgatcagcctgctgtacccgaacctgcgggaggggctttccacctgccgtgcggcactggtgctcatcatcctcggaggagcactgaatgcgttcatgaacctgttttattattcactcataattatgcagaaacagaagttcatcattcttggatatgctttcgtcagtggactggcggtcctttcctccggctggtttgtccggacgggcgggattcagggcggttcctttgtatacatgcttttgatggcggcactgatggtatttttcggaatcttttcggcaggctttatgaaacagaaagagagagcacaaaaacataatgaaggttgatgtgatcatcccggtctacggtccgggaaacagattgttggaattatttgaccggctgggacaccagaccgtaccggtagaccggctgatcgtcatgaatacggagaagtccctgtgggacaagtggacagggactctggaaccgggaagactaccggaaaatcttaccgtgtatcatgtgacaaaggaaacgtttgatcatggtgccacgagaaatgcagggatcgaacattccgacgcggatgtctgtgtctgcatgactcacgacgcgcttccggcggacacgggtctcttaaaagccctgacggacgcgctttttgcagagaaggatatcgctgtggcatatgcgagacagcttcccgcaaaggactgcaatatcatcgagcgctacacgagagagttcaactatccggacaaaagccggataaagaggatctcggacctcgacacacttgggatcaagacatacttctgctcgaatgtctgtgcagcctataagcgggagatctatatggagctggggggatttatccggaagacgatcttcaatgaggacatgatcttcgcggcgaaggccatgaagaacggatatgcggtctgctatgcggcagacgcgagagtgatccactcccacaactacacagcggtggaacagttccacagaaattttgatcttgcggtttcccaggcggatcatcccgatgtattctccgggatccggtctgagggcgaggggatccgcatggtgaaggacaccgtgcgctggctggtaaaaacagggcatgcatacctcgtgccgaagcttgtggtggacagcgggtttaaatatatgggatatctcgcagggaagcggtatcaaaagctgccgaaggcattggtagttaagttatctatgaaccggaattactggaaatagagttgaaaattatgtgtaactgttcagcaggtctgcgcacttgctgcgctgcccgtaagaaaacataggataggaggcaaaaatcccatcagcgaagctgatctggaatggatttttgcgtgtaactatgaaggtactgaatagttacaattatgtaaactgatttgctgcacattcctctgtataaatggctgtgtggcaggtcagagaagaaaaatattgtcattctgcactccgggtggtatgatgtagtgcggaaatgccgaaaaatggcggaaatacagcggctgatctggaaaaagcatatgcttttactccgggaatgaaacggacatatgccgaaagagaaaacaagcacagccgtaaatttataaaaaggtgaggtaaaagactatgggaaagatcaaagtttcttcctgtgaaacagatggaatggtaatcgaaggcctttatgtgatcgagccgaccgtattcaacgacgagcgcggatattttatggagacatacaaccagaatgactttaaagaggcaggactcaatatggttttcgtacaggataaccagtcgatgtccgtaaagggtgtactccgcggccttcacttccagaaacagttcccgcagggcaagcttgtccgtgcggtacgcggaaccgtgttcgatgtagcggttgacttaagaacacactccaagacatacggcaagtggttcggcgttgagctttctgcggagaataagaaacaattctatattccggaaggctttgcccacggctttgtcgttctttccgatgaagcagagtttgcttacaagtgtaccgatttctaccatccgggtgacgagggcggacttgcatggaacgatgagacaatcggcgtaaagtggccgatcacaccggatatgcagctcatcatctctgagaaagaccagaaatggccaggatttaaagagatcttcaagtttgatcgttagtaattagcagtgcggcgccaaatgcggcaagatgtgtcgcaaacttgtttgcgtaagcatctttccgcatttagcgacatagggcgaatgccaggaactgcaccaatagaaaggttgtaaaagcgtgaattatttgacttcattactgaaggagctggtggcaaaaagaaaactgatctgggagctttccaaggcggatttcagaaaacgttttgtcggctcctattttggcgttgtctggatgttcatccagccgatcgtcaccgtcctgatctactggctcatcttcggtccaatcggatttaagagtgcgccgccggtgccgaacgcctcgtacgtccagtggctgattccgggcatcgccccgtggttcttcttctctgaagccttgaactgcggaacgggatgccttcaggagtacaattatctggtaaaaaaagtagtattcaaagtggagatcctgccggtgatcaagctgatctcctgcctgtttgtgcatgtgtttttcatcctgatcatgttctttgtgttcctgatcagcggaaaaaaaccggaactctcctggatccagatcatttattactcctttgccacatccatgtacgctctggcgctcacgtaccttacgagtgcgatccaggtattttttaaggatatggcgcagatcgtcagcatctgcctgcagttcggcatgtggctgaccccgatcatgtacagcgagcagttattccttgacaaaggtctgacgatggctccgatgatcctgaagctgaacccgttttactatattgcggcgggataccgtgacagcatgctgacgggagactggttcttcatgcgtccgacactgaccgtgtatttctgggcagtgaccctgatcaccatgttagtgggactcaaagtattcaagcggctccgtccgcatttctcagatgtattgtaggaggaaaccatgtctgccaatgcgattacagtaaaagacgtgacgaaggtgtacagactctacgacaagccgatcgatcgcctgaaagagtccttaagcctgacacataaaagctatcacaaggatttctatgccttaaatggtctctccttcaatgtcgaaaaaggtcagaccgtgggtattatcggaacgaatggttccggaaaatcaacgatcttaaagatcattaccggtgtcctcacaccgaccacaggccaggtggacgtggagggaaagatctccgcgcttctggagcttggagccgggtttaatatggactacaccggaattgaaaatatctatatgaacggcaccatgatggggtattcccggaaagagatggatgaaaagctgcaggatattctggattttgcggatatcggcgattttgtctatcagccggtaaagacctactccagcggtatgttcgtccgccttgcgtttgccttaaacattaacgtggagccggagatcctgatcgtcgatgaggcactgtccgtcggagacgtattctttcaggcaaagtgttaccggaaaatggaggagatcaaaaagagaggaaccacgatcctcatggtaacccatgatatgggcagcatcatcaaatactgcgacaaggtcgttctattaaataagggtgagttcatcgcggaaggtgagccgggccatatggtggatctctataagaagatcctggcaaatcagctggattccttaaaggaagagctggagagtgactattccggcggtatgcttggtgatgagaaaaaggcaaaagtggaggaatcccattccgacggatccctcatgaaggataagatcacgatcaacacggaccggaccgagtacggtgacggccgggcggagatcttcgatctgggactttttgacgcgaggggaaatctgacaaatctcctgttaaagggagaaatgttcacgatcaaagagcggatccgcttccatgcaccgatcaagtgcccgatctttacttacacgatccgcgacaagaagggaacggatctcaccggaacgaacaccatgtatgagggctgtgacatcaaaccggtgggagacggcgatgtctacgatgtttcctttactcagaagatgacactgcagggcggcgagtatcttctctccatgagctgtaccggctttgagggtgaggaacatgtggtataccaccgcctgtacaatattgcaaacattacggtgatctccaataagaatacggtcggtgtgtatgacatggaatcggaagtggagacatcgctgacaaaagcataagaccagaacatggcattttgacagcgggatctgtctgaaaagaccggcaggatccggggaaaatgtctgtgacacatagcgggagaaaaagatgaaggattacagttatgaacttcttgacctgctcgaaaagtataaaggagatgcggaggcggcactgcggggagaaacaagcccgtggtgtctctacgcattttctccgttaagggaaaatcttttcgagtggctggaaatgaaaaaaaatgaccgggttctccaggtcggatccgactacggttcctgtaccgggctcttttcggagcgcgccggtgaggtggtcgttctggatcagcgggatgagaatctggaggtgaaccggagaagacacggggagaagaaaaatctctgtctgatacgcggggaacttccgaaggcagatgcagagtctcttgggtggaaagagtacaagggaaaagaacgtgcagcagaggagctggatgcgctctataaagctggattcgactacgtgatcctgccgtccatgctttccgcgacagaaaaaagcggggcagcggatctgctcgaaagagcggcagcccttgtgagaccgggaggaaaactcttagcagcggcagagaatgagtccggcgtccgctatttcatgggagcggaaccatttgagcactccttcctggaggtggagttccgcggcctgtttgaggacctaaaagagaaatttggcggaaccgcaatgctctactatccggttccggactaccgttacccggtgactatctattccgacgactatctcccgcagaccggcgatgtgacgaacatttccgcccgtcttgacggaccgggactatggttcggaaacgaggagaaagccatggcgaatgcatgcagaaatggagatttcgcgaagttcacgaactcattccttggcatgtgggaaaaggggaaggcatgagacagattttatttgtaaaatacaaccggaccagagcggcacagttccagctgaagacggagatcgtgagggaggacggagttctcactgtcgagaagacagctctcacgaaagccggcgaggcgcatatccgctcattcggggaaaaatatgagaagatccgcgatctgaatccggccgtccgctttttaaaaccggagtggaaaaaggatcagaagacggtttctttccagtacttaaacggtaagaccgtaggggacgccctgggcgaggcgatcgtcatgggggaagttccgtatcaggaacttgagaaggtgatgaacgtcctgttcccggaagaccctgacgagaagaaatttgaggcaacgccggaatttgaggcggtattcgggaaagtcccggagatcagcgatcaggcggtttccgtgtccaacgtggacggactcttcgagaatcttatggtcccggaaaatgagaactgtatctacgggatcgactacgagtgggtatttgacttcccgatcccggagaaattcttaaaataccgcaatctcttatatttctacagacgttatgagaaggtgctgaacgttaaagaagaggaactctacgcgcattttgggattacggcggaagagcaggctgtttttgacggaatggaaaaggcgttccagtcctatgtccatgatgccggttccttcggttacatgaagcagtatgagcagccgacaaagacggtcgagttccttttagaccgtgagagcgagctctacaaggtaaaagactggtgtgagaatttaaagcaggagatctccgagaaagatgtcacgatcatgaaacagcaggaggtccagcgcctcaccaacaatcatgtgacgaatcttgagaacatcatcacaagtctcagaagcgagaatgcgagaatggcgggagacctgcagtatctgtcgaaacatgaggcgatcatgtggaaaattctccggaaatgccatcacgctgtggataaagtcatgccgaagggcacgagaaagagaaagatcgcaggatatttcaagaataccgtcttccatccgggaaaatacggaaagctgtatttcacgaaggacggacgaaacaggatccgtggagatttcaagatcggcgccggttacctggaacacggaaagctgcactttgactatgtggagcatccgaccgtttccatcgtgatcccggtctacaaccagatccactacacatatgcctgcctgctctcgatcctggagaacacgaaggatgtgacttacgagatcatcattgcggatgacgtgtccacggatgcaacaaaggaactctccctgtacgcggagaatctcgtgatctgcagaaacaagacaaaccagggatttttaagaaactgcaaccaggctgcgaaggcggcccgcggcaagtatgtcatgttcttaaacaatgacacccaggtaacaccgggctggctttcctcccttgtgaacctgatcgagtcggatccgacgatcggaatggtcggttccaagctcgtgtacccggacggacgccttcaggaagctggaggaattatctggagcgatggttccggctggaattatggccgtctcgatgatccggaaaagccggagtacaactacgtgaaggatgtggactacatctccggcgcggcgatcctgctctcgacggatctctggaagcagatcggtggctttgatgagctgtttgcaccggcatactgtgaggactccgatcttgcatttgaggtgagaaaagccggataccgcgtggtctaccagccgttatcgaaggtcatccactttgagggcgtctccaacggtaccgatgtcaacggaaccggtctgaagcgctaccaggtggagaacagcagaaaattaaaagagaagtgggcagaggagttcaaaaagcagtctgtcaacacaggcaatccgaacccgttccgtgcccgtgagagaagccagaagaagccggtgatccttgttgtggaccattatgtcccgacgtttgacaaggatgcaggttccaagacgacctatcagtacctgaaaatgttcgtgaagatgggatattccgtgaaattcctcggagacaacttccttcacgaggagccgtactcgacgacactccagcagatgggcgtggagatcttatacggaccgggataccaggcgggaatctgggactggctgacaaagaataaggacgagatcgattttgcgtacctgaaccgtccgcatatcgcgatcaaatatattgactttatcaagaagaacaccaatatcaaggtgatctactacggacatgacctgcatttcttaagagaataccgggagtatgagctcaccggcgatatccagaaaaagcgggagtccgattactggaaatccatcgagttctccctgatggagaaggcagcggtatcctactatccgtcttacgtggaggaagaagcaatccatgcgatccatccggagtacaagatccgtgcgatcactgcctatgtctacgagaagttcctggagaatatcgacaaggacttcgaaaagagggaaggactgctgtttgtcggtggattcgcgcatccgccgaatgctgacgcggttctctggttcgcaaaggagatcttcccgctgatcagacagaagcttgatgtgaacttctatgttgtcggatccaaggtgacggatgagatcaaggcgcttgagcagccgggaagcggcatcatcgttaagggcttcgtcacagaggaagagcttgcatctctctatgcgacatcccggatcgttgtggttccgctgcgttacggtgccggagtcaagggaaaggttgtcgaggcggtctataatggatcggccatcgtcactacttccatcggttccgagggaatcccggaggcggaacgcgtcatgaaggtcgctgacggaccggaggcgtttgccgatgaggttgtcaagatgtaccaggatccggcggagtgtcgcagaatgtgcgaggagacgcagaagtatattcgtgagtatttcagtgtcgaggcggcgtggaaggtcattgaaggagattttacgccggagaagaaacggtaagagttttctgatcgcacgaatgtggaagtgtttcacgatttctgcgtttacaattctgaaaaacatggataggaaggaaaaaatcccatcggcaaagccgattcggaatgcatttttgctcgtaacttgccatacatctgaagggaagctccgtggggaggctcttgtaggtgtgagggtactgaacagttacgtttattcatgaatcgaatattgcatcatacgattctgccgggactttcgttcccggcagtctgtatatgcagagaaattttccggcgaagcgatctgggcgggatgcagatggactgatcattgggaatgactgcaatgcagcaaaaaaggagaatatagtgaaaataaacaatattcatgaaaattctaataattacaacaaatatacaaatgatagtagcgatgaggcgaagtccgcgggaaaggcggagacgattcttcgtgcgatgactgcggatgatcttccggcggtggaacggatcgaacagacttgtttttccgatgcatggtcggagaagcttctctccgatatgctggagagcgagtgggacgaggcctgggtgcttgcggacgagaagaattccgtgatcgggtatgcaaatttccggtttctcgcaggggaaggggagcttatgaggatcgctgtgcttccggaatacaggggacatggggagtcaaagaaattcatggatcgtctggaaatctcttcaagggagaaagaggcaccggatttgactctggaggtgcgtgccgggaacacgcctgcgataaacctttataaattctatggttttcaggcggaggctgttcggaagaattattatcatgatccggtggaggacgcgctcatcatgtggagacggccggttccatcgattcccacttaaaatcatgattttttccgctatactgtaggggactccgggggaaccggggatgatgaaggcggaggaaaagagaaatatgagaaaatacggaaaagacggtcggttggagagcgtgatctgcaacaggtgcggaaggaagctggcagtgaggaatgggatcgtgcgggaaggcgtgttttcgtcggatcatgcgtgggatttcttttcggagaaggatggggaggttcaccattttgatctgtgtgaggagtgctatgatgaggtgacgggggagttccgggttgcggtggaggtgaaggaggaaatcgagatgctgtaaaaggatcaaggcgggcggctggagagaggttgcctgcctttttttgttggcgggggaacgcggtgagctttcggtcagaagtgatgggagtggatggcggctggttttgctggcgggggtacgcggtgagcttccgttcaggagtgctggggatgcggggatggttccactaagcttgcggatggctgctaagggcggagaacaggggacacaactcgctgcgctcagacaagtgtcccctgtcctccaacgcatccgtccgcgagccaagtggaaccagatccccggatcaatgcactcctgatcggaagctcaccgctgtgtgttgcagatggagcgctcgcgcggggcgcatcgctgggggaatgtagatgagaagttctctgggcgcatcgctgagggagtatggggttgacgcagctgtctgcgagggaggagaaagcagggttcacagatcaatgtacgcctgatcggaagttcaccactgggaatcgcagatgggcgctcgcgcggggcgcatcgctgagggaatgtagatgggacgctcgtggcgggcacatcgatggaagtatgaggtgtctttcgatggtttctttcatgaggaataagggctgcatctcttgcatatgactggcgctttatggtatgatacgtgcagacttgataaatttagtatcaaaggggacaaaagtttttttgaccccgccattatgatagaatgcagaggaaattacatgttagatatctgtttactggggaccgggggcatgcagccgctgccgtatcgttggctgacgtctatgatggcgcgctgtgacggcagtaatctgctgatcgactgcggcgaggggacccagattgctttgaaggaaaagggatggagtccgaaaccggtggacgtgatctgttttacacattatcatgcggaccatatcagtggtcttccgggttttcttttgacgatgggaaatgcggagcggacggagccggtgcttcttgtgggcccgaaggggctggagcgggttgtcggtgcgctccggacgatcgcgccggagcttccgtttccgcttgtgtttaaggagctcacggagccgagggagaagttccaggcggggccgtatgtggtcgatgcgtttcgtgtgaatcaccgtgttgcctgctacggctaccgcatcacgatcccgaggaacggcaagtttgatgtggagcgggcaagagcgcaggagatcccgcagaagttctggagcagactccagaagggcgagacgatcgagcatgagggacggaccctgacgccggatatggtgttgggcgagaagcgccgcgggatttctgtgacttacacgactgacacgcgcccggtcccggcgatcgcggaatatgctgcggataatgatctttttatctgtgagggcatgtacggcgagaaggagaagatcgcgaatgcgcgggagaataagcacatgatgttccaggaggcagcgaagctcggaaaggaagcgaatccgagggagatgtggctgacgcattacagcccgtcgttgatgcatccggaggaatatttgaatgagatcagggagattttcccgaagatcaagaccgcccgcgatggctggtctgcagaacttggatttgacgaggattagaaaatgaagatacacagtgttgaagaagacgtatatatacttgcaatcgagagctcctgtgacgagacagctgcttctgttgtaaaaaacgggcgtgaggtgctgtccaacgtgatctcatcccagatcgcgctccacacgctctatggcggcgttgtgccggagatcgcatcgagaaagcatattgagaaggtaaaccaggtggttcaagctgcccttgatgaggcgcatatgactctggacgagatcacggcgatcgcggtgacttacggtccgggtcttgtgggtgctcttcttgtcggagttgcggctgcgaaggcgatcgcttatgcagcaaagaagccgctggtcccggtccatcacatcgagggacatgtttccgcgaactttatcgagcatccggatctggagccgccgtttgtctgcgagatcgtgtccggcggacatacccaccttgtgatcgtaaaggattacggcgagtttgagatcatcggacgcacgatggatgacgcggccggagaggctttcgataaggttgcccgcgcggtcggactcgggtatccgggcggaccgaaggttgacaaggcggcaaaagagggaaatccgcatgccatggagttcccgcgtgcgaaggtcggcggatcccagtatgatttcagcttcagcggtatgaaatccgctgtcttaaactatatcaaccaggcggagatgaagggcgagacgatcaatgtcccggatctctgtgcttcgttccagaacgcagtggtggacgttcttgtgagccgtgcgatcgctgcgacaaaggaatttggctataagaagcttgcaatcgcgggtggtgtcgcgtcgaactctgccctccgtgccggaatgaaagcggcgtgtgagaaagccgggatcgagttttattatccgtcaccgatcttctgtaccgacaatgcggcgatgatcggcgcggccggatactatgaatacatcaacggagtgcgcgcaggctgggatctgaacgcggttccgaacctgaaactgggagaacggtaatggaacaggtaaaaaaggctgcgatcgttctggcggccggtcatggaaaacggatgcacagtaaggtggcgaaacagtatctgctcttaaacggagagccggtgctggtccatgccctgcgtgcgtttgagatgagcggaatggatacgatcatcctggtgaccggggcggacgaggtggaattctgcaggaaggatatcgtggagacctatgggttttccagcgtgaagcaggtcgtgccgggcggaaaagagcggtatgactctgtctggaacggtctctgcgctttgaaggcagcaggattcccggaagacgggatcgtcctgatccatgacggggcgagaccgcttgtggacggggagatcattgcgcgcgcagtggatggcgcctgcagctattctgcctgtgtggcagcgatgccggtaaaggatacgatcaaagtggcggacgcggacggattttccgagagcaccccggaccgcagcaccctgaggcagatccagaccccgcaggcatttcggtttgagctgatctattgtgcgtatgagaagatcttcgcaccgggggcagaccgcagccatatcacggacgacgcgatggtggtagagctgatgacggatacaaaggtaaaattcgtggaaggcagctattctaatattaaagtgacgactccagaggatatggtgatcgcggaggcacttctgtacaagggagaaaaacatgtcagtttttgattttaatgcggaagcaaaagaagagagaaagaacgcgaaatgcacatttacggtatttcgttccaatgagaccacggcaactccggaacatccgatcctggtcctggacaaccgggaaaaacagtgggagcaccattccaaaggtgtgtttacaaacccggtacgggagacagcctttgaatttgaggatgaagacggcagaacacacagcgccgatatcttaaaaatagacgcgcgttttgtgaaactgctgaaatggctgggagaaaacaagatcaacgtgcgtctttccggctccaatgaggcggacggatatgcagtgtacaagatcagggagatcgcctttggcggcggaacaaagctttctgcggaagacggcttcttacagtatatgatcggacgtcttcaggcgagcagtgccccggcagaagaagtgtcggaggaagagacagcggaagatggagatgatatgaagctgaccagccttcagagcatcacggatttcatgacatgtgcgggaggaacacttccggataatatccgcctgtgggcaagaagaaaccttgcggtggcaaattcccatgaggtgtcaccggaagagcgccgtcatgcccagagagcgctctccatcatgatgaacatccagtggaagagcaactattttgaggccattgatccggaagaggcgagaaggatcctggatgaggagctgtatggaatggagcgggtaaagcagaggatcatcgagacgatcatccagattaaccgtacccacacgctcccggcttacggaatccttctcatcggaccggcgggaacgggaaaatcccagatcgcttacgcggtagcgaggatcttaaaactgccgtggacgactctggacatgagttctatcaatgacccggagcagctgacaggaagctcccgtgtgtacgcaaatgcgaagccgggaatcatcatggaggcattttcgctgtccggccagtcgaatcttgtgttcatcatcaacgagctcgacaaggctgcgtctggaaaaggaaacggaaatccggcggatgttcttttgacgctgctggataaccttggatttacggataactatatggagtgcatgatcccgacgggcggagtttacccgatcgcgacggccaacgaccgctcaaagatcagcgcaccgttaatgtcacgtttcgcagtgatcgatattccggattatacggaagaggaaaagaagatcatcttctcgaaatttgcgcttcctaaggtattgaaacggatgagcatgagagaggaagaatgtgagatccttccggaggcactggatgaagtgatcagccggtattcggatacatcgggaatccgtaatctggagcaggcagcagaacatattgcagccaacgctctttaccagatcgaagtaaatcatgtgaataaagtagttttcgataagaaaatggttcgggaattattaggataggataagaatgaggaggcctggtgcctccttattcttttatgacaggaaaggatggattgcgtggagggcaatgatatgtccgcgaaaaatttctgaaggaaaagaaaagggaaagcctgcggaaacaggaagcccggacaaaaccgggtttgaaaaacaaacttttttgaaaatatttttgaaaaaagtttgcgaagatgaaaaacagagaaaggaaacatgaaagaatagatactagatattgatatttacacggattaaaatagcatattttgtatacaatttaaaaagaatcaaaaaacaaaaaaagtttggaaaaatgcttgacaaaaatgcaattgtaggttattattaatgagcacgtttgagagagcgctttggagagatatcgaagtggtcataacgaggcggtcttgaaaaccgtttgcccgcaagggcgcgtgggttcgaatcccactctctccgctaactgtactgcggagccagagagatgagttcctggtgcagaattaaatatgagtcttgtgaaaacaagatgtgaatcaaccaatgcagaagtacccaagtggttgaaggggctcccctggaaagggagtaggtcgttagtagcggcgcgagggttcaaatccctccttctgcgcttttaacttgcaaagaaaacttctttgaaaaataagttaaaaaagttcttgacaaatcgaacctgatttgatagactgaatgagttgcttctaaaacacagaaacaacgaaaaaacagttccttgaaaactgaacagtatgtaaaaccctgaaaattcttataaaaatggtcttttggcttagaccatgaatgagaacattcagaacaaaacctaacaaaacagtagaacggtttaaaaattagccaagct

SEQ ID NO: 2106 - DNA, 1515 bp, Unknown
  gut microbiota DNA sequence
gaacagttactttatgcatttactgcaaaatggattattcagcacccatagcctttttaactgtgtcatagaggccatcgctccagccaaagtcagcacccatctcatagaacggctgtgctttctccttgaatccggcaagaacttcctcggacggctcaacaacagttacgccttcgtctttcatcttctgaaggtactcagcgtcagcagcctgctgtacttcgttgttgtactcaccagcttcttctgctgtctcaagtaaccatgtctgctgctcttccggaaggctgttgaaccagtcagcggatacaacccatgttgtgaagttctttacatgtccgtcaaggattaagtatttagcaacctcgtgaagctttctgccgtacagagttgcgagcgggttctcagcaccgtcgatggtctttgtctgaagagcctgataaacatctccaagtgccatacctgtggatgttgcgccaagtacatcgaagcccttggactggatctcgttggacggaacacggatctttaatccctttaagtcatcaactgtgttgaccggaacgtttgtaagagtatgtctctcaccgtagatccagttggaagcgatgatctttaagcctttttcttcaagcttgtcacactgctctttgtaccagtcggaatcaaccagtttccaaacctgatcccaggaatcgaacaggaacggtccgaatacgataccgaaatccggtacaccgtagtcagcgtagaaagcaccgtctgcaagtgtgcagacattctcgccgagaagcatggagtcgattaaggaagacttatcaccaagctgggaatccgggtagatctcgattgccatcttgccgccggatttttctttgatgatctcctgagctttctcccagccctgtccaaccggctcggaaatggagttctcgaaagcgacctgaagaactgtctcagcatcggaagaaccgttatctgctgcagctgctgtagtatctgctgctgcggctgctgttgtctcagctgcctttgttgtctctgttgtggaagaactgcttccgcaagcggtaagtgttgttgctgccatagcacctgccatggttaatgccataacttttttgagtttcataatgtttccctccgttttttgttttaaaaacatttatccggtcctctgcccgatccccatcaggcagaaaacctcgcaccccgtttcccggggaaagcttcatgatttttgattatttggaaatcttggaaaaatcaaatacaacctttaacatattgcccgggttgtgcgcaaagtcatcgaatgcctttgcagcatcatcaaacgcatatgtatttgtgatgatcttgtggagcggtgccttgcctgcgttcacgatatcgatcagctctaagaagtccttctttaatgcgtttctggaaccgaagacatttaattccttcttctggatcagtgtgaagttgaagtcaaggttcttcttgccgactccgatcagaacc

SEQ ID NO: 2107 - DNA, 2776 bp, Unknown
  gut microbiota DNA sequence
gccacacttaagaccgagtaaccgttatcttcgttgcggtatttgattctttccacatagcctgttacagttgccattttttatttttctgcgccttttccgccgtgtgcgaactcgatgaacttaccggttccgatcgcaaccgcggtgagcggctcctcagcgatcatcgtcgtgattccggtcttctcctcgatcagggcgtcaagtcctgagatcagggatccgccgccggtgagaacgattccgcggtcaaagatatctgccgcaagttccggcggtgtgcgctccagtacgttgtgtacggcgtcaacgatctgcattgccggctctcttaacgcctcaagtgtctcgtcagatgtaacaacgatcgtctttggaagacctgtcacaaggtttcttccgcggacttccatcgtcacaagctccgggcggcggtaagccgcaccgatgttgatcttgatctcctcagcggttctctcaccgatcagaagattatgtttctttctcatatagcggacaagggcttcatcgaagtcatctccggccgtcttgatcgaggtgctgactacagtaccgccgagagagatgactgcgatatccgcagtaccgcctccgatatctacgatcatatttccgcatgccttggagatatcaattccggcaccgattgctgctgcaaccggctcttcgataatgcagacctcacgggcacctgcctggtaagtcgcatcctctacggcctttctctcaacttccgttgcaccgctcgggatgcagactgcgatacgcggttttctcaaggttctctttccgaccgctttgttgatgaaatattttaacatcttctcggttacggtataatcggaaataacaccttttctcagcggtcttaccgctacgatattacccggagtacgtccgatcatcagacgcgcctcctcaccgaaagtaattactttatttgtttccctgtccagtgctactacggacggttcctttaaaacaacgccttttcctttaatataaacaaggatgctggcggtacccaagtcaattccaatgtcgtttgacatcatcattgtcgtcttcctcctgtctttctaactgaaaatctcctgaatctatttccgcgtccgatacaggacgcgcctcgcttctctctatcagaaaaccctgtccccgcaaaatatatcctgcattgtactgcatatttctgcagcttcatgatctcgcagtatttccggtcacgaaagtgaccgcacatacagggcgcgaaatatcagtttttattatatacgaaaggcatttgtttttaaaggggtttttgaaattttttactgtacccacacgccgttcttatcaacataatactttccgtcgatcatccggctcgtaagcatcgcgccgtcagttccgcaatagtaccatgtcccgttcgtctgtacccactggttcttcaccatcgcgccaccggctccgcagtaataccactgattattattcaggatccactggttctccgccatatatccggactggttaaaatagtaccagacattgttgatctgcttccagtttgcgaccggatatgtcttatccggattgcaccaccaccagccattgctgtcgcggagccatgcgccattcactgaaccggtcgtacttccgcttgtctggctccccgaaccggaagtaccgtttccatagtacgcagacgccgcgttccggttcgcatagattgcagcggctccatcccggtctacatccttcggctcagactctttccagctgctctcatcacttccgcggattgccttgactttaaatgtataactgccttcttttgtgaatgatccgcagaaattataatagttgtttgtcgtcgtgtatgcggaacctacgctgtccccgtcgcggtataaacggacctgatatttctttgcatattctgttccttcccaatatgcaactccgccatagctgtcgtcccaggagagatcatagacatccagatcataatcttcatcatcatactccgaatcaatatccgagatctgctgaagtgtcacatatacatacaattttgatgtacttcttgtcaccgatgtcaccttctgttcatcatttccaagatatacatctgatttgctcagtccggacgaaaacgcgtagtcactctcggcaccgatcgtaatcttaaccttcggcttcgtatcatcattccagtctccgctcggctcgttggtaatggagatctcatccacataacagccgtcatctgacacatccgcctccacttccaggttgtccgaatccgtcaggactgcattgatatcgatcgtgacctcctcgatcttctccgatgccattgccggaaatgccagcattgccgtcataaggaatgctgcgggtacgaatatcattctctctttcttcatagtgaacctccccgtccttctctcatttggtaaagacccacctgtcagcatatttcattccagaatttgcacgcagccggatcacatctttcttatagtataccagacgtttaggactcatttaagtttaattttcccgccaaacttcggcaatattgcggcaggtctctggtaattccgtgtcatggaattcacgatctgtctccgcagcattttaagctatatttagacacgtttcttcatgattcgttaagtaaatttactatcttttaattttttactcacaatttagacacattttgtcattataatacaattacgttatccgaaaggat

SEQ ID NO: 2108 - DNA, 895 bp, Unknown
  gut microbiota DNA sequence
ctggcaggtccccctaaaaaattgatactttccatactccccttagggactgcaggaacggctgcggttcctatttttttgcccatgatctccgcattttttcacacttctatcgacgcttcccattccattgactttcattccatctcacggtatagtaaatgtaataacattacccggatgcgggacgctgttcaccggtgttgtctctgcactgcggttcattacacgagggtggaattatattgatgtaaacggaaataaaaagccaagttttgaggtatataaaaatcttcagtaatttccccattgcttaaccgtccgtattaaagatacagcagacaaccagatacttttacaataagtcaattgacaaaacagccgtcccggtcatatccagggcggctgttttcacatctgtttgctttttccatgcccgttctcccgttgcgccttgccatttcttcattcctgtcgtatgatatggataatctgaatttacaaccgagaggagatctatgtacacttacacctggtatcaatggcttacgtttttttatctatactgtttctttggatggatcttcgagtccacctatgtttccttaaaacagaagcgcttcgtgaaccgcggtttcctgcggctgccgatgctgccgttatacgggagcggcgcggtgatgatgttatgggtatctctcccgtttcaggacagcctgatcctcacctatatctccggcgttatcggtgccacggctctggagtacgtaaccggatatgtgatggagcgtcttttcaaagtccgctactgggattacagcaaccagccctttaatatccacggttatatctgtctcagctcctccatcgcctggggatttctgacgatctttat

SEQ ID NO: 2109 - DNA, 2343 bp, Unknown
  gut microbiota DNA sequence
atatgccacctgctgcagaccacagtttccgtttctcggacagaccacgcagcggttatcatgctgggacagcagcagttggaccgtatttcttctgtgattccggaccttcgggctgttcgtatggatgaccatgccatccttcacgacgttgttgcaggaggtgatcagcttttcttttccttccagctccacgacacagactctgcaggccgcgatctcgttgatcccctttaaatagcagagcttcgggatcgggatcccattcttctcggcagcttccatgatcgtaatattttcctctgccgaaatcttttttccgtcgatcgtaatatttaccataatgtactcctgcctcctttaaagattccgtatccgaaatgatcacagcgcaggcaccgtccggcttcctgcttcgcctccttctcggtcatgcacttctcgactgcctcgaaatcacagacacgctcgcctgcttcccgctccattaagttcacacgtccgcacggagtcttgtcctttaagctcgcctccggaatttccactccgctcgtgatctcgtggtggtaacccaggtattcatcgatgttcgccgcaacaaccttcgctgctgcgatcgctttaattacagatgccggaccgcttgagcagtcgccgcccgcgaagacgcccggcatgttttcaaatgcaccgctctttaaggtcacgatctttccgcgggataccgggatcccggctttctcgaaatgtccggactcgatatcctgtccgatcgccttgatcaggacatcgcacgggatgtagacatccggctctccggtcggcttcacgctggcgcggccgtccctgattgcgctgatcatctgcggggtcgcgtagatgccatggatcttatggtcttctccgacattcagagaggccggggcctttaaagtcacgatctcgatcccctccgcgatcgcgccctcgatctcacccggcagcgccgtcatatcgtttctccgtcttctatataaaatgctgactttcttcgctccaagtcgttttgccgtgcggactgcatccatggacacgtttccaccgccgatgacaacgacttcctttccggtcaggtcgatgatctcgtcttttccgacactccgcaggaactgtaccgcggagagaacgccgtccgcgtcctcacccggaagtccaagcttcttatccgtgctggcgccgatcgtgatgagcaccgcgtcatactgttcctgcagttcctggatcgtgatgtccacaccgatctttaagccatattttacttccacgccggtctttaagatcgcgttgatatcgtcatccagccgatctttcgggagacgatagttcgggatcccgtaccgcagcataccgccgagcttcggcagcatctcgtacacggtcgtctgatgtcccatgagctgtaagtagtaagcagcacttaaacctcccggaccgccgccgaggacagcgacctttttcccggtcgacggagcacatttcggcggatccacaacacccgcgtaatctgccgcgaaccgtttcagtccccggatattgaccgcatcgtcaaccatgtttctccggcatctcgcctcacacggatgctcacagataaaaccgcaggtcgtcgggaacgggttgtccttccggatcaggcggatcgcatcggcatatcttccttcttccacgagcgccacataacccggaatgtccacatgggccggacagatcgcgacacacgggaccggctggttgtatgtacaggtacagcggccgttcttgatgtgctccacatagtcatctcggtagccgatcagccccttatagaccatgttcgccgcctcatagccgatcgcacagtccgcggaatccatgatggaaagcgccgtcttctccatgagatccagcgtatccattgtcgcttttccgtttaatacgtcacggatcagctggtttaactgcccgagaccgattcggcacggaacgcattttccgcacgtctgcgcgtggcagagctccagaaacgctctcgccatatcaacaggacagagcccaggcgggctcgattcgattcttctctccagatctttataaagtccctccatcacgatccgcgcgcgggtcggggacatgatctccaatctgctcatatgattcactcctctgcaattttttcatcggtcacacctgctcacgcagttatgcctgctttcccctctatggcttattgaatttgtttcttaacatattgtcgattctatcacgtaattattaaataaatcaagtcttttatgtgctttgcttaataatcttttgcttaacgtt

SEQ ID NO: 2110 - DNA, 24021 bp, Unknown
  gut microbiota DNA sequence
gcaaaaatcccattgccgcaggcaatttttcatggatttttgctcgtgactgtgaaggtactgaacagttacgataagtgtgaaaaaagtcatgttccccatccgaaaaataggcgggaacatgactttttatgtaacagcgacgttctattctgatttttcttatttctgctttttcttcggattttccggaaaccatcctttctttacccgctcttcctgctcaaataattccttgatgctccagatgcaggtgatcccgaaaacagcgatcagcacgctgatgatcatatttgagatcaggagagaggcgagcagggaaaaaatcccgatccccgcaaacacaggccagacctgttttccaaagtaatattccgtcttgatgacgatcacatgaaaactgccgatcagaagaaacgttccgatcgcagcgatcagtccggtccagttcataaaaattcctttctgtgaatccttgttttattatggtcagcgcagaactactgaacagttactatctaatgttcatagcttcccgttgtgatcgtatactcgccttcgccctggacaaacacggtgccgtcggttccgataatcgaaacgctctttccgtccgcacccgtgatggaacctttgcagatcagggaggagactgtgctgtttccggtcacggtccatgcggagagggcatcgatcgttacgtcacaggtcccgtttccgccgtcgccggcatttgtctcgtcctgaaggatcgagccggtcaggatcgttccgttcgtgaggttcagcttcagattgctgatgctgtcccagaggatcgcaccgctcatttcctgctcatctgcggtgaaggtgcagtcagcgccgttctttccgctctcgccccagccgcgcttgttggcattgccggtacactttaagaaaaagtcattggatggagagtaggtgatgtccacatgtttcagatagaaggaactctcagtgtttgtcgtgtagaacagaccgccgtttaaggaagtcaggctgccgccctccatcgaaaagttactctcgccgacctcggaatcgccggacatgctctggtagaggatcacggtccagtcgcagtcattctgctcattttccgggatgtttccggagagcgtgcagtttttgagggacagggaatttaaaccttcgatgcagaccgcctcggaattttccgcggagagcgctgcatcgctgacggtaatgtccgcagtacagtagacagccggggaaccggttccctttgacgtgtaggttccaccgtttatggtcatggtcccgccgccgcggtcgctccggatcgctgcggaagattcgccgtttgtctcaacagtgaggttggaagcggtgagagttccgccgccggcgacatggatccctccggaggtgtcctgctttgtggtgatcgtggtgtcggatacggagacattgccgttgccgtagctgaagacgcctgcaccgcctttcgcgtcggtggtgatcgtgccgccggtgagtgtcagggctccgtctgtggcaagggcagcggcgctggtgccgtagaagctggagttgtcgccgccggtgctgtcggtggaggtgcggtcgatcgtgaagttatttaaagtgacagacgcaccgctggtcacaagaactgcactttcatcctttccggtggaagcgtaggtctggtcgctttcctctttatcttcagaaaagctggagacagcatcgtaggattccggtgcggaattctgtccgcccatacctcccgggccgccaggaccgccttctccgtctggaggagcctgttttccgtccatatttcccggagtaccatccggcggatttcctggcctgtcagaattttctcccggagctccatccggtttatcagccggagcggaatcggaagtttctgttacctgtgcggtagtatcagcggcgggatcagcggctttctgtccgcatccgccgaccataagggtccctgcaagaagcatgcagaggagcgcctgttttttcatgagaatcagatcctttctggaatgaagtatattatataaagaagtatacgaattaagtttgttaaaactgtgaaatacacagacttttcacgtgacggaatttgccgagtgttcatgaggtggcgatgcgtgcctgcacgaagcaatcggttatcaaggacaaacgcatccgacgcgagaagatgtcagggctccggtctcgtcaatgtctcgagagctcccagaatgccaccgcactcgccgctgcgacatttaaggagtcaacgccatgcgccatcgggatcatgaccgtgtagtcacagccatcgatcgtggcggaggcgagaccatcgccctcggttccgaggatcactgcgagcttttcttctgagagaagtctgggatcatcgatggagacggaatcttcctttaatgccatggcggcagtcttgtatcccatggctttgaggtgtgtaagtccgcctgcggagagatcggcctctttcggaaaataagtccacgggatctggaaaacggttcccatgctgactctggcggctctccggtaaaatgggtcactgcagccggaggagagcaggacggcgtccatgccgagcgctgcggctgagcggaagatggcgccgatatttgttggatttacaacattttcgagcacggcaatccggcgttttcctttacagatctcctccacagaaggcatcggcttccgtttcatggcgcagagaagtccgcgtgtcagtgcgaagccggtgagatttgtgagaagagaggcagctgcggtataaacgggaaggtccgggtaatcggaaaaaagttccgggatccatgaatccgtctgccggtcctcgatcaggacggagacaggttcgtatccggcattcagggcgcggcggatcacattcgggctttccgcaatgaagatcccgggggccggttcgttgatatgataaagctgggactcggaatagcgggaaaagaggtcgagttccggcagattaaggtcggtgatcgttatgattgctggcataaaatctcctttttggttcagtctgtttcttcttttaagcagatcaggttgctgacataggggcgtttcccggaaagcacctcatcgtaaaaattctgcttccagtcgatatagtcgatgctgttctccagctcccggatggattcgcgcagcatttcctgctttttggaaagcatttccttccgtttcatgatcgtgctctcgccctgaagacaaagggcaagatattcattcatttcctgaatgctcatcccgcattttttcaggcagatcaggtctttgatccattttacatcatgttcatcgaaaatacgccggttgttgctgtcgcgttttacgttggcagataccgaaagctattgaccggttgttacaatcggaatatataatcggtagtatcaaccggattatagcatgagagacccgaaaagacaaggacaggttcggcaggccgctggttcctgtccgcgcattgcgcaaacatgtgttatgatattcgggctgaatctcctgcttgcaggaatcatgaaaggacgaaaaatagcaaaatgaaacagaacagagtgaaacagatcagtatagtcatggcggccgcagatgtcgtggataacggactgtctgtttcgagaaacagcgttccgaaggcgcaggaaatacattcacttgacaagcaggtacctgcatgatacgattatattagttacaatgtgtcacttaaacgacgaatgtccgtgaatgacggatattccctggtcctgcggggaggaaaaagatggattttttcagaaaaagcacggcaaagaaaaatgcggatcagaaaggaaatctgacggaaggaccgatcgcgaaggggctttttacgtttatgatcccgatctttctcggtcagcttctgcagcagctctacaacatggcggacgcctgggtcgtcgggaactttgcgagcaatgatgcattcgcggcggtcagcctgtccggaaatgtgacgatgtcggtgatcacgctcttcggcgggatcgcgatcggcggcggagtcgtgatctcaaaatactttggagcacaggacgaggagaacctgcagcgggcagtccacacgaacttccttctggggatcgtgttttccatcctcgcgacgatcatcggtcaggtgtttgtcccgatcctgcttggctggcttcacacgccggacagcgtaatgacggaggcgcgactgtactttggaatctattttgccggcgtctccacggtcatcatgtacaacatctgcatgaacatcatgcgggcggtcggggacagcgtgcatccactctattacctgatcttttcctccgtggtgaacatgatcctggatctcatttttgtcgccggattcaaatggagcgcagccggagccgcggttgcgaccgtgatcgcgcagggactcagcgttcttttatgcctgtcacgtatggtaaaggacggcggggcggcgacgatccattggaaggaactgcgcttccataaaaaaatgatccgccaggtcatcgtccagggacttccgacgggtctccagaactcggtcatcagcatcggaaatctcgtcgtccagtcaaatatcaatacattcggcgcattcgcgatctccggacagggtgcctttgcgaagcttgaggggatcgcgtttctcccgatcatgagcatgtccatggcgctcacgacctttgtgagccagaatcttggagccgggagagcagaccgggccaaaaaaggctccgccatcggccttgcgttcggcatggtgatggcagagcttgtgggaatctgtctttttatctggatcccgatccttcttaggatctttgtcgatgcaccggaagcgatccgcttcggaacgatccatggaagaacggttgcactgttctttttccttctggcattttccaactgcgcgtccggcgtcctccgcggagccggaagatcagtggtcccgatgttcacgatgctcatctgctggtgcgggatccgcgttctctacgtgacgatcgcactccggatcattccggtattccggacgatctcatcggcttacccgctgacatggagcttaagctcgatcatttttatcgtattcttgcttcggatggactgggaaaagcagatttaaatctcttttccgcgttcattgatcacgagtgccataaattctaacggctcatcaaacggatttttgatggcatggctctgaccaacctcgatcacacagacatcgcccgggtggatctcggtctctgtgtggtcgttgtcctcaaagatcccctttcctttgatcacatagtacggctcggtattttctacatgctggtggaaaccgatgctgccgtgcggcgggatgatcacgtgtgcgtacatggatgcatgtcccatgagctcgtccttgcttaaaagatgacggatctcgacggtgccttcaccgcctcttaaattcggtacaaatgcgacttctgtttttctgaccatagtggaaacctccctgaaatatttcaatgaaaatctgccgggcagccatctttgcgggattggtctgcccaaaatattgacaaatttattatactgcatatttagaaaaagaaaaatctgattttatatttttcgtaacccggcaatatgtttatatatgcctgaatagtatggccactgtaggtgttcttgcattttccatttggggtcaaaacatgagaaaatatattttttacatttaagatcaaaatgctgggatacaagagaaaaataccaggaatgccccctgagtgaacgagattcagggggcattttgccggtgatttgagacagatgatcggcttacccaagtgtatggaagaaatccaccgtcttattcactttcttcatcagatgatcaaacttctccggtgtcagggactgggcgccatcacagagggctttttcaggattgttgtggacctcgatcatgagaccgtcagctccggctgcgatcgctgccatagcgagcggctcgaccatgaaacggatcccggctgcatggctcgggtcgatgacgaccggaaggtgagttttcttctttaacatcggaacagcggagatatcgagcgtatttctgtaggaagtctcaaaagtacggatcccgcgctcacagaggatgaccttttcatttccacctgccatgatgtactcggcactcatcaagagctcgtccagagtattggcaagtccacgctttaagaggattggcttgtcgatctttccgagaacctttaagagctcgaagttctgcatatttctcgcaccgacctggatgacatccacgtcatcgaagagtgggagatgctcagcgctcatgatctctgtgacgaccgggagacctgtggctttttttgcctcgaggagaagatcaagaccatgttcatgaagcccctggaatgcgtacggggaagttctcggcttgaaagcaccgccgcggagaagagtagcgccggagcgtttcacatcctcagcgacctctgtgatctgttccttcgtctcgatcgaacacggtccggcgatcacctggaaattgccgccgccgatctttctgccgcagatatcgatcacggtgtcatccgggtgcatggagcggtttgcctttttgtacggctcgcggatccggcggacatcctcaacgacatcgttggcgcgcagccagtcctcatggatcgtactcgtatcaccgatcagtccgatcagggaagcttcggttccctcggagagatgaagcttgaagccctggttgacaagttcggtctttaaagattctactttctgtttattggcgtctttctttaagataatgatcatgattgttttctcctttttctgttaaaataaaaaatccggtgtctgctgcaatcgcaaacaccggctccacgttttcgttacgtttcctcaggccctttgaccttcgatcggagaggtttgttttttgcagcagaaacagtccgcgccgtaataatagcccggaaaataataaaaagaataggatgcaaaaagattcatcatctggttcttcatatctgctgttctcctctctgaagattgaccgccggatcgattctttccggctgctgaagttatcatagcgctgtcagatgcatttgtcaatagaaaaattcaataagttgaagttttacgcttttatgtaataaaatatacaaaagaatgaaataataaaggctaaaaaataaagaagagcagaagaatgatcagaacaaaaaagatccaaacagcagtggggatagaagactagttgtaaatttgtaagtacgatacaaggacgtaaaaggtcaggattacagaagacgggaatatcacgaaaaatccccggcgcagccatgtgctcatgactatgccggggatttccagccgatcaaaatctctatatcctattccaatgacaccgtattcgcaatgatctccacgcaccgctcgatcccgagagtaccgctgtttaagcagagatcataattcttcggcttgccccactcattgccgctgtagtactgatagtagtcgcggcgcttcgcgtcgatggcacggatccggctttccagcttcttcacatcctcatccggttccttttcaagcgccagaatgcgctccacacgctttttgagaccggaggagataaatacccggaaagcatcctcaacgatcacgtcagaacatcttccgatgatgacacaaggtccctggttcgcaagctggcggatgatcttcgactggatcacaaaaagctgatcggaaaccgggatctcataggcaggagagaaaggatcgaccgttgcgagatcatcatagttgatccgcttctgtctggcgatcacctcatcgtttgcgtgaaaaagatcctcagagatattgctgtcctcggccgccatagcgatcagttccttatcgtaaacaggaatcccaagtttctttgcgaggcagacgccgatcttgcgtccgccgctgccgaattcacggctgatagtgatgactttgctcataatatcttcctcccctgtacaagttgctattatccttaattctgcacagtttcagtgctgtctgtaaagagtataccataaaatcgccaaaaagttacacaaaattttccaattcatagaactgtaagaaaatataaaacaacaacatcccccagcgagattgctaagcgttgatcctccgggaaggagtgccttgatccggggaactggcttcctcttagcccgcgggtgactgcgttggggaaaatatgacacttgtctgagcgaagcgagttgtgtcatattttccccgcctttagcagtctcctgcaggcttagaggaaccttccccgcatccctgtgcactccttcccggaggatcaacgcgtcccgctttcgccactatgattcaacataaaaaaattacggcccacgcaacgcgcagaccgtaacaatagatcccttcaattactcactcagataagctttcttcacctgatcattattcatcatatccttcgcatccccactcaaaacgatcttccccgtctcaagcacatacgccttattcgcgatcgaaagcgctttcttcgcattctgctcgaccaggagaaccgtcacaccgtcgcggttgatactctggataatgtcaaacacctcattcacatagatcggagacagacccatcgacggctcgtcaagaacgatcagcttcgggtggctcatgagggcgcggcccatggcgagcatctgctgctcaccgccggagagagtaccggctggctggttcacacgctccttcagacgcgggaaacgctcgtagatcatgttcaacgtcgcttccatctccgccttgtcctttctcgtataggcgccaagctttaaattctggagaacggagagcgtggagaacacgcggcgcccctccggaacatgggcgatgcccatgctgacaagcttgtagcccgggactcttgtgatatcggttccctcatagaggatatgtccggaacgggcacttaaaagtcctgttaccgtgtgcagcgtagtcgtcttaccggcaccgttggcaccgatcagagcaacgatctctccctggtttacatcgaaggagattccctttaaagcctggatcacgccataatagacttccagatctcttacttccagcattgccataatctgtttctcctcctattcatcaccgagatatgccttgataacatccggattgctcaaaacttcctgcgtaggacctgtgcagagaacctgaccgaagtttaacacggtgaggcgctcacaaatgccgctaacaagtttcatatcgtgctcgatcaggagaatggtcattccgaaatggtcacggacgaagcggatcgtctccatcagctccgcggtctcgttcgggttcatgccggccgccggctcatcgagaagaagaagcttcggcttcgttgcgagcgcgcgggcgatctcaagctttctctgtttaccgtaaggaaggttggatgccttgaaatcacactcattgtcgagcccgaacacctttaagagctccatggcttcctcatccatctctttttcgaccttataatagcgcgggagacggagaattccctcgatcgtggagtaggtgtggtgattgtgaagtcctgcctttacattgtcaagaacggagaggtccttgaacagacggatgttctggaaagtacgggcaattccggccttgttgatatcggtcgtggactttccggtaaggttctgaccgtctaagaggatcgttcccgtatccggcttataaacaccggtcagaaggttgaagatcgtggtcttgccggcaccattcggtccgatgaggccgtagagctggcccttttcgatattgatcgcaaaattgttgacagcctttaagccgccgaaggagatgctcagtccctttacacttaacatgtctgacattttaagcttccccctttccggaatgtgtggtatgtgatgcaaatccgccgaagatccgtttgcggagcgtgatgaactgcggtgcggagttgaagagcatcgcaaggatcaggacgatcgcgtagatcagcatacggtagttgtttaagcctcttaaaagctccgggagcagatagaggatgacggtggagatcaccgatccgcggatgattccgattccgccgagaacgacgtatacaaggatcatgatggacatgttgtagccgaagttcttcgggagagcagtcagtgtggtcaggttgtgggcgtagagaacgccggcaacgcctgctaaagctgcggagatgctgaatgcgagcagcttatatttcgtgatgttgattccgatggactcagcagcgatgcggttgtcacggatggacatgatcgcgcggcccgttctggaatttacaaggttcatgacgatcacgagagtgatcaggaccaggatgataccgatcgtaaaggttgcggcctgcggagttccggtgattccctgcggtcctttgatgaggacttcaccgccgtcttttaagccgagggacatggagtccttaaaggaaatgtggaaaccatctgcgtcccgtccaaggaatatggcgttgatgaggttcttgatgatctcaccgaatgccagggtaacgatcgcgagatagtcaccgcgcagacgtaaaaccgggataccgatcaggataccgcagacagctgcaacggcagcgccgataaaaatcgcgatcacaaggcttacagtcggatttaaggtccccttcatgcatttggagaagagggcaccggcgaatgcaccgacgcacatgaatcccgcatgtccaaggcttaattcaccgaggattccgacggtaaggtttaaggatactgccatgatcacatagatacagaacgggacgagaagtccctttaaaaggctggatacatgtccggtgttcatgaggatctccatgatgagccaggcagcggccaccattccgagggtgatcatattgttgacgaatgttttcttttttgctgtacttttcatgtcgatcacctacactttctcgttcagtttcttgcccaggataccggtcggacgtactaaaaggacgatgatcagtacggagaacacgatcgcatcggaaagctgggaagagatatacgcttttgacaggatctcaataattccgagcaggactccgccgatcagggcgcccgggatggaaccgatcccgccgaaaactgcggctacgaaagccttaataccaggcatggatcctgtgtacggggtcagggacgggtaagcggagcagagcagcacgcctgcgatcgcagcgagagcagaaccgatagcgaatgttaaggcgatcgtaccgtttacgtttacacccattaaggttgcagcgccgcgatcctcagagacagcgagcattgcctgacctgcttttgtcttgttgataaatgcggtaagtccgatcatgatgacgatacaagagaggatcgtaacggtcgtctctccggtgatcgtgatggctccgtctgcgagcttgatcgccgggaatgtcacaatggatgtaaaggactttgtgtcggctccgaataagaggagagcgacgttctgtaataagtagctgacaccaatcgccgtgatcaggacggacagcggggaggcgtcacgcagtggtttgtaggcaacgcgctcgatgacgataccgaggagcgtgcacacgacaacggccaggagcacgcttaagaaagtcggcattcccaggtagcgcgttgtgataaatacggtatagcttccgaccatgatgatatctccatgggcgaagttcagcattttggcaattccgtagaccatggtgtatccgagtgcgatgatcgcgtagacactgccaaggctgattccattgattaaatagttgataaaacccatcataacttttacacctcggtatcttttccggcgggttttcgccgggttcttgcggtctataataggaacgtacagaccggatggacagttgcgggcgggatcctgctgacggatttttgcccccgacagcaaattttatgttcataatatcataagaccctgaaagaaacaagaggattgccgaagcgacaatcctcttaattctgtcattgttacggttcacaagatgtgtccggtaacatcattcgttcatgtctgattacatcgcctggtaagcgccgtctacaaccttgacagccttcggtgccttgtgcggctcgccgtcttctgtccatgtcatgttctcacctgtaagaccgtttacagtgatctttaacattgcttctttcatcttgtcgcatgtatcgcttgcagaagtctccggtgtgatgccagctttctcagcagcagctttgatcgcatagatcgcatcgtatgcatcagcagcgaactggatcggtgtctcgccgtatttctctttgtaagcagttacgaacttctgtgtgagctcgtcgtcagcatctgctgcgaacggtgttaagagcattaaaccctcagcaagctttgtatcgaagttgtcaacctgaaggataccgtccataccgtcacatccgaagaatttcggagcgtaacccatggtgtttgcctggttgaggatcagggatgcctctgtgtagtagatcggaaggaatacaaggtcagcgcctgcatcctttgctttctgaagctgtgtggagaagtccttgttggaatcagctgtgaatgcctcagcagcaacgatatcaagaccatggtttgcagcctcggaagcaaacttctcgtagataccgctggaatatacatcggagctgtcgtagatcactgcaatcttatcagcaagcttgttctcagcaatgtaggttgcggatgcagcaccctgatccgggtcagagaagcatacgcggaatacgttcgggttctgtgcacactcaacggaagaaccggacggtgtgatctggaacatattgtcagccattgtcttgtcagcgactgctacgcacggagcggatgttacagtacccatgagcatctgcatgccccagtcttttaaggtgttgtaagcgttgacggatttttctgcgtcatgctcatcatcctggaactggaaatcgatctggtagccgttgatgccgccgtcagcattgatctcatcaactgcgatctgtgcgccgttcttaactgcgagaccatatacggcagctgcacctgtaaccgggccgataccaccgatcttgaatacttcaccggaagctgctgtgctctctccggcagcggctgcagctgttgttgtttctgttgtggaagaagagcttccacatgctgttaaagatgctgccattgccattgcaaggccaaggcttaaaaatctttttttcataatgtttcctcctcttgaacttgttatcatgataaccattcactgctttgtcaatttgaagtggaacggttaaagattattttgaattatagggagtttacttcagaatgtcaagctaattaaaattttaacggggaaaaacacgtttttttgcgggtttatagcattttggggagaaaaacgctggatttattctgagttgcggaataaaacaaggcttgttttactggacggaaagaagccggtattccgcatttcgaagcggcagaatccgcagcttccgtttggaaatattctgtccgtaaaaaatagcggacgtgtcagacgatgtgtctctgtgattgacaaaatgcgcgggaatcggtaaaatctgagtaactgggcgaacgaagatcctggccatccgaaccggccggaaaggagagtattatgacgcttacgcagttaaaatatgtgatcacgatcgcagacaccggttccatgaacgaagcggcgaagctcctgtttatttcccagccgagtctctcactggcgttaaaggagctggaacatgagatcggaacggagctttttaagagaagcaaccgcggcgttgtcctgaccccggaaggacaggagttcctgggctatgccaggcaggtcacggaacagtataagctgatggagtcccgctatatcgagaagaagaacgtgaagaaaaaattcggcgtttccatgcagcattatacgttcgcggtgaatgcgttcattgagatggtcaagcagttcggcatggatgaatacgaatttgcggtgcgggaggaaaagacttacgaggtcatcgaggatgtgaagacattccgcagtgagatcggtattctgtatttaaatgactttaaccggaaagtcctcacgaagctgtttgatgagtcagatctggaattctgtccgctgatggactgcgggatctatgtctatctctggaaaggtcatccgctggccggtcaggacgagatcacgatcgaggaacttcaggaatatccgtgtctctcctttgaacagggaaattataattccttctattttgccgaggaagtcctcagcacctacagctataaacggctgatccgtgcaaatgaccgtgcgactctgttaaacctgatggtgggcttaaacggatatacgctctgttccgggatcctctgcgacaatctgaacggatcggattaccttgccgtcaagttaaagtcggatgaggtcatgacgatcggatatctgaagagaaaaggaatcgcgctaagcccgttgggacagaaatatctggaggagatccggaaatttgagggaatgtgacggatcaaaatagcaataggaaaaacctatagacaggcacatagcgaatatattggacgagggcagataccaggtggtatgctgataagcatccgaaaaagaacggataaaaggcagattataacggaagcaatagattaacctgtagttataagtgacttaactgtcggttatatggcctattataataaggaagaaactcgttcaaaaccggaaaaaatccttggaaacagtgcagagaagatccaggaaatatgaaaaaacagtgaaggaaccgatcagaaaatgcagacagacagaaaagaagcgctccgctatctggggcttggaaaacatgaaccggatccggagacggagcggcttttagaggaatgtatccgggaagcagagagtgcggcagatttcagacatctgatccgggagtatccgctgatcatggaagatgatgggacgatcaatggcggatgttttcgggtgaagagtgaaaatttaagaaagaacctggctggctgtgattccgtgctggtgatggcggtcactgtcggtgcacaggtggacagacttctggccaggtacgggaaactttccgtggcaaaagcggtggtcatgcaggctgccgccgctgcgatggtggaagcttactgcaatgagctgaatgccgggtggaaaaaggaatatctggaaaaaggcctctatctcagaccgagattttcgccgggatacggagattttccgctgtcggcgcaaaaagagatccttgacggcctggaggcgggaaaaaggatcgggatcactctgacagagggatatcttatgatgccatcaaaatcggtgacggcggtgatcggtgtgagcaggacaccggcagcatgtacgatcgaaggatgtgaagcgtgcgggaaaaagggctgcgcgttccggagatgtcaggactgagatacagaaaataaaaaatgatggaaaattacgagctgatccggtcaggatccggatcagggacgataggagagaaccatgaatattctggaactgatgaaagagagacgaatttattttgacggaggaatgggaagtcttctgcaggcgagaggactgcagcccggggaacttccggagacatggaatctttccaaaccggagatcatcgaggagatccacagggaatacctggaagcaggctctgatgtggtgacgaccaataccttcggtgcgaaccattttaaattcaaggccgaggatggatattcggtgcaggagatcgttgcggcagcggtgggaaatgcgaagcgcgcgatcaaagcctgcggacacggatacgcggcacttgacatgggaccgaccggaaagctcttaaagccgtacggagatctcgagtttgaggatgcctatgaggcatataaagaggtggtcattgccggaaaagaggcgggagccgaccttgtgatcatcgagacgatgggagacggctacgagttaaaggcagcagtcctggcagcaaaagaaaacagcaatctcccggtctttgcgacgatcaccctcgatgaaaaggggaaaatgctgaccggaggaaatgtggagtctgtgacggcgcttttggaaggcctcggcgccgatgtgatcggattaaactgcggacttggaccgatccagcttcttccgttcttaaaagatatggtacgtgtttcctccacaccgatccttgtaaatccgaacgcgggactcccgagaagtgagggcggaaagactgtctacgatatcaatgcggacgagtttgccgaggcgatgaaggagatggcacggaacggtgcgacggtcctcggaggctgctgcggaacgacgccggagcacattcacaagacaaaacttgcctgcgacgcgatcccggtctgtgagatcacagataagggacggaccgtgatctcctcctactcccatgcggtggtgttcggcggccgcccgatcctgatcggagagcggatcaatccgaccggaaagccgaaattcaagcaggcattaaaggataaggacctgacatacatcctctccatgggtgttgcccagcaggagagccgcgccgatgttctcgacgtcaacgtgggacttccggggatcgatgaaccgcagatgatggtggatgtcgtgaaggagcttcagggtgtcctggacctgccgctgcagatcgatacttccgatccggtggcgatggagcgggcgctcaggatctacaacggaaaaccgctgatcaactcggtaaacggaaagaaagaggtcatggaacagatcttcccgctcgtaaagcattacggcggtgtggtcgttgccctggcactcgatgaggacgggatcccggagactgcggacggaagaattgcggtcgcgaagaagatctacgagacggcggaatcctacgggatcccgaagaaggacattctcgtggactgcctctgcatggcggttagctcggataagaatggggcgctcataaccctggaaaccgtgcggagagtccgggatgagctgggcggaaagacggttctcggcgtctccaatgtgtcattcggacttccgatgcgcgaaaatatcaatgcgtcatttttccttctcgcaatgcagaatgggctttctgcagggatcgtgaacccgaatctggaagcgatgatgcaggtttacgacagtttcctggtgctgacggcgcaggatgagaactgtgcgggatatgtagggatctacggtccgaaggaagcggagaaaaagagacagaaggagatcttaaaggcagcggctgtgaaccaggcggcaggcgtgagcgggactgcgggctccggaagtgcggcagattccggaactgcatccggggcaggagcagcggatacgggctctgcgttaaagaagagtatcataaagggaatgtcccaggcggcgtctgatgcggcgagacttgccctgaaggatacggatgcgctcgaactcatcaacacggacatgatcccggctctcgacgaggtcggaaagggattcgaggccggaacggtgttcctcccgcagcttctgatgagtgcggaggctgcgaaggcggcgtttgctgtcgtgaaggagtccatggaggcgagcggagaggttcaggagaagaagggaaaggtgatcctggcgacggtgaagggggatatccatgatattgggaagaatatcgtgaaggtccttctggaaaattatagttttgatgtgatcgatcttggaagagatgttccgctggagacggtcgtggaagaggcgatcagggagcacgtgtcggtggtcggactcagtgctcttatgacgacaacggttccgtcgatggaggagacgatcaaggcgctgaggaaggatgcaccctgggtgaaggtcatggtcggaggtgcggttctgacgcaggagtatgcggatgcgatcggggcggatgcatattgcaaggatgcgatggcgtcggtgaattttgcgacgagtgtgatcgggaagtaagagatcagagcgtgatatagttgtgactgccgggttctttggagagcctggcagttgtttttttcgggagagagtgtgttggcgagggctggggcggagagcttccggtcaggagtgcggtgggatccggggaaggttccgctaggctcctgagagaatgctaagggcggagagcaggggacacaactcgctgcgctcagacaagtgtcccctgctctccaacgcattctcccacgagccaagaggaaccagatccccgtattcatgcactcctgcccggaagctctccgctgcaggcgcaaggagtgcgccgttgctgcgcacggcgcggattgtgcaaaaaagtgtgcagaagtatggatttttctaccgtgatacggtataatgatagttactgtatcagtctgcggtattgtttggctgttttggtgcggcgaatgggacgatcgcagactcgcacgctaataaaggagaagatcagatgaaaaagattctggatatcatcacggatgagatgagaaaagcttttgcggcgaatggttatgacgagaattttgcgaaagtgacgttgtctaaccgcccggacctttgcgagtatcagtgcaatggtgcgatggctgctgcaaagacatataaaaagaaaccgatcgatatcgcgaacggtgttgtggagcagttaaaggacagcaaggtgtttgaagaggtgaatgccgttatgccgggattcatcaatttaaaggtagatgcttcttttctttccgactatatgaacggaatgaaggatgcgaagaagcttggtatggatgaggtcgagaagccggagacgatcattatcgactatggcggagcgaatgttgcgaaaccgcttcatgtcggtcatcttcgttctgcggtgatcggtgaggcgttaaagcgcatgggacgttttgtcggccacaaggtgatcggtgatgttcatctcggtgactgggggcttcagatgggacttatcatcgaggagttaaaggacagaaagccggagcttccgtattttgatccgaattttacaggggagtatccggaggaggcaccgtttacgatctctgagcttgaggagatctacccggcggcgagcggaaagtccaaggtggatgaggcgttcaaggagcgtgcgcaggaggcaactttcaagcttcagagtggatatgcgccgtatcgtgcgatctggaagcacatcatgaatgtgtctttaaaggatttgaagagaaactatgcaaatctcgatgttgattttgatctctggaaaggggagagtgacgcgcagccgtatatcccgggactgatcaaggatcttcaggataagggacttgcttacgagagccagggtgctcttgttgtcgatatcgcggagccgaccgatacgaaggagcttccgccgtgtatcgtgagaaaatccgacggagccgctctctatgcgacttctgaccttgcaacgatcgttgagagagaggaagatttcaagccggatcactacatctatgttgtggacaagcgccaggagcttcattttacccaggtgttccgtgttgcgaagaaggcggggatcgttccggcagaccggaagatggatttcgtcggtttcggaacgatgaacggaaaggacggaaagccgtttaagacgagagagggcggcgttatgcgtctggagaacctgatcgcggatatcgatgaggctgcttacaaccgtattatggaaaaccgcactgtctctgaggatgaggcgaagaagacagctgagatcgttggtcttgccgctttaaaatatggggatctctccaaccaggcgacaaaggattatgtcttcgatatcgaccggtttacttctttcgagggaaatacaggtccgtatatcctgtacacgatcgcgcgaatcaattcaatcttaaagaaatatcaggatacctgtgaaaatacagaaaacggcgagatccttccgccgtccgcagagccggagaagaccttaatgctcgcactctccagatacagtgacgtgatgctcacctgttttgaggagcttgcaccgcataagatctgtgcttacatctacgagctctccaacgcattaaaccacttctatcacgagacaaagatcatcgccgaggaagataagaagaaacaggccggatatatcagccttgttacattaacccgcaatgttcttatgacctgcatcaacgtcctgggatttgacgcgccggagagaatgtgatgaaataacctgtcaagcggctgtacagacgggaaagcttgcttgcccggatgtgcagacatttgacgggcaaacatacatgagcaagtaggccgacaggccggattgcgaatgtatgttgagatcgtgggagcgcgaagcgcggagcgatctggtttcgtaggatattttattaaaaaacctgggggacaaatcgatatggaagtaacggagcttaccgccgaaaccttctggaaaggcgaaacagagatcagaggaaccgtcatggacggggaagatgaataccgtgtccgtatcctgcgcaagggtagtcagaattttgactactcttgttcgcgtatcagtaaaacaggaagaaatcttggattttgcggagtctcctgcacacagggaccggacgggatcccgatgtgcccgcatgcccatgccctgctcgcggagtggatccgcagggagagcagagagtcaaaacatccggtctccacttcacagaaggtccgctttatggtccgggaatacacaaaccgtgaggtgagccggatcatgggggcctccgaggaaggacattaccgtctggtcccgatcgtcgcgatctcgcgggaacaggtgaaggtccgcttcacggtgggacgggagaaacagtacccggtgaaggatctgaccgccttcgcgaaagcgatggaaaacatgagtcttgtccagtacggaaaaggactggcttttcaccacagtctccaggcttttgatgaggagagccgtgcgctggcgcttctcatcatggagcgtgtcggatttttccgggaacagtatcgcggaagcggaagattttccatggaggcggagccggcgttaaaggagctgatcctcggaaaagccgggagagagcgcttctttgcgatcatggaaggtcagaccatcgagtgcgaggactaccggaagaaaaaacggatgctcacagtaaaaagggaaaatccggtctttaccgcggtagtgaaaaaagagggaagagacggaattaaagtcaccgtggacaaggatatcatggccttttccggtgaaaaatccctgtttatcgcagatcaggaggcaatctactgctgtgatgcggactacacggagtgcctgaccgtatttatggaatacatggtcatgggactggacgcggagaacgaggtctcggtcaacgaccgggatatgccgctcttttacgagcgtgttctgagaaagctggaatccttcggactgatccgctcagaaggcgtggatcttgagagctaccgcccgaaagagttgaaagcctcgttctattttgacagtgacgctgccgggacggtcaatctgcgcccggagcttgcatatggagatttttccttccatccgttggcagatgagaatgttccgaaagagatctgccgggatgttccgggagagttcaaggtgagccagctgatcactacctactttaaatatacggaggacgcttccggaaaccttgtgatcaaaaatgatgacgaggcagtatatcgtctgatctctgagggaatgaagaagttcatggacacgggtgacgtgttcgtgtccgagtccttcaagaagatccgcgttctcccgccggtgagcacatctgtccaggtgagaacgcttggaagatggctggagcttgaggtggataccggggcacttccgagggaagagctagcggcggtccttgcggcttacgggaagaaaaagagcttctaccggatgaagaacggcgacttcctgacactcggggacggcggacttctcacggtggcaaagatcgcggaacagctgggtgtctcgaaagagctggttggttccgagacgatcaaacttccggcgtaccgcgccatgttcctagatgcggcgttaaaagaggataagagtgtcagcgtctaccgggaccagctgttcaaggcggtggtccgcggcatgaaagacgtggaagacagcgattatgagatcccggagcgcctcgcttcaacgctccgcagttatcagaaagtcggataccggtggttaaagagcctggatgcatatggtttcggtggaattctcgcagatgagatgggtcttggaaagacgatccaggtcatcgcccttctgctcgatgagaaggcgaaaaacggcggagtttctcttgtcgtgtgcccggcatcccttgtatacaactgggaaaatgagtttgcccagtttgcaccggaacttaagatcatgacggcggcgggaaaccaggccgagcgcgaggaaatgttcgcagcttacgagacagaaaagccggatgtgatcatcacctcctacgaccttttaaagagagacattctctggtatcatgaaaaggagttccgctttgagatcatcgatgaggcgcagtatatcaagaattcctccacacaggcggcgaagtctgtaaaggctgttccggcaagaacgcggtttgccctgacgggaacgccgatcgagaaccatctcggagagctgtggagtatctttgatttcctgatgccgggatttttattcacctcgcagaaatttaagcgggcgtttgagatgccgatcgtgagagaccaggatccgaatgccctggcccagttaaagaagctcacaggtccgtttatcctgagaagattaaagaaagacgtcttaaaggagcttccggataagcttgagacggtcctgtattccaacatggaaggcgagcagaaagacctctacacggcggcagccgcatccttaaaggaacagctgatggagggaaccgacggagactacggaaaagagaggatgcagatcctcgcggagctcatgcgtctgcgccagatctgctgtgagccgtccctgtgttttgagggatataaaggcggctctgcgaagcttgacacctgcatggaactgctcttgaacgggacatcggcgggtcataagatcctcttattctcacagttcacgtcgatgctcgagatcatcgcaaagcgtctgaaaaaggagaagatcccgttctacctgctcaccggttcgacaccgaagcgggaccgcatgcagatggcatcttccttccagaaggacgatgtgatggtgttcctgatctccctgaaggcaggcggaacaggattaaacctgactgctgcggatgtggtgatccattacgatccgtggtggaatgtggcggcgcagaaccaggcaacagaccgtgcccacaggatcggtcaggaaaatcaggtctccgtattcaaactcatcacaaaacatacgattgaggagaatatcctgaagcttcaggagatgaagcgggaccttgcggacactgtggtgacggagggaaccggagcactcagcagcatcacaagggaagacctgatccggatgctggacgagaatgtatagctgcttttcggcagcaggatcctgcagcagtgtgcggacaggcagtgcgtgatctgtaacgaaatgccaatgacataag

SEQ ID NO: 2111 - DNA, 2775 bp, Unknown
  gut microbiota DNA sequence
tggatctatgttagcatagagagaggaaaggtgacttttcagcaggtctgcgcatggtaaaatgcgtgaacagcggcatctttgcgaaaatataccggaaaaagaggaaaaagacatgagaaaaatgaacagaattatcccgtttgcacttgcgtgcgcgatcttcgcggcgcagccggtgcaggcggctacgatcatccgtgacagcgataaacagacgaccagccagaatactcagacgacaacagcggggacacaggctggaaacgagggcggtccgggatatgagaacagtacatcaaacaatacaaacagtggaaacacccagagccaggtgagcgcagcggcaaaagcggctgcagatgccatcacaaagccggagatcacatcggaggcgggaatcctctatgatgtgacgaacggaagagttctcttcgagaagaattccgatgagaaactcgccccggccagcaccacaaagctcatgacagcgctccttgtgctggagaaatcgaaactggacgacaaggtgacattttcaaagacggctgtcacaaacctggagtccggtgcggtaaagatcggacttgtggaaggagaccaggtatctgtaaaagactgcctctacggacttctcttaaaatccgccaatgaggttgcaaacggacttgccgagcatgtctccggcagcatttccgcattcgcagatctgatgaacgcgagagcaaaggagcttggctgcacgaatactcattttgtgaacccaaacggtttaaactctgaccagcagtacacgacatgccgtgatatggcaaagatcgcagctgccgcatttgcgaatcagacgctctgccagatcgattccacactgagctacaagttcccggcaacaaaggctgctgccgcgagaacgatcactccgggccacaagatgctctatccgaatgattccagatactatgcaggaatcgtcggcggaaagacgggatatacttccaaggcaggaaatactcttgtgacctgtgttgagaaggacggtgtccgcatggtcgcagtgatcttaaaatccaagagcacccactatgcagatacaaagaaaatgctggactacggatatcagtatgtcaatacagagaaaggcaatacgaccggaaacagcacgacaacgactgcgaagcaggagactgcgggaaagtgggttcaggacaacggaagctggagatatgaattcgctgatggaacaaaggctgtcggaacgatctatacgatcgatgccgctgatttcggcttcgacccggacggaaagatggtgacaggctggaagatgttcggaactgactggtactattttgagtccaacgggacgatggcgaagaatgcctggagacaggattccggcaagtggttctatctcggtgcagacggcaagatcgtgaaaaatacgacgatcgacaacaagtataaagtcggcgcggatggtgcctgggtacagtaaaaaacatgcgctgccgtgtgcagcggcgaatatcacgcataagagaaaacggcagcgatttctgaaaataataaagaataagaggagtgctttatcatgaaagaaagagtaaaagtaatgcaggatatgtacgagaatcgttccaccaacaagaaggcagcaggatgcaccgttatcatcagcggcgagataaaagacgtgatggacaagatcattgcgaaacatccggagtacaagagctatgcgcaggcatttgcaggcgttgttgagcgcgggatccgcgtatttgaggaggaataatccgatttggagaccgcagtgtttctggctgccggcgccatcgcttttggggccggctgcctggcgcgttcccggtatgagcgggactgccttgttacggaagaataccggatcgtctcggaaaagattcacggtccggaaaaaatgatcgtctttctgacagacctccacaataaggagttcggtgatcagaactgccggctgctggatgcggtccggaaggtgaagccggatgccgttttatccggcggggacgggatggttgcaaaaaaaggaaattctgatgtggagattccgagaaagcttctgacggagcttgcaaaagaatttccggtatactgcggaaatggaaaccatgagtgccggatggtctggaagtctgacatttacggtgcagcatatgagaattaccaggctgccctggaaaatgccgggatccgttatctcgcgaacggttctgcggatctcgacggagagatcaggatctatggtctcgatctcccgaagagcgcttacttgccaaggtcgggacagatcccggaaaatctcttgaaggatgccctgggagaaccggatccgggaagattcaatcttcttctcgcacattctcctctgttttttgaggagtatgcggcctggggagcggatcttacgctctccggacattttcacggcggcacgatccggcttccggtcctcggcggagtcatgacccctcagtatcagtttttttatccgcgctgtgcgggtgagtttgaacttcccggaagatggggagagaggagccggatgatcatcggacggggacttggaacccattcgatcaatatccggttaaatgataaaccgcaggtggttgtgatacggctctgcggtttggaagatggaaagagcgaaaaaagctgatttccatgtaccgtaaggaaagagtgtgccatggcacattcttttttgcggttcaaaggcagggaaatcctgtt

SEQ ID NO: 2112 - DNA, 4319 bp, Unknown
  gut microbiota DNA sequence
atggaattatcgtacaaactggaaaagtttgaaggtccgctggatcttcttcttcatctgatcgaaaaaaacaaagtgaatatctatgatatcccgatcaccgagatcacggaccagtacatggagtacgttcggaagatggatgaggaagacctggatgtggtcagcgagttcctggtgatggcagcgacacttctcgatatcaaggcgcggatgctgctgccgaaagaaataaatgaggaaggcgaggaggaagatccgagagcggaacttgtgatgcgcctcctggaatataagaaattccggctgatgtcggaggagctgaaggatctggagaccggggcggaccgtgtgttctacaaagatccgacgatcccgccggaggtgaaggaatacgaggagccggtggatctcgataaactcctggacggtgtgacgctcacaaagcttcagaagatctttgaggcggtcatgaagcggcagcaggacaagattgatccggtccgcagcacgttcggaacgatcaaaaaggagccggtgagcctggaggagaagatcacctcggttctcggctatgcgagaaaacaccggaagttcagtttccgccagatgctggaaaaacagagagataagacggaggtcgtcgtgacgttccttgcactgttggagctcatgaaggtgggaaagatccatctgacgcaggaacatctgtttgacgacatgtacatagaatctctggagccggaaggcggggaacaagatgacaatgaaatcgtcgtcacgactgttcagtaggactgcggaaaagtctgctgccgggatatacgagtgtaaacggtagacaggcgggcgaatgcgctgagcgcaggaaaacatgggatgatacgatcgtggaggaatttgaatgagagtggaaaacctgaaaacacaggagtccgttgtggagtccgtgctgtttaccatggggcagtctgtggagatccgccagcttgcggcggcattggaatcggatgaggagacggccatccaggccgtggagcgcctgaaggaaaaatatgacaagagaaaagctggcatgcagatcgtgcggctggatgacagctaccagatgtgcagccgtgtggattattatgaaaatctgatccgtgtcgcggcaacgccgaaaaagcagatcctgtcggatgtggtgatggagacgttggcgatcatcgcctacaagcagccggtcaccaaggccgatatcgagaagatccgtggggtaaaatcggaccatgcggtcaaccggcttgtggaatacgatctcgtctatgaggcgggccgcctggatgcgccgggccgcccggcactttttgcgacgaccgaggaattcctgcgccgtttcggcgtcggatccacggaacagctcccggagatgaatgtggagcaaagagaagagatccggagtgaggttgaggaagagctgaacctgaggatcgatgaggaaggtcatctgctggatgatgacgaagatccggaagaagatgcagatgagaatgagaacgagaaagagatagaaaacaacgaggcttacggggaggattccatatcatgaaatgcagtgagatcaaagtagtcaaaaaagacgggacgaaagaggagtttaatgtccagaaagtcctggcggcggtaaataagtctgcaaaccgcgcgatgatcaacttctcgaaggccgagagtaagtttatctgtgaatttgtggaagaaaaagcggaggacctggatgaggcggaagtcccgatcgcccagatgcacaacatcgtcgagggcgctttggagcgcgtcaacccggtggtcgcgaagagctaccgcgattaccgcaactataagcaggatttcgtccagatgctcgatgaagtctacaaaaagagccagtccatcatgtacatcggcgacaaggagaacagcaatacggacagtgctctcgtctccacgaagcgcagcctgatcttcaatgagttgaataaatctttataccagaagttctttatgaccgtcgaggagcttcaggcatgccgggacggatatatctatatccacgatatgtcagcgcgacgcgatacgatgaactgctgcctgtttgacgtcaatgaggtcttgagcggcggtttcgagatgggaaatatctggtacaatgagccgaagaccctggatgtcgcatttgacgttatcggcgatatcgttttaagtgcggcgagccagcagtacggcggttttacggttccgagcgtggagaacattctggcgccgtatgccgagaaatcctacggaaagtatatcgaaaaatatatcgacctcggtctcgacgaggagaaagcgaaggagatagcctggaacgacgttcagagagagatggaacagggcttccagggctgggagtacaagttcaactccgtttcctccagccgcggtgactatccgttcatcacgatgacggcaggaaccggaacaagccggttcgcaaagatggcgacgatcacgatgctcaatgtgagaaagaaaggtcagggaaaagaaggccacaagaagccggtcctgttcccgaagcttgtgttcttatatgatgagaaccttcacggaccgggaaaagagcttgaggacgtttttgaggccgggatcgagtgctcttccaggacgatgtatccggactggctctccctgaccggtgaaggttatatcgccggcatgtacaagaaatacgggaagatcatcagcccgatgggctgccgcgcgttcctttctccgtggtatgagcggggcggcatggaaccggctgatgagaatgatgttccggtgtttgtcggccgcttcaacatcggtgttgtgagcctgcatcttccgatgatccttgcaaaggcacgacaggagagcaaggatttctacgaggtcctggattattatctggagctgatccggaagatccatatccggacttacgcgtaccttggagagatgcgcgcgtccacaaacccgttggcgtactgtgagggcggattctacggaggtcatttaggacttcacgataagatcaaaccactccttaagacggcgacggcatccttcgggatcacagcgttcaatgagctgcagagactgtacaacggaaaatccttggtggaagacggggcgtttgcgatcgaggtcttaaagcacatcaatgagaaggtggagcagtttaaacacgaggacggaaacctctatgcgatctacgcgacaccggcggaaaacctctgtggacttcaggtcaagcagttccgaaaaaaatacgggatcgtggagaatgtctccgaccgcgagtatgtcagcaatggcttccactgccatgtgacggaagatatcacgccgatccagaagcagaacctcgaataccggttctgggaactctccaacggcggaaagatccagtacgtgaaatatccgatcgactacaataaagaagcgatccgctccctcgtgcgccgcgcgatgaagatgggattctatgagggcgtgaacctgtcgctgtcctactgcgatgactgcggacacgaggagttaaatatggatgtgtgtccggtctgcggcagcaaaaacctgacaaagatcgaccgtatgaacggatatctgagctattcccgcgtcaagggcgatacgaggctgaatgatgcgaagatggccgagatcgcggagagacgttcgatgtgatgtgcactgcgcgaaaatataaaataaaaaagaggtgatctcatgcgctaccacaacattacaaaagaggacatgttaaacggcgacggcctgcgcaccgtcttatggcttgctggctgcagccatgcctgtccgggctgccagaacccggtgacatgggatgtgaaaggcggactcccgtttgacgaggaggcaaagcaggaacttttcgaggcgctggcgccatcctggatctccggcgtgacattctccggcggtgatccgcttcactggcagaaccggaaagaagtgggaaatctgatcgaagaaatccacgaaaagttcccggaaaagacgatctggctgtatacaggatttctgtgggaagacatccgggatcttccgtttctgaaaaacgtggatgtcctggtggacggaccgttcgtggaagcagaaaaagatgtgaccctgcactggaaaggcagcgcgaaccagagagtcatcgatgtgaaacagacgttaaaaaataaaaatgtagtgctctatcaatcgaaataggacaaacgatcagggacaacacctgattttgccgattcttcgcattccgaatcggcaaaata

SEQ ID NO: 2113 - DNA, 15304 bp, Unknown
  gut microbiota DNA sequence
aagagagaggcagaaggaggcagtgacagctgcgttggcatgtgatacaataagatcatagaaaacatgaagactcatgggacggatagaagagaaaattgcagagaactttcatggaaaggaagaatgtctatgctggcgaaatatgtactctgtattttaacgatcgaatgggcggtactcggaatgcgccttttaaaaggaaaaggacgttcttatgagcggatccggaatgatgacaggatccgggaaaaagaacagtttgtccgttttcaaggaatgaatctcctgtatcttgcactggtcgcattcctgactctgctcacgacatttgcaggttccgaccgcctgacgatccgcttttttgagctcacagcattggctctgtttggacggctgctgtatggaaattggaaatacagcgggaagatctggatccggtggtgacaatataacagaaactatgcatccgaaggaaagctcagtggggagattcctgtaggtgtgagaaggtactgaatagttacaaataaaggaaaaagggatttggcatatcagatgatggccaggtcccttttttgtgtttcaatgaatttgaaagaagctgccagcggcagacctgtaagtggtactgcgacatttaccggatctggatccggatcgtccgctcaaacggatgttccggcgttgtgatggaaaaatgttccggcagaacatgtggggaatccggaacatcctgggcttcgagcgcgatggcgcatgacgggcaggagtgcgtgccgtccgggaatccgatggaatcatcgagaaatccgccggaatagacgacgagtgccggggcatccgtgtaaagcgtgatggagtgtccggaaacaggatcgctcaggatacatgcttttcttacaggctgcggaagcgaccggaaattgcgggaggtctggtcacggctcaggataaatgcatggttgtaaccgcgcgcgatggaaatctgcctgcggcagcgggagcggagcttttcctcgcgcggcagaaaatccagccggctcttaagagaagcagggctggaaaagtcgaatatcgtccttgcgatagggatgatttcgacgggaatatgttcctcgttattcaggcagacattgtttgcgaaaacggtgagtgtctcatcaagcacggaagatgaaaagtcaccggaaagattccagtaggtatgattcgacatattgatataggtcggccggtccgtcgatgcctggtaccggatggtcagccagttgctgtcatcgagcgtatattccgcatgaaacgtgcgatttcccggatatccgtcaacgccgtcggcgagaaatgctgaaaatccgatcgagacagaatcataatcctggcggacgaattctgtgttccagttctgagcggagagattatgcggaccgccatgcagctggttcgcaccttcgtttggagtcagagggatcgtttctcttccgagaaggatggaggagccggagatccttccggcattcggggcaagcgttgctcctgcataacacggacagaggcggtaaaaatcgggattgccggaactcaatgtgatcggaagctcattcccgtctgtttccggatggtcggaccatttcttacctttaaaagcaattttttgaatggatgctccgatcgaaaacagggagagcgagagtcctgaactggttattatgtcgaaaaaatgcgatttttctccggtatcgaatgtgaaaaatttatcacttaactgcatgatacgccatctcctttctgattccagtttaaaatatttgtataaaaaagagaacataaaaaaacgatgagagcaagatttaaaaacaatacagcaaacggtgataatgatgattatcagaaaacaggtataatataaaataaataaagcgaatggcacaataggaattatcttctgaagtgactgccgatacagtacgaaaaaagaaaagactcaaaatgacagtgaaaaagggaggaacgcaatatgagcagtatgttggaatttcagaacatctgtaaatatttccctggtgtaaaagcactggataatatttcgtttaaggcatatgcaggcgaggttctggcattccttggagagaacggagcggggaaatccacacttctgaaagtgctgaatggagattatcagccgacaagcggaaaatatctgctggacggtgtggaaaaacatttccagtccccgcatcaggcgatcgaagaaggaatctccgttatctatcaggaacgtcagattcttctggaactttcggtcgcagagaatatttatctcggaagaatgccggtcaaccgttttggattcatcgatacccagaaagcaaaccagatggcatcaaagatcattgaagattttggtcttccgattcacccgtcgacaaaagtcaaagatctgagtatcgcttaccagcagatggtcgagatcatgaaggcatattcgagagagaatctgaaggtaatctgctttgatgagccgacagcatccctttccgattcagagatcgatgctctgtttaagatcatcgaaaagctgaaagcggaaggcaagatcatcatctatgtatctcaccgaatggaagagatccagaggatcaccgacaaagtggcgatcttcaaggatggtcattatgtgacgacagtaaagaccggtgaggtcccggaatcggagatgatccggatgatggtcggacgtgatctcggagatatctacaaaaatctcgacaggaacaaagagatcggagaggttctcctggaagtaaaaaatgtttcttccgactatgtgaaagagaattccttcgtcctcagaaaaggcgaagtgcttggattttccggacttgtcggtgcaggacggacagaactcatgagagcgatcatcggcgcggatccgatccgcagcggagagatcattctcgagggaaagaaggtccagaaccgatccccgcatgaagcgatggaacacgggatcgttctcgtaccggaggacagaaaacttcagggaattctttcaaaccttgatatcagtgataacatcaatatttccatgctggacaaaaactccaacagtctcggctttgtagatgcaaagaaggaagaaaagatcgcagaagacggcattaaaaatttcaagatcaagacgccttccgcaaagaaaaagatcgtggagctgtcaggaggaaaccagcagaaatgcatcgttgcacgctggatcagcacgaatccgaaggtcctgatcctggatgaaccgacaaaaggaatcgatgtcggcgcaaagtccgagttttaccagatgatctgccagttcgcaaaacagggactcggcgtgatcctgatctcttccgaactgccggaagtcatgggattatccgaccggatcatcgtcatgcgtgcaagacggatcgttggtgagatttcagcagaagatgcaactgagagtacacttctcagcatgggaatgatcggggaggtaaaagaagcatgagtacaaagaaaaaaagtaggatccatattgacggcgacaagcttgttctgatcgcagcgatcattgtagtatttgcattgtttacctgcctgaataaaaacttcctgtccgtcacaaacatgatcaatatcctgatcgcggcatccctcgtcggaatggtcgcagtcggacatacatatctgatcattgccggtcagaatgacctgtctcctggttcacttgcagcgttctcgggagttgtcgcagcacttctcgtatcaaagggaatgccgttcgcggcagcggtgatcgttacgatcgtctgcggggcagccgtaggtttctttaatgcattcatggtcaacaagattcatctggaggcattcatcgcaacactcgtaacacagtcgattgtccgtggatttgcctacatcatctgcggaggaaaaccggtatccatcagcaataagacattccttattctcggaaaagcaaggatcttaaacattccggtctctgtatggatcatgatcatctgtatcgtcgtattcggtatcatccttgcaaagacgaaattcggacgcagcgtatatgcgatcggcggcagcatggatgcagcaagacttgcaggcttaaatccgaaaaagatcatcacaacctgttatgtgatgatgggtatcctctgcgcgatcggcggcatcatcttcgcggcacgtatgaactccggacagccggccgcaaacgtcaacctcgagtttgatgcgatcacagctgttatcctcggcggtgtatccttcgtcggcggtgtcggcaacatgggcggcacgatcctcggtatcatcctgatccagtccttcaacacaggacttacgatggtaaacgttccaagcttctggcagtatgtcgcaaaaggcggacttcttcttttcgctctgacaactgactacatcagaaaacagaagcgagagaaagacctgcttgcagcttccatgaagaacctgtagataccagggaccaaaggccggaaatccggtgcaagcggatttttgatcccaacatcattgtatcaattatgtaaacaaaataaattttataaatggagggttttattatgaaaaagatgaaaagaacagcagcgtttgcagcagccgcattattgacagcaacggcacttgccggatgcagcagctccgacacatccgcaacaacagcagcggcagcagctgataccaccgcagcagcagctgacacggcggcagcagatgcaggatcatcagaaaaaggtgttatttacggtatttacaaagccggcgaccagacctggttcattgatgagggcgcagcagcacagaagaaagtagaggaaaatggagatgaattcattttcgtagatgcaaagatgagcccggaagaatacctgaaagcaatcgataacgcgatcgcaaaccaggcaaagggaatcgtaacctgtatcccggaccagacaatgtcccaggctgccgttgacaagtgtaaagaagcaggtatcccgatcgttgcagccgatgatgcacttcagaacgatgccggtgaaaagatcgctccgtgggtaggaatcaacgcttacgtcatcggacaggcaaacggcgactggcttgcagcatatgcaaaagacaacggtcttgtagaagatgagacaagcggtcttctgatcctgacaatggataccgtttcttcctgcgtaccgcgtgcagaaggtgagtatgataacttcacagcaggctgcccggacttcccgacagaaagaatctttaaagcagactatgacggaacgaccgataaaggaaatacagcggcgacatccgttatcacagcacatccggagatcaagaaatggatggtaacaggtgcaaacgaggaaggtacgatcggtgctgtccgtgcacttgagagtgcaggtcttgatgcagatgcatgcgtagtaggtcttggtgcttacatggcaaaagacgagtggaacaacaaaggcgctgacggtacctgcatgaaggcagcaacatacttctcatctgactccgtaggaaccggttctgttgaggtcctgtatgatgtgatcgccggtaaggacgttccgcaggagacagcagtcgatgcagttgtcgtaacaccggaaaactacaaagaagtgatgggaaaagcggcagaataaaaagagaccgagtcctgtttttgtaaatcttctcataaaaagggctgccggaatgattccggcagcccttttcgcatgatatgatccgatcaggttcgattctggatacaggcgagacggtattcggtcggcgtctgtccggtcacctttttaaaggtggtacagaagctgctctcactgctgaaaccggtctggaagcagacgtccttgatggggatctccgaaaagttcagaagatattttgcattgtttacccgtgtcaggatcacgtattcatgcggcgagaatccagtctcttttttgaaaagacgactgaaataaaaaggacttaaagaagcctgggaagcgagatcgtttaaggacaggatctccgtcagatgattgttgatgtaggtgatcgtgtcctcgatgatgccgccagagacagcctccgggtgttcgtggtcgcggctgacaaaaagttcggtcagcatgttgacaatgtaattgttaaacaatgcctcctttaacgggagatgttcccggaaacggagatagatcttatggagataccgctcaaaccggtaggtgtctttcagactgatgaccggagcggaactgctcatgatcgcctgataaaatgcacgcgccataggaccgtcaaagtggatccattcacattcccagggcgtcgagcttctgtaggcatggggatgataacaatcgagaaatacgatctggccgggaagtgcccggaatacctgatcattcagctcaatgatgcattccccgcgcttgatgtacatgagaagaaaattgtcgaacgcagtgcggcggagactgtaatcatcgctgtaggaaaaatttccgatgatcagcggataaaaaaataaggactgcgcctgggcacttggggtatagacataatagtcggaaccggggagaatccctttttcggtagagatcatggagtgtttccaccttcctttcaaagacggatccggcaggatctgacggctggttacgatgtgcgcatggtgcggaagatgacttccggaacgaaagaaccgggatgcacagtactggtttcgattataaagagaaacaggaaaaaggtcaagaataatgagagcaattttttgaaatcacatggcaactgaaggtaatgaaaaacaggagtaattacagtatagtataagcaagaacaaaaaataagagagttcctgaaacgaagacagggagatgtggttgccgttcaggaagatgaattttctgaactgaaaatttcgtacaatacaggaacgagaatagaaaacagcaggaggtcagaattatgagtggagtgaagatctgggaagaaaatgtggtcattcctacttatgggatcggagcagcggataaaaacccgatgtttttggagagccgtgtttatcagggaagttccggccggatctatccgtacccgacgatcgaaaaaatttatgatgagaaagaagataagacgtaccatgccgtctggctggaaaatgagtatctgaaagtcatgatccttccggagctcggaggcaggatccagagagcgtacgacaagacgaatcattatgactttgtctattacaaccatgtgatcaaaccggctcttgtcggcctctgcggtccgtggatcagcggaggaatcgagttcaactggccgcagcaccaccgcccgacgaccttctcaccggtcgactatcttctgatcgagaatccggacggatcaaagacatgccgtgtcagcgatgtcgatcagatgtatggaacaaaaggcgaggcaagctttacgctctatccgggaaaagcctatatcgagatcaaaggccagctctataaccggacttccacaccgcagaccttcctctggtgggcaaatccggctgttccggtcaatgagcatacacagtcgatcttcccgccggatgtccatgctgtgatggatcatggaaaacgtgacgtttcaagattcccgatcgcaacagggatctattacaaacatgactacagcgaaggcgttgatatttcccgttataaaaacattccggttccgacctcctacatggcggaaaagagtgattttaactttgttggcggatacgattaccagaaacaggcaggaatcctccatgttgccgaccatcatatttcccccggaaagaagcagtggacctggggatgcggcgatttcggaaaggcttgggaccgcaacctgacagatgaggatggcccgtatgtcgagctgatgaccggcgtctatacggataaccagccggatttcacctggttaaaaccgatggaggaaaagcggtttacccagtatttcatgccttataagacgatcggagccgtaaagaatgccagcatcgaggcgatggtaggacttgatgcggatgagagcgagatccgggttgccgcatacacaacgcaggaatatccggatgcccgagtcatccttacatacgagggacaggtccttctggacgaaaagaggatgatctctccggtcgctccgtttgagacgcatctggatcaggttgttgaggacgagacaaaacttacggtctgcgttctcgacggaacgagagagatgatctcctacacaccggcgaaaaaagagatcccgaaggttccggatccggcggaggcagcgaaagatccggaggagatcatgtcaaacgaagagctgttcctgacaggacttcacattgagcagtaccgccatgcgacataccgcccggatccatactatctggaaggtctgaaacgcgacccgggcgatatccggatcaacaatgcatacggttcgctcctgatgagaagaggctgttttcaggctgctgaggcacatttccggacagcgatcaaacgtgcgacctggaaaaatccgaacccgtatgattccgagccgtactacaaccttggattatccctgttttatcaggaacgctatgacgaagcgtttgatgcattctataaggcgacctggtccaatgagcagcaggagatgagcttctattatctggcgtgcatcgaggcgatgagaggaaactttgagagtgcactggaactcgcggaaaaaggccttgtgaagaatacgcacaatatcaaggcgagaggactccgggcataccttctcggcagactcggaagaacggaagaagcgaaagcggcagtcagcgagaaccttgcgattgacccgtttgattatgtctccatgctggaatccgcatatctggatccagaccatgcagaagagatccgcgcgaaggtcaataagctctccagaaacttccatgagacgtatctgatggcggcgagagactttgcggagtacggggcatacgacaaggcggttgatacactccgcgaatgcagtgagagctggccgatgttaaagtactatgaagcatatgatctcggaaagatgggagcttcccatgaggagatcctgaaagtgctcaaagaggcagaaaactgcagtacggattactgcttcccgaataagctggaggacatccttgttctgatcgatgcgcagaaacaagatccggacggggcaaatgcattctattaccttggaaacctctggtatgacaagctgcagtacgatcaggcgatcagctgctgggagactgcggcggagaagaagccgggatttgcgatcacatggagaaatctctccctggcatattacaacaagagaaaagatccggaaaaggcaaaggcagcgttggaaaaggcagcagaacttgcaccgaacgatgcgagaatcttcctggagcttgaccagctgtaccggaaactggaaatgccggtcgctgagcgactttcccgctatgaaaaggcaaaagagatctttatgcagcgggatgatctgatgatcgaatatgtcacgctcttaaatctctccggccattataaagaggcatatgactttatcatggcgcaccggttccatccgtgggaaggcggagaaggaaaggttacgacccagtatacgacctctctcctggagctcggaaaagcggaaatcgcaaaagagcactggagcgaggcaaaagagatccttgagaaggcgctggtatatccggagaacctcggggaaggaaagctggaaggaacgaaggacaaccacatccattattatctcggacttgcaaaagagcatctcggggagaacgaggcggcgaaggaagagtatgaggcagcttcgatcggaacggatgaaccggcaggaatgatgtactacaatgaccagccggccgacatgatctactatcagggacttgcaaaagagaaacttggtctgccggtggaggcaaaatcgagatattaccgtctgctcgactacggagagcgccatctgtatgacaagatgcgcgttgagtactttgcagtttccctcccggatttcatgatctttgatgatgacctggataagagaaacaagacgcactgctattatctgatgggactcggatatctgggactcggagataaggaaaaggcagcagaggcattccggaacgcgatgcagcttgatccgacgcatttgaacgcagggcgttatctgaagatggcggaggaataggggacggaaaaactcttcccgcaggcataaccgaaaaaagaagagacatggattttgtacaattcatgcctcttcttttttgcaatttaggaagctgcctgcttcgattgcgaaaagcaatcagcaggcagtcaaatcggatcgcagatatccattgatgaattacatggttgcctcgttcttttccgcttcctgctccctcgcattcatgatcagcatctgaagccggttctcgatgtttgcgaagctgacatccggatcgtagtcgagcggaaggatctggacgtctgggtagagctcctttaagcgcttggagattccgcggccgacgacgtggtttggcagacagccgaacggctgcaggatcacaaaggcacggcagccgtgggcggcatggtgcaggatctctcccgggatcaggacgccctctccggcatcgaacgtatggtggatgatcggatcactttcctttacgagctccggaaggcgcaccgccgggcggtcgtagagcgggtgagcactcgcgatcttgtccgccgcatcgtgggcgagatcaaagaagagatccgccatccggtaccagagcttttcctggagcggcttatgtaaatgatactcatggacctgcatatcacgatagaagtaggatttctggatgacatcggacattctcgcctcgatgatctcgaagccgttctgctctaaaaacgcctcgatgtcatggtttgcacccgggtggaagtttaagaggtactccccgacgatcaggacagtcggtctcggatgagaacggtcgtacggaacttgtttcatgatcccgatcgcctttgcgaagccgtgttttgcgccgtttacgccatgcctggaaagtccgtcgatcacagcgtccatcgcctgctcaaaggcggcatcggcacttccttttgtgagctcataaggacggatcttccggagcagctcctccaaaatatcgatcatcggaagcgcgtaggcgatccggagtgcggagaggagacttaagcggaatcccggatggaggttatggaaatctgcatcatcgtttgtgaggatcggaacatcggaaaatcctgcgtcatcgagcgcctttcttaaaagtgcactgtaatgcgtcagacggcagtcgccgatatattttccggttgcgatcgcgacctcttttccatcgtattttccactctttaaagcggcgagcgcttcaccgatcacgatctgggcagggaagcagatgtcattgtggacatattttttgccgagacggatcgcctcgtcccgcccgatcggcagcggctccgcgcggagcccctgtttttccatcgctgccgacatgacgcggcagaacgcgtgggaggtattcgggatcaaaacgatgcgctcttttctgtctttcttctcgtactttaccgggtacggatccgtgagggcatggaccggagcttcctcgtgcttttctctctgcatccggactgtctcgataaaggaccggacacggatccggagcggtccctggatctcactctcgtcgagctttaagacgagcgggatcttcccggatacctgtttcatgaggcggatgatctcatcggagaggtaggcgtcatggccgcagccgaagcttacgatctggacatattccaggtgtggattttcagcggcaatgacagcggatccgagcattctcgcatggtagttgttgacgacatcgagacggctgttggtgagatccacgtcgttgacgcccggaacggcatctgcggtgaggaccgggatgccgagactcatgaacatctccggaaggttgtggttgaccagcggatcattctgatacggtctcgaggcgaggatcacggcgtagcggttctcctccgtgacctgttttaagatccgttcgccttctgctaagagctcctggtggaaggaatcctccgccatgtcggcatagcggattgcctctttgatctcggattccggaacctgataagtctcatggatatattttgtgagctgctcattccggtcttctttcgtgtaccaatggaacagcggattgtcaaacgggatcccgaatacatgctccggattgtcggagtttttgatgacaagcggatatccctttacgatcgcgcacatccattcactcgtcttttccttgttttccgactggacggaggtgatggacggcatgaagatccggtccacatgcatcttcgcgagactgcggatatgtccgtggacgagcttcgccgggaagcagaccgtatcggaggcaaccgcggaaagtcccgattcgtagagcatatggctgctcggggcggacacacggacggtaaagccgagagaacggaaaaatgtagaccagaacggcatgttctcccagaaggagaggacacgcgggatcccaatcacaagattcctggaggttatgttttctgggaccgggtaatctttccacagcagggattcccggagcttgtagcagttcgggactttgtcacgcttttccatgcgctcgtgctgaagtttctgaacagccggatctttcgggtctccgaggacttctccgcgctcacagcggttgttggtgacccaggactcgccgttcgggaagcggacgatcatccgtttgcagtggttcgtgcagaacgggcacggggcgttcgcctcctgggtgtaggaaaaggaatccatcgcgtcaagtccgatgaaagtccgctttttcgttccatccgccatcgcctcttttgtgaggatcgcggcgccgatcgcacccatcatgcccggatacggggcgcggacgatggtctttccggtgtactgctcaaatgcgcgcagaacggcgtcattccggaaggttccgccctggaccatgatgtgatccccgagagagtcgaggtttgagatccggatgacctttgtgaagacattctcgatgatagaacggcagaggccggccatgatatcttccggctttttcccgtttctctgctcggtgacgatgctgctgttcatgaagacggtacagcggctgccgaggatcgccggatttttcgaggaaaaggcggcgtctgcgatctccgtcaccgggatctttaacgtggaagcgaagttttccaggaaggaaccgcagccggaggaacatgcctcattgacgagaatgttcgtgatgatgccgtggtcgagccagatggccttcatgtcctgtccgccgatatcgaggagaaacgtgatgtccggcatgtactggaacgcggctctcgcatgggcaaccgtctcgacaacatggtattcggtggaaaatgccctggagaataaaagttcgccgtatccggtggagccacagcccaggatttccagcgttacgcccgcatcgcggtaacggttacgcatggtgatcagggcattttttgcgacggtcagcggatcgccctggttggaggcgtagaagaagtcgagaagctttccgtcatcgcccatcaggacaaattttgtcgtggtactgccggagtcgatgccgagccatgcgcggacggtcgttccgggtatgagtgctgccggagtgaagtctcccttcgggtgttcttttaagaaggtgtcatattcctctttggaggagaagaaaagcggagccgcatgttcctgaccggaatgctgctttttcttcgcgtcctcctggacctgttccaggcgggagacccactcggtgagcggaaggaaggtgaccggagcgtccgaggcttccggatctgcctctttgaacatgccgtttaaggagagggctgcaccgtaggcgaccatgatctccgggtgttccgggacgaggcgctcgttttctttcaggttcagacgttccgaaaagacatcgatcagcttcgggttgaaggtcagcggaccgccttcaaagacgactggaggtttgatatcgagtccctgtgccagtccgccgatcgtctgtttggcgatcgcgtggaaggaggagagggcgatatctgcctttgcgactccctggtttaagagcggctggatatcggtttttgcgtagacgccgcagcgcccggagatatcgtagacgcaggttcccttgcaggcaagttcgttcattttttccggcggggtctggagaatggaagcaacttcgtcgatgaaggcgccggttcctccggcacagcttccgttcatgcgcatgtcggcgacgtttaacgcgccggtttttgaattcgtcttgaagaagatgatctttgcatcctggccgccgagttcgatggcggtgccgacggtctcatatgtcttctttaaagcgatggagtttgcgacaacttcctggatataaggggtatcggctgcctccgcgaccggttttgccccggagccggtgagtatgatcctggcttccgtgtcaggaaatttttctgccgcctgccggatcgcgaagaggacgcttgcaagctggtcagcgtggtggcggcggtagtcagagtataagagtgattcggtcgtcttgtcgaggaccgtgatttttgtagtggtggaaccgacatcgattccgatgagtaattgtttcatatatttgatctttcgtgatagtgatttatcgggtctgcaccgacagaaagaaaaagggcataaacccgtttcgtacctggatttacgccgatttctacacgatgctggtgatattttagcgctggattttttaaaagtcaaggaaataggtgcgggtgaggtgttaaaaacgtgttaagaagtgcttggcttcgggcggggccggtgagtttccgctcaggagtgcaaggtgatcgcgggaaggttcctctaggcttgcaggagactgctaagggcgaatgccaggtgacacaactcgctgcgctcaaacaagtgtcacctggcattcaacgcattctcccgcgagccaagaggaagccagatccctcgatcaaggcactcctgatcggaagctcaccggctgcgggcgcattgactgcaggttaaggtg

SEQ ID NO: 2114 - DNA, 1441 bp, Unknown
  gut microbiota DNA sequence
cttagattctgtggatggtagaagggataaactggacgcagaaaatatcatggacgaagagataccagggagcgcagaaaagacctcttcaaagcgattctatgcagtgaagcgtggacgaaaaaaatccgagcgcgatgactcggatcttctggaactttgggcggagaattcgtctgcggacgcgctgcttctgaatcttgaacaattccttatgttagaaaggaggtgcttctgatgcttcaatattttccaacgccttacccggacgaactttggtacagtgtcttagggagatatcatgtcaggtccggcaatccgaacagcgcaacgacactcagggaactatttggagcggagagcgtcggaggaatgggaaacttcctgccaaactgcgggatccgacgagtggctgagaaactgccggagggagtcttagatgagagagatattgccttgcatcacacactgtttccgtataccttccgtttccaggacttagcaacgaaagaaagactactggaacaggcgttaagcgaaaaagtgaaatttccaatcaagctgccgaagccatacacatccacggtactgaaatactgtccgctctgcatgagagaggacagggagcgctatggagaggcttactggcatgttacccatcagatcccttatgtgaccatatgcacgaaacacaggtgcagactaaggatgaaggctgacatgaaaaaatggacactcaacgataatctgttccttccgatggatgaagaggagatagaggcagacttagacattacggagacagaagcagaactctccagtattcttgtaaagtatcaggaacttccaatagagaaaggtcccacggaaacccacaataacctttacgagggattattgaactccgactatgggatcgcccggaaggacaagaacttttccattgattacaagagcgtggagacggatctcctggaacgcttcggaaaggacttcatagaggaacattttggaacgtccgtcatgcgggccgcaatcttcggaaatgttcggaactggaactataagcttccagaaagatatgcgatcctgtccacgctgatccatcaggacccagagattactttttcggaagagcgcttagaaaataagacggtcagcctgtttctgcggatgagtaaagagccaatgacccgatcaaaaaagtatgttgcgagatccctgggagtgaaggaaaagcacttggatatcctggcacacaatctgaacgtggtcccattctgggagcagaagccagacgcagagagagcgaaggagtacagaggttatgtatgttttacggaggatgaatgggcgtatgttcaagactcggtttcgaaatatgggtttcaaagttcgtctgcgttcatccggttctgcgtgggacagtatcgggacaggg

SEQ ID NO: 2115 - DNA, 361 bp, Unknown
  gut microbiota DNA sequence
gccagaacgatattaacgaaagtctgtaaaaatagacttttccaaatatcattctggctgtgttttgttttttggcagagtgaatgcctgactgtagccattatcttcattggctccgctagagataaaaaaccacgcaagcacaaggtattggtttaaacctcttacgattgcacggttttaattatcgtaacggagccaataaggtagaagttccggaaaccgcgtacagaaacgcagaaacattggaatttgctttgtgagcgagcatagcgtcagaccggagactcttgtttgagcacgcagcgcgtgcgagtttgggtcgcaggtctgacaataggcggcgcagtgaacaaagcgc

SEQ ID NO: 2116 - DNA, 1716 bp, Unknown
  gut microbiota DNA sequence
aaattgacattatatacaaaatattttattctttttataaagtttttacactttttccaccaagataagcggggtataaacggtggaagctgatttttttactgtgagcagtttctaaaaatacagaaactgaaagatctcagcaacacaaaacgtaaaaacgactgtaactgattcaagacagttaccaaaaaaggattggaggattttttatggaaagtatcatcagctacttcggcacatatacacctgctgccgacggcgcaattgcatctttcaagtttgagtacttatgtactctcggttttgcagcgatcgtaattttccttggacgtgccatcgtcgcacattccgcggcattaagaaaatacgcgattcctgctccggtcgtttccggtatcatcttttcacttctgatttccgcgatcaagatgaccggcacagtcagtatcagttttgacgcaaaggtcatgaaagacctctgtcagaacctcttcttcctctgcgtaggctttggcttcagcgcaaagatgttaagacatgcaggcggaaagctctgcgtcatgatcgcatttgctgcctgcctcctgatcacctgtcaggatatcattggtgtagcgatcgcacatgtgatcaacttaaacccactcctcgctctccagtgttcttccgcagcgatgtccggcggtgtcggtaccgcatctgcctttggtccgatcttcgagggctggggtgctgaggatgctaccacgatcggtgttgcggcaggtactcttggtaacgttatgggctccctcatcggtggtccggttgcagctttcttaattgcaaagcatggcttaaaggctgatccgaatgataagccggaagcaaaggtaaccggtaaagtgccggagctcgacaacacaaagatgatcatgatgttcgcaatgtgcttacttctcgcagctctcggtatgccgatctactgcttacttgacaacatcccgatgatcgagatgccgaaattcatcggctgcctcttcgcaggtgcgatcgcaagaaacatcatggaagctgcaaacatcaagttctatacaccggaagttgatgcgatcgagcatatgttccttgagctctaccttgcacttgtacttatgacaacagacttcacaaagcttgctccggttgcaggtcagatgggtatcatcctccttgcacaggcaatcttcatcgctctgtttggtatcttcgtatccttcaatctcttcggtcgtgactacggcgcagctgttatgacagccggcaacatcggttggggctgcggttccggtccgaatgccgttgcgaacgagaaagccgttatggatcagtacggatggcacaacatcgcatgggttctttacccgtccttcgcggttatcatcgatgatatctacaacccgatcttcctttccatctttggtggattattcaaaggctgatcggaaacataaggttttcacgaattatacagaacctcccttaaaaatccctcaggagagctccccactctcccgggggatttttttacgacttatttcttactgtcaagtctttccccgttaagtatctgttcatatttattgtttctctgtatctgttttcgtaagttttttactgtaattttataactttagttacttttgtcggttaatagtttcaaaaaattgaaaatatttttataatattttatac

SEQ ID NO: 2117 - DNA, 1119 bp, Unknown
  gut microbiota DNA sequence
ccctcgcggcacatggaaggttctccttaatgctgctgcattcctgccctgacatggttcagagagtcccattgcgcgagaccaaaacgtcagcgccgcttaccaggggcagcttcacaaggaagtacccgcggcagaacatcacccctgctgtagcggattgcaggtacagggcaccgctatctccccggctgtgcggaccagttaagtatacatggacgggggcattttgtcaagttgcgaaatcccccggtgacagtgaactatctgcaaatttcttccctgatttcactaaatcgtattcatctgcttatttgaacagcggcatttttgtgatcgggaatgtctggttctctaacggtgcatgccagatcccgtaccagatatcttccaggttatcgccgtcggctgccagaaatccgtaaacttcactgtcgtactccgggatttccaccggaccgtacagcagcctgctgccgtattccttataaagatccgcagccatctcatttaactggtcatccgccagatatgcatccttgaaagcacctttttccttatcttccctgaacactttgcagacttcttccggaacttccgtcacatccccataagtgtcagagtaaaggtacatcgggttcttttccttcgtgtatgctttcggtgccaccacgcagccatccgcatctccgacaacctccgtgtaatcatcgccctgggttacgatcggtcccgcttcctccagcgtgtaggctgcagccggctccagcgtcgcagggtcatcggaactattgatattaaatgaaatgtatccgaaggaaccatgcaaagagattttgtctttgctcacatagtcaagttccacgacatccccataggactgctttttcgcggtttcaaggtccaaaacagccgcttttgtttcttcgtcaggagaaccgattttcccggtcagaaagatcttcgttggtccgtctgctccgccgatgattccgatagatgctgcctcctttttatctctattctggatataacacactgcggcacctcccgcaagcaccagaattcctgcagccgccaggatcttctttttatttttcatactttttctccgtttct

SEQ ID NO: 2118 - DNA, 2964 bp, Unknown
  gut microbiota DNA sequence
ctttttattctaaggttctccgtcggaactccttcagatactcctccagcgacacatactgtccattattcacccggtaagacggattccacatcctcacgacacggacagccgcctcgtctttctttgcctcttttatcggacggtattcccggtctgcaaaaaagacatctccctggatcagatccttccatttcatatagatctcacggttctttttctgctttttattctggaaaacttccatcacgatcaggcggaagagatcctctccgcagcagactaccgtctttggattcaggagccggatctgttttttgataaattccatataatactggccataatccatgctgacctcatcagccgcgccctttccgccgcgcttattgagatagagtaccgccgccttctcgcggagctttttcccggtaagtctgcactcttcccccggatgacgttcctcccagaggaccttctgcatgccagtgagatactccagatattccacccggccagacggactctttccggagagaaagtcgccccggatatccgagaccaccggcatcgtctcgcctttctggatcgttttccgcatgttcgtctcttttaatatataaagggtcccgtcatagtgcaccggatccacgattccgtcaatatgaaaatttctctgatccagttccggataacaggtctttccgtccggatcttcctccatctgctgcatcagctcccacagcacataaagttcctccagggagcggcattttgcgacctgaccttccaggatgatctgctccatcgtctttttcatggttcctccaacgatccgttctgcccggtgcgccttcgctccggcttcctttttcccggaaacacaggccttccagaggcatccgcttatttttcttttgtgcattgcactcactgatcttcattttatcataattttcttcaaaaaaatagtggaaattccactccggattcgctataataatgaaaatgttatcgttcctgcattgcatggacgataacagattttgccgatgcttcgcattccgaatcggcaaaattcactccccctactataactgtacggaattttcagttcagaaaattcctacccagcatggtaatgcaaaacacttggaaggagattacaaacatcatgagacacatgttaaatcctcttgacttttctcttgaggagacggacaatctcttagagcttgccgccgacattgagaaagaccgttcccgatacgcacacgtgtgtgacggaaagaaattagcaacccttttctatgagccaagcacaagaacccgtttaagttttgaagcggccatgttaaacctcggaggttccgttctcggttttgcttccgccgattccagttccgcgaccaagggtgaaagtgtttccgatacaattcgtgttatttcctgttacgcagatatctgcgcaatgagacatccaaaagaaggcgcagcctatgttgcctccaccaaatcttcgattcctgttatcaatgccggagacggcggtcatcagcatcccacacagactttaactgatttatatacgatccgttccttaaagggcagactttccaatatgacagtcggactctgcggagatttaaaatttggccgcacggtccactctctgatcaatgcactctcccgctatgaggggatccgctttatcctgatctccccgccggaattaaaggtaccggattatatcaaggagagtgtccttgatgccaaaaatatcgagtaccgtgagacaaccagtcttgatgacgcaatggaagaactggatatcctctacatgacaagagtccagaaggaacgtttcttcaacgaggaagactacatccgcatgaaggactgctacattctcgacaaagaaaagatgaaactcgcaaaaccggatatgtacgttctgcatccgctcccgcgtgtcaatgagatttccgtcgaagtcgatgatgatccgcgtgccgcatactttaaacaggtccagaacggcgtatatgtccgtatggctctcattatgacattactggaggtagaaaaaccatgttaaatatcagcggaatccgggaaggtgttgtccttgaccatatccaggcaggaaaaagtatggatatctaccgctacctgcgtttaggcgagctggactgcaccgtcgcgattatcaagaacgcgaggagcaacaagatgggccggaaagacatcatcaagatcgagggaccgctcgacgccatcgacctcgatgttctcggctacatcgaccacaacatcaccgtcaacatcatccgcgatgacaagatcgccgaaaagcgcaccctgcatctcccgaagatcttaaagaacgtgatccactgcaaaaacccgcgctgcatcacctcgatcgagcaggagcttccgcatatcttctatctcgatgataaagatcatgaagtgtaccgatgcagatattgcgatgaaaagcatggctgatcggtgagatctggctgactgttgttgatcagacgatctggcttaattttagagaccgcagcaatccaggtatcgattgctgcggtctttcttgttgtctgcttttcttgacaaatacacgtatacctatcatataatttatttttgtgttatatttaaattttcatcccagaatattggtcatgagaacatgagaactttacctacacctttccatatttttgcgcctttcttctcagacgcttcatggcggattttcacccggaagaagaacccggacaaaattagatcgatttttgcacaataagtaaaaaagaatgtgccttggctcattctcgcgcctcgcgcggtcgcttgcgacagtctacatcttcgcgcgagtgtgcatctttggcacgtcagtgtctttttatgtaacaggaaattccgagaaagtacaaaaaaacatcc

SEQ ID NO: 2119 - DNA, 1327 bp, Unknown
  gut microbiota DNA sequence
ccctacgaaactccgcaaaaatccaccaaaactaaggctttcggcttcttgacaatcccaattctacacgctataatacagtgaatgtaaagatagaaattataaagggtcattctgccccgaaacaataagaaaggtaagacgtcatggctgataagaaacatattttaacttatgcaggactgaaaaaatacgaggatgaacttcaggatctgaaagtaaaccgccgtcgtgagattgcccagaagatcaaagaggcaagagaacagggtgacttatccgagaacgctgagtacgatgctgcgaaagatgagcagagagatattgagttaagaatcgaagagctcgaaaaactgttaaagaacgcagaggttgtcgttgaggacgaggtaaaccttgataagatcaatgttggatgtatcgtaaaagtttacgatgttgatttcgatgaggagatggaattcaagctcgttggttccacagaggcaaacagccttgagaacaagatctccaatgagtccccggtcggacacgcactgatcggaaaacgcgttggtgacgttgttgacgtcgagacacagtccggaatcattcagtacaaggtacttgatattaagagagtagactaaaggagaaaagaaaagtggctgaacagcagaatcagaacaagaatgcaaatgcaaaagagcaggatatccatcagctcttaaaggtgcgccgcgaaaagcttgctgaattacaggcagagggcaaggacccattccagatcacaaagtatgatcaggatactcacagcgcagatatcaaagacaattacgcagaatatgacggaaaggaagtttccatcgccggacgtatcatgtccaagcgtgtgatgggtaaagcttctttctgcaacgtccaggacctcaagggcaacatccagtgctatgtatcccgtgatgagctcggtgacgattcctacaaagacttcaagaagatggatatcggcgatatcgtcggcatcaaaggctttgtattcacaacaaagatgggcgagatctctgttcatgcccattccgtaactctgctctccaagagcttacagatccttccggagaaatatcatggtctgacaaacacagatacccgttaccgtcagagatatgtggacctgatcatgaacgaggacgtaaagaagacattcgttatgcgttccaagatcatcagctgcatccgcagatatttagataacctcggattcctcgaggttgagactccgatgctcgttgcaaatgccggcggtgctgctgcaagaccgttcgagactcactacaatgcacttgac

SEQ ID NO: 2120 - DNA, 578 bp, Unknown
  gut microbiota DNA sequence
gaaaaggcaaagcccctgctcatggtcaccgttcacaccgaacgcagttcctgcccctgttttgcagcggcgttgtccggctcgcccacagaaagtgtgaggtcatggcacagtatctcgttcagacggcttatgaaggattcaaggtacagtatgaagaaagccggacgcagtgcggacactacaacctgcttctttcaagcacaagaataacactttgcggttgtgcggtcaacaactaaaaacaaattttggaagattgaacaactacataagattttatttgtaaaaaagaaaaataccgcccacgcagcgcagcgatgattttgtcgggtgaatcggcggcaaaatgaatcgggtgtgttgcggggcggtaaaaatcttcacggagaataaatcctcgccactctgtatttttctacaaatttggtgggatttgcgataaagggtatcatggattgcggagcgcgtcaagatggttttgcaaattttattgcagtaaagcagtgatagtaggacttatgaagctgattgaatacttcttttatggcattgcgcggtgttgcctttggattctt

SEQ ID NO: 2121 - DNA, 1563 bp, Unknown
  gut microbiota DNA sequence
gtaacggtttgcatctccctcgatgttcttctttgtattgaatgcgtaaacactgtttaaatcactgactccggtaaacggtcccactttgttttccgtaccgcggatcgtatcacagcgatacatattgttgcctttcagcagaccctcatcattgtatccgatgaaaccgccgctgagtccgtcgtttccggcaccatcttctgtatttccggcaccgccgccatacacgtcatatccatcccggatcccgtataccgcacagtcctggatcttggtccggtttgccttgatcagcgcaatgttgatgttctgggtactgtcatccccactgattccttcatccgtacatggaagttcaatggtggaatctccgatcgtaatgatcgccaggtctgtcttctgtttattttcgtctgtctttttggaaagaccgacagaaatatcgagtcccaaaagattgacatgaagcagacttccatcatacagcgcctgaaccgtaatgattccaagatcgatattgagtagctgcaaattctgaagtttatccagatacaatgctttgatcagggtattcaatagtttcagaacaacattgagcgctgtggaatctaactgaacgtcagccaggtatttaaagcttgtccggccggcaaatcctccggcaatctgtccgcttgcgacctgttttaatccataggattccgtatccggatctccagccgtactgtcgatgaccttcgcaaggtttgcatagccgataaatcctccggcgattggttcctcgccgtttctgctcagtaccgtataaccttccggaatgcctgttacgctgctcttttcaatgtgggagccaaacacatccaggactcctaaagaaccgccaagaagctgcgttacactgcttcccagtacattaaatttgtcagctccaacaacaccgctctttccgctgtatccgacaaagcctccggcactgttcatggccgtgacacttcttagtccggtaacactgctgttttttacagagccattcatcaggcttccgccaaaacctccggcatttccgctataagtaacttcatcgttctgtccggatttcaccgctgtatttgcagaaaccgtcagacctgcatctttgcttccactgacaattccgtcataaacgtaggtccggaatgcgtccagaacattgacacttccaatttgaagaacctgtcctaaaagatccgtttctccattctttgaaatatccgcaaccgcagagacatcggcaataccaaagcatcctccggcatattccccgcctgttacggtacggattccttccgcatggattccggcttcttccgtattcttttcgccaagcacagctcccgagatacttccggcaaatcctccggctgctttcgcataagaggtgtttgcttttgtctgatccagatagataccgtttacgataattccccagtcatcccaggattccacatccgcataacggatcgtcgatactgttgcgcttaatacctgtaccagattagccggagcatttaagagatgcag

SEQ ID NO: 2122 - DNA, 2164 bp, Unknown
  gut microbiota DNA sequence
tgactggttgccgtatccagtgcaaccgcacttcccggatctacctttccggcaaagcctccgatgtaggacgttccgtccacttccctcagcttgctgatcctgcaggaagtttccgcatcgccccagatctgaccgccgatcatccgtccaacgtagcctccggcataaccggccggatcgttttcactgactccggtggattttacaacagctccggactgatatcctgccacatcagactgcttgatgaccggtacgaatgtctgcaatgctgacagactttccgttccgaccagttcaatctttccaagatcgataccgcttgtattggctacggatccggtgatcatctcacccgcaaaacctccggcactccggaaggcttccgtatccatgaggtccatcgcatgggcacttgtgatcgtgccgccttccatacgtcctacataacctccggcaactccgccttcgtccactgcggcagacgcttcgtttcttccagctgttactgtataaccatatgcgtatttacggatatatccgtctaatgtttcctgatcctgcaccggaccaagttcatgcatctcatttccgtagcttccgtaagaaccaacatgagttacccagctgttccaggtatccacatcgagtccacgaagcggtccgtaaacggctgtatgttcttctgtcggataaaccgcctgaaggacacttaatggattgtttaacttgatgactccatatagaacgcttaagcttcctgtatctgccacgttcgcacaccgcatgagtccggtataaccgccaccgtattccgtaccgtaaacggaacggatccggacagcagcacagtctctctgggttccggtgtattctgtccctcgccattttttcccgttttctccggaaatctgaccgccgtagttgtatcctgcatagccacctgcaagaccgcgaagaattccatcgtttccttttgcatctgctcttacaacaccgccacatgggatacaggtcgtttcgctgttgcgtacagccggaacaaaggactgtaaaacggtcagtacatcactgctgacatttaccaatcctccaagaagacttgctccgccaaccacgttggctgcgcttcccggttccatggttcctgcatatcctccggcgctttcccgtccgatgatgtggtagaagttgtacgagttgctgtcctggatctgtgttccaagcagatgtccagcatatcctccggcttttccgacagttcccgtctgggtccgagtatccgaagccaaaacattaaagcctccggttgctccgtatacatccgaatgctcaatgatcgatgtgatcacactgagcgcggatgcaatgttggaaaggttcagcactttctttaatacattgataccgccaacggatgccgtacttcccatatccgcttttccgatatatccgcccgcattgcggtaaccatatacggaatacgcactggctgcatcaaaatagccacttccgtccgttgtctgaagatccttcggttcgtaaacccttgtattcttcagtttattgacatccgatgaacggatctgtacgcctttgccgcatccgataaatcctccggcgcttccggcatcagtatcattcgtatcatcgttttgcaaggttcctgtcaccgtaaccgtgaatccacttgatcgaacacttgcatgttcgatcactgggacaaatgcatttaagagtgttaaaagtcctgtgatatctgccacttttccaagcagggaagcgttgtctgcaacttccgccacagatccggcctttaccagtccgccaaatcctccggcatagcgaagaccgcttacttctcttaagttttctaccgcagttcctttttctccatcagcggcattcgcctgattattgatatcaccgctctgcatctctccgatgtagccgccggcatatccttctgcgtccgtttctgaatttccggttcttaccgcctgtttgacaatcagtccatcttccgatccggaaactttggaatttatgatttttccggaagccgcctgcagaacacctgcaacgtcattcagatcgagaatcttaccaagcacgctgtttaatagtgctccggtatcatctcccgcatccacggcacttc

SEQ ID NO: 2123 - DNA, 3290 bp, Unknown
  gut microbiota DNA sequence
aaccgtgcggattacatcctcctcaaatccgctcggtccaaacgcatcacagatctccccaaacatttttacattcatactgattcctcctgtatttttattttaattcttaccttttccattggcagactccaccggcttgctttttcaggatccagattatttttcctgtatctccgatggagcaacgcccacaatttttttaaatgtgttagaaaaatacgcaatatctttatatccgactttttctgccacctcgtacaccttgttccggtgatccaaaagcaattccactgcctttttcatccgataccgcgtgagccatcccatcaccgtatatcccgtctctttcttgaagcagtggctcaggtggccttcgctgatccccaccgcacctgcgatcttcgccacattgatcgtactttccccgtaatgagatgccatgtaaagcaccgcatcccggacgtatccggtaagtcccgcggtattctcatcgaatggaagacagagccggatcgccgtggcactggtctccggtccctcaccttccaaagtgtccggatattgctcctttaccggtgtcttatccggaacagatctgctcagaccggtacctcttctcttctcccgatccgtctcgatccgctcttttgccctgaggatcgcgctttccagctccccgtcctcaaaaggctttaacagataatcaaatgcgtaaagcttcaacgcctctctggcgtaggaaaactcactgtacgcggtcagaaagatcacctgtaccggatttttctcttcccgaagcttctttaacatctcaagaccgttcatcttaggcatccggatatcacagatcatcagctccggattcttttcatggaccagctccagcgcgtccaacccgttttccgcctcaccgacgacctcgcatcccagtgaggtccagtccgtctcaccgacaattcccatccggacgaaccgctcgtcatctacaacgatcacctttatcacaacagctcccccccttccttttttcctttccccattgatcatcaggatctgttttccgtaccgagatccggctgtccatagccattcaccggtattcttatcgttacccttgttcctcctgcagccagccgctctgccctgagaccgtagtcttttccataatgaagccggatgatcgtatccacattgtaaaaaccgatgtggccattcttctgttccttgtcccggtttccgagccgtcggatcacttcatcactgatcccgcatccgtcatctgaaacctcgatcacaagctccttcctttccagatacgccctgacaaaaatatgcccctcatccgcatccgccagcccatgaatcaccgcattctccacgatgggctgaacgatgagctttggaaccaggatctcctccgtctcaggatcgatctcatagtggaaatcaaactttccgttaaaccggatcttctggatctttgcatagctttccaccaatgtcatctcttcccgcagcgtgataaactgggcgcttgagatgctggtccttaagatcttcgcaagctttgccgccagcgtcgcgatctccggaatatggttcgccttcgctacccacttcatcgtatcaagggtattgtagagaaaatgcgggtttaactgggactgcatcatggcgatctgggtctcgttcagctccttttcacgccgcacacgctcctccatgtaggatgagatcctctttgtcatgatattaaaattttccgccagctccccaaactcgtcctgacgttccatgtccacatgggtatccagatttccctcctgaacctcatccatggcatcatgaagcacatggatcggcttggagagaaaggagctgatcccgatcgcgacaccaacacttaaaagaaagcttcccgtggccatgaaaagaagaactgtatacatggatctcgtggtatcactcgtaaaaacatggggacggatcaggacactgtaaagtcctgtgttacccagctttgaaacgtaaatactattgttgttccaaacctccgtcagagattctccctgtagaaaacggcttctcagaacatctccgaccgtctcccccgatgccgtgcctacgctgtacacggtctccaggaaaccattgagaatacagattccatcctgaccgctgtatgtgccggagagcgcctttgcgaaatgttccgccgtcattgtggacacaaaatatccggaacattcctctgaatttccagtcaccgctctggcaaacctcaggacctcatcaccattagcctccagatcactccgaatgatcaggtcattcggatgggcatgtgcctctctcaggatcccccagtataccggcagcgtctgtccgtaagtacggtttcccgtagagtacaggcaggagccgtccgcattgtagagatgaaatcccgccatctcacggcatgcagcggtcgctccgtacagacttcggtacacttcattcttctttccaaagctctccttttccagcgcctcggcaaccagcggatccgtacacagtttcttcgccgcgtcatgataagcatcgaacagcgtcatcagctgctgttctaccgcaccggcaagctccatattttttttttcaaaatctcttccgaccttcaccttaaacatctggatcagaaacacgcagcacacgatcaatggaagaacagacaccgcgagaaaactcacaagaagctcacgccggaaggatctctggataaagttcttcatgatccacctccgtttcctgccatgagcgccgcccatctttccaaaatggatttctggttttttactgcccatccaagatcgaagtccatgatcgagccctcttccttctgatccggggtaatatcatcgcggaccgtccgtctgtaaagcttttcgacagccagtctctggacatcaggactcacgataaaatccacaaaaagcttcgcgttttcttcatgctccgcacccctgatcaccgcgcatccgtctgccaccgcgctggttccctcccgcggatagacgatcgagatcgccgcgccgcggtcgatatactttttcgcagtttcctccaaagtcagaccaaccagatatgttccctctgacacctcatcgagcacggcacctgaccccgccgccatccggcggccgagcactctggcaaactgttccagaacctcgttttcacgcatcggcaggacctggatcatcgtctccagcatcgtgcagctgctgccggatcttcccggatcc

SEQ ID NO: 2124 - DNA, 686 bp, Unknown
  gut microbiota DNA sequence
gttttgttttgcacagatatacatccgaaatgtgatttccttcccggaatgtttcaataaatctcataatttctccttttctgatcggtcatacttctcacacaatcgctgagccaggtatgtttacctggctccgatcgttacctgatactctatttctttatattcatcaatagacttccgttttactgtaactttcacggtatccccggtctttgtctcctccagccggttctggaagtcccggatcgtctggatctccagatcatcaaactttgtcaggatatccccgttctggattcccacattataagccggcccatctgcaatggaatctgtaatatacacaccgctcgggatcccgctctccatcatcgcggaggtcacatcctggccgcggattccaaaatacggagcggactgtccgtttgtgagtttctggagcacgcccttgtactccgagatcggcattgccatcgtcctatcttccgcctgtgtgttgtccccggcctgataaatggacgtcgcccaacccacaagctgaccggaaagatttataaggaatgttccctcatccgcatgactctcaaattctgtatacaggatacgggtctgaccgtccactgcctggacacctttcgccacataagagatcagtccctgtttgacggaatggacatgtccag

SEQ ID NO: 2125 - DNA, 1106 bp, Unknown
  gut microbiota DNA sequence
ccagatcgagagcccggcagagctcatccatgtccggataaaagtcccgcagctgggtgttcaggtaactcaagagcatcacgggatcttttggaatatttgccatctgactcttctccttcctttactttctgattcctcctgtgttatactataacccatatgtgagatgattgcaaacgaaaggggatttttaaatcatgaaacaccttctgctgctcggaacagggggaacgattgcctgcaagagaggagaaaacggtctgacaccgcttcttaccggcgacgaactgttatcttatgtaccggatgcaaaaaaattctgtgaggtggagaccatccaggtcttaaacatagacagcacaaacatgcacccgaaacactggctgaaacttgctcaggtcctggaagaaaactacgacaattacgacggctttgtgatctgccatggaacggacacgatggcctacacagccgccgccatgtcctacctcgtccagcactccagcaagccgatcgtcatcacaggcgcccagaagccgatcgaccttgacgtgactgacgcgaggaccaaccttctcgacagcctgcgatttgccgcttccgaccgtgctcacggcgttacgatcgtatttgacggaaaagtgatcgccggaacccgcggaaagaaagagcgcagcaagagctacaacgcgttctccagcatcaatttcccgtatctcgccgtgatccaggacgagcacattttatactatatcgacgataaatggcaggaccgcgagagcgtccgcttctaccacgagatggacagccaggtcagcctcttaaagctgatcccgtccatggactccagcctgctcgactatatggcggaacattacgacgcagtcgtcatcgaatccttcggtgtcggcggacttccgtcctatgaatccggcgatttctatagctccatcgaaaaatggatctccatgggaaaagtcgttgtcatgaccacccaggtcacccaggaaggcagcaacatgtctgtctacgaagtcggccagaagatcaaaaacgccttcggtctcatcgaatcctacgatatgaccctggaggccaccgtg

SEQ ID NO: 2126 - DNA, 1238 bp, Unknown
  gut microbiota DNA sequence
aggggaagagtggctggagcagctgaaggactatctggatggaaacttcgcgtatatcgatgaatatttaaagaaatatcttccgaaggctcatctcgtcaaggcggagggaacctacctcgcgtggcttgatctcaacggatacgttgaccgggatgagaaaaaactggaagaactgatgcagaagaaagcaaaggtcgctctggatgagggatatatcttcggtgaggagggacgcggatttgagcgcatcaacgtcgcttccccgcgtagcgtcatcgaggagtgtatgaaccggatccggacggcatttgaagaggaaaaactggtatgaaaattcaggtaaaaatgacagcgagagatatttttgatttctccatgtacagcgcgtattcgggatttgccgggatctttacattcgtgttcctgatcctggtcatcgggattctcggatacgcatggagctcagtggcagtgatgcagagagtcatgcttttgggctgtatcatcctttttgtgtttgtccagccgatcatgatctggatgaaggcaaaggcgcatgcgaaaacgaccggatactcaacgccgatcaatcttgacgtttcggatgagcagatcggggtcgaacaggccggtgtgaccggagagttgaagtgggatcagatctggaaagtcattcggatcccgaatatgtatatcatcaaggtcggaccgacaaacggatatcttgtgccattccggtccattgaagggagaaagcaggagtttgttgatttctgcaagcggaatcttccgccgaagaagacgaaaggattaaaggcatgataaaggaaacaaatgcaccggaggagaccttcgcctttggaaaaatgcttggggaacaggcaaagccgggcgaagtgatctgcctgaacggcgatcttggcgtcgggaaaacagtttttacgaagggctttgctgagggactcggaatcacggagccggtaaacagccctaccttcacgatcgtccagcagtatgacagcgggagaatgccgctgtaccatttcgatgtgtaccggatcggtgatatcagcgagatggatgaagtcggatacgaagactgcttctacggggaaggcgtgacgctcatcgagtggtccaacatgatcgaggagatcctgccggaacatgtgaggaccgtcacgatcgaaaagaacctggagaaaggttttgattacagaaagatcacggtggag

SEQ ID NO: 2127 - DNA, 4307 bp, Unknown
  gut microbiota DNA sequence
gctaatttttaaaccgttctactgttttgttaggttttgttctgaatgttctcattcatggtctaaaccaaagaccatttttataagaattttcagggttttacatactgttcagttttcaaggaactgttttttgttgtttctgtgtttcagaagcaactcattcattctatcataccgtttccggtttgtcaagaactttttaaaacttttttcgaagcaattaagaagttttcttaatgactcttaataagttttgccctgtcgctcaaggcgagtattataataacaaatctgtgccgaaaagtcaactgttttttctatttttttcgaagttttttcttttgcatgtgcatttacaacataatggggtacatccgcatttccaacgcaagatataccccatttctgtattgtcttattcgtatttatctcagttaaaaactgtatctccatcgagacacttttatagactctcgccgcctaaaagggagtggcggcttatctgaccaggtgatccatttcccgattaccgtctctttctattacaaaacgcttctcaccagtccgaccacaagataggaaagcatgttatggtcatacagccatgtcagccagatacttccgttgatctggtcgatcatgctctttccgatcggactgccggaaaacagggtgaggaccaggcatcctatccacacaaagatcagcgcctccgtgagtcccaggactgcccctgcgatcttattgagtccatatatgatcggcaggcgggagagcaggttcagccatacgataactatgtgaagagacgcatagaataccgtaaacaataccgtaaatatgatcacacggatcacacggtccgccagatattttccgacatagtcctcaaagatctgtactcccatctcctgatatacttcgccgttgttgttctcgatcagaagctttttgacctggtccggtatttccagactttcgataactgcgcgttcccccgcttttccggcgagaccggccgtctgggccatctcatccatcttttcatcaaggccactggccttcagtgcactctccttcatcgtttcatagagtgccgtattgtgctccagccacgcagctgtctgcgggatcgcaacgcgcaccgcgaacagcgtgataaaaagtgacatcacggagactgctattcttataaatcctctataatgaccgtacaacatcatcccgatgagatatgccgcaacagccacctccagccaatggctggataacatttccaatatttccatcattactcaattcctgtaaaatggcagatcgctttcgcgactcccgcctcattgttcgtctttgtgatataatctgctgccgcctttacggattcttcgccgttttccatggcaacaccgatccccgccatgcggatcatggacaggtcattctccccgtctccaaagctcatggtagcctcccggtcgattccaaggcgtgctgcaagacggatcagtgctccgcctttatcggcgccttccgcgttgatctcgaggttatttggaatcgatgaagagacaaggatccccgggatctttgaaagttcctcacgcatcctctttctggcatccatatcgcaaaagaacatgttgatcttatccgcgtcctgtccgcgttctttcaaatatgcaatgttgtccggaaccgaatccctggttctccgcacgagctccgccaggccttccgatgatacatatttatatatatcattataaaattccggcatcgtatatccgatcccgccaatgtatacatcatacatgatctcatccgggctcgtccgcgccatcatcatgatcttttccgccagcgccaccgggatccggcaggagtcgataatctcattttttgcgagatctaccacctgtgccccgtttgtgaggatcgcataatgtacacccggcagattccggagttcatccggcagtccgcgcattgtgcggccggttgccgggacgatctcgatcccacgcgccgcacattcccggaaaacgcgcagattttcttccgggatcttcttttcatcgtcaagcagcgttccatccatatccgccgcgatcagtctgatctccataatattctcctgtcatcatagtctgcccacaagatatctttttaagctcctcccgccgccgtcattttccggcaggtgatcttcttatccggcagttctcatgggcagtaatcgtattcctctcagcaaacataagttcgtatctgttggtgaaaaatttgcgcaccatcccactgcaaacgcaatgatcacatggtgcgcatattcatttttcagcctttcagccttcgcatctgtactttttatcgttcagtcgaagaagtctttttcatgaaggatcagaagaccttcttttgtataagtcggggagaaaagtcctgcgatcttctttccgagagactttttctctgccttatcagcagcttcctcgatcaggtcgacggccgctgcctttgtcaggcggacttcatcctcttccatcatctcgatgcgctcatacagggcaagaagactctttcctgtgatgctgcagtcgatctctgatgcatatttgcaagcatactgggcgaattcgtccggatccatctcttccttatcgtcatagtcttccggaacaacctcctctgcagcttcctctttcagcggagtcttcggtttttctctgtctgcagccggcttcttcggagcttctttggactttccaaatattcctgtcttctttggcgggatatattcctcttcctccagttcctcttccggctcttcttcctcgtaagcgtctgtttccggttcttctgtttcttcagccgccggcagctccggttcttcctccggctccgcctgtgtttccggttccggtgtcagagtgtaagcttcctcttcctccggttcctgttccatctcctgctccgcacttaccacatcgcgggcgatctgttcttgtttttctgtggaacgtttcagagcagcttccatttctgcttccgcttttttctgttcagccgcttcctcatcgcttccaatgtactggaatttacttgcgagagaggtattgtgggcatggagtgcctcaaggttctccggggtatcgatcaggacaacgatcatgccggagcggtctttttccatcaggtcatccagttcattctggacagcatcggtaagacctgccgcatgctggatgatcagatctttccctgcgagcatgtcagcaactgcgctgatcccgcgcttatttaatttctcactgctgatctttgccaccggattcttgatgccgagctcacggtggatctcctttaaggagctgacagccatggaaagtccttcctcgtccgtctccgcctcgatcatcaggttgttggtatcgagcatatcatccagggattccagttccagatcttcctcgttgtcatcctcttccggagccggaatattgcggacctggtttctgcgtgcgcgctctctgtcgatctccgcctgttttttcgcacggcgttcttcttcctcgcgtctcgcagcttcccgctcttcctccgcacggcggagagcttcctcttccatctcttcccgctcttttgcggcgcggatcgccagtttctggcgctcgatctcacgctcttcctctgtcgggatcgtgtgctccggttcttccgttccctgcgcatcttccgcagcttcctgtcttccccggcggatcgcactgagatctgcaatggttcttgtcgcgtccatatcgttgtcttcctcgacaacagccgtccgtccctcttcctcggaaagtctggacatctcgtctgccagcttctttgtctgggcatcctcatggatctgcagggcaacctctcttgagacatccgtgtctggagtttcctcctcgtagtcatcctgttccggggcatttccgctgtattcttcctcgacagcgcgcagttttgcctcgtatttctccctgttctccacaaggtccatctgatatttgttcagtggtgcatactgaagtttcagatccatcgccttgtccacatatttgccgaggccgaataagagcatgatgcggtcacatgtggcaacacacttgtcctcgatccctgctttgtggtagagctctgccagctcatacagccatttctcatccacctcggatgaagtatacacttccaacgcacggatcagctgatccaccggcgcctttttcgcctttaagatcttgtagcggagcaggtactggcgcggatca

SEQ ID NO: 2128 - DNA, 4440 bp, Unknown
  gut microbiota DNA sequence
aaggcgagatccgccagtttatagagcaggcgcttaccgaccggtgcgcgctcgaaagccaggagcagaatatccttcgcctcctggtactcctcatttttctcatagatctgagcgatcatggacaacaggctcgcgttgcggacacggtgccagtcgatggtatccgcgatcttcatcgcagttccgtaatctccgcggctgaccatctttttgatctgctcgactttaatattaaactcgtatttatccatttctttcgcatctcctgaaaccggaacagccatctgctgccggttttataattccacccggccttccaacgcccggagaagtgtgacttcatcaatatattccagatctccgccgaccggaacaccgctggcgatcctcgtcaccttgatccctgtcggcttgatcagtttgcttatgtacattgccgtcgtctcgccctcaagacttgagtttgtggcgataatgacttccttcacttcttccgtctgaagacgcgtcatcagctcttttaatttgatatctcccggtccgatcccaagcatcggggagatcgcgccgtggagcacatggtacaccccgtcgaattttcccgttttttcgtatgccgccagatcacgcggattctccacgaccatgatcacgctgtggtctctggtctggctccggcagatcgggcagagttcctggtccgtcagggtgaagcactccttgcagtaatgaacattgtgtttcgcatcccggatcgagttcgagagccgttccacctgttcctccggcatgttgatgatgtggaatgccagacgctgggccgtcttgtttccgattcccggaagtttcgacagctcctctatcaattttgatatctgactgctgtagtaatccataatttagaaggaaagtcctcccaggtttccgaggccgcctgtaagctcggacatcactgcgctggactcagcctccatctggtggaacgcctcatttgtcgcagcaacgataagatcctcgagcatctcaacgtcatccggatctactgcctccggggagatctttacagcgacaacttccttcttgccggatacggtaacggatacagctccaccgcctgctgttgctgtgtactgcttctcttcaagctcttttgtcttctcttccatctggcgctgcattctctgcgcctgtttcatgagatttgtcatattgccgggcataccgcccggaaaaccgccacgtcttgccatggtgtatttcctcctgatattcttagttttttataaatgatgttcaggctcaaaaaagctttttgagtccttccgtcaacgctgaccggacattgcccatataggtatgaccggttcacaggtttcaagttgaatctgtgtttattattaatcgcagcttttatcactgcggctaatcttcgattgtaatatccatatggatgttttctctcagctcatcatcgctgatatagcgggtatccatccgttccccgttttcccgcacgcgggatttaaaatacagggattttccgtatttctgctccacatacctttccagatccccgaggacgctcggacgacttccgatggcaaaattcatcggatcattgaacacgatgcagagacagctgtcgcccgccggttccactacggtctcccggaaactcgggcgtatggacatacccatgtcgcggacgatcttgccccactcattccggatcatgttgaggtcctccagctgggctttcggcagtgatacagtcctcggctcataagcctggccggaagccgggggattctgcattcccgccggattctgcgctggctgacctgccggtcccgcgccatttcccggtgctccggcaccgtcgtaagcaggctgtgcatacatctgcggtgaaatctgcgcggctcccatcatcggagcatcagcgatcccggcattctgcgcgggaacatagccgcctgcgggcatcgcagggatcccttcctccaccatgcgctccagcttttccaggcgctccaggatggaatccatgttctgctccatctccggcttggtgagcttgatgaatgcaagctcgatgagcacgcgtttctggtttgcgaaacggatctggttggagagctccgagaacacgcggatatatctcatcagagtattctcgtccacaagcgccgcgtcttcccgcatctgtgccagattgtcctccgacatatccagaaggtcttccgcatcatccgccgtctttaacaggagcagatttcggagaaaccagatgaaatccacgacaaactgggaaagttcccggccctggactaccatctcctcaagcttcaggatacagtccttcgtccggttctcccggatcgcatggaacagatcccggaatacgctgttgtcgacagcgccgaggacatccagcacatgttcatacgtgagcgtctcgccgaagtggaacgccgcgcactggtccaggagacttagagcgtctcgcatggaaccgtctccggcttttgccacatagcggagcgctttttcctccaccggcatattttccgcttccgtaagttcttttaaccgtgccgtgatcgtgtccagcgtaatgcgccggaaatcataccgctggcatctggaaagcaccgtgatcgggatcttgtggacctctgtggtcgccaggataaagatcacataggacggcggctcctccagtgtctttaacagggcgttgaacgcgcctgttgagagcatatgaacctcatcgatgatgtatacgcgatattttccctccgtcggcgggtactggacctgctcacggatctcacggatgttctcaacgccattgttggacgcagcatcgatctccaccacgtttaacgaggttccggccgcgatctgcctgcagctcgggcattcgccgcagggacttccgtccaccggatgttcacagtttaccgccctggccaggatcttcgccaccgttgtcttaccggttcctcgggttccgcagaacagatacgcgtgcccgatcctgccggaaccgatctgattctgtaaagttttaacgatatggtcctggccttttacatccgcaaagacctgcggacgccatttcctgtataacgcttgatatgacatgttctatcagtctccgaaactgattccgataagcttcgcttcttttacaatatcggactgcggatccacatatttcagtttgccggcagattctgccagcgggatatccgtgatcacattgttttttacaacgaccagcttgccgaattcattatttttgatcatgtcggcggcatgagcgccgatccttgtggagagaacgcggtcatacgggaccggagtgccgccgcgctgcatatggcccggaacggtcacacggatctcctggcccgtcatctcctgaatcttcgcgccgatctcatacgcaacggactggtatttcgttgcgcgttcctccagatactttttatactctttcttggaaagagccgcctgttcttttgagatcgcaccctcagccaccgcaaggatcgagaaacggcttccgttcttcgtccgctctttgatcttctttacgactttatttaagtcatacgggatctccgggatcaggatgatatccgctccgccggcgatgcctgcatgaagtgtgagccagccgactttatgtcccatgacttccacgatgaagacacgtccgtgggaggacgcggtcgtgtggatacaatcgatcgcattcgtcgcgatatccacagcgctctggaatccgaacgtcatatccgttccccagagatcgttatcgatagtcttcggaagtccgatcacattgagtccttcctggcttaagaggtttgccgttttctggcttccgtttccgcccaggaccacaagtgcatccagcttcaatttatagtaggtgtgcttcatgagctccaccttgtcgagtccgttctcgtccggcacacgcatcagcttgaacggctgtctggaggtaccgagcatcgttccgccttttgtgaggacacctgaaaaatctgactgtttcatcatcaggtagtttgcgtacatcagacctttatagccgtcttcaaatccgataatttccacttcatctttgtaaatctggtacagacctttcgcgactccgcgcatcgttgcgtttaacgcctggcagtcgccgccgctcgtaaggaatccaactctcttcatcgtcttgtcctttctccgatttctttcagtcgaaatgtgaatgcatgtatccaagataagattataatacaaagaaaagagacgggcaagaaaaacttgtctcctctctcttttctaggcatattagttactgtacacggtaggaattttctgaactgaaaattccgtacaatacagttgtggcagcagattttgccg

SEQ ID NO: 2129 - DNA, 7186 bp, Unknown
  gut microbiota DNA sequence
ctacttttcttatcttttcccttcggtatccatgtctccacggatggtatggacgatacagatagcggatagcgttccctcctttcaggattttttagggttcgttttcacagtttcacggtttcctatgtaatttttcaatatgcattcttattatatcttttttcccgcattttctcaactgaaaaatggcccgcaggatcatactgcggtatttcacattcctgcacacgggcgggcattttccggccggaaaatgccgcatgataccgtcgcattggttcccgacatgccggtccggaatgcagagcatcggcagaaacatgttgcagcacacgggcatgggacgctcgtgtactgcaacggtttcgcgttccctcttagtctgcccgggttgtctcccgcgcgctgctctccgctcccgccgcggtggtccccgacatgccggtcacatcgtccgtcaggttattgatgccgtctcccacatcatctaccatgtccctcaggactcctccgctctcgccggccgtctgggacggggcgttcgtactctggttcgtgccatcggtccggctctccatggtcgttcccgctccggcgcttcccgtatccggagccgtggtcatattatttccgttctttcttccgcatgctgtcatgacggtcacggtcatcacaagaagcacacatactctgatccatctgatttttcccataaaaaataatctcctttctacggctattatgtaccatagaaaggagaagtattttggaaaaaaacggatattaaccgatcacgtcggacatatcataaagtcctgccggttctcctgcaaggaatttcgcagcctccacagcgcccttcgcgaagatctctcgggagtaagcggtgtgtgtgaaggtgatgacttcatcgcggcctgcgaacatgatatcatgctcgccgacgatggtaccgccgcgcatagcctggatcccgatctccttcggatctcttgcgacacgctcggaggaacggtcatatttatagtggtaggtattgtcaagactctcattgatagcgtctgcaagagcgatggctgttccgctcggcgcgtcgatcttacggttgtggtgcttctccaggatctcgatatcaaatcctgctgccgcaaggaccggggcaacctcttttaatgtcttcatgagaagattgatcccgatggacatatttgcagagcgaaggactgcgtccactttgctcgcctcttttacatggtttaactgatcctcagaaagtcctgtggtacataaaacgaccggaaccttcttctcctcacagtaatccaggagtccgtcaaccgctttcgcggtggagaagtcgatgatgacatcggcctccgggcactcagcgagagatttgaataccggatatcctgcgtaagtttctgtgttcatatccacgcctgcgacgatctcgatcgcgtcatcctttgagataatatccgtgatcacatgtcccatcacaccgtggcatccattcataattgctctgatcattgttttctcctcatctgaaaccgaccggcagtgcgccgccatactgcagttccgccgcggcttttttcctatcgtttcctacaggataccgaaatcctgcattgccttctttaatacttcctggtgctgcggctccatcactgtaagcggaagtctcggctcgccgacattcttacccattaagtttaacgctgcctttaccgggatcgggtttacctcagagaacagagcttcgatcagcggaagagcctttaactggattcgtctgctggcttccacattgcctttgaagaattctgcacacatatcgtgggtctgcttcggagcaacgttggagagaacggagatcacgccctttgcgccgagtgccagcatcggaacgacctggtcatcatttccggaatatacatccacatatccgccggagagctggaggatcttcgcaactgcggagaagtttccgctcgcttccttgactccgacgatattctcgacattcttgcagagatcaacgatggtctccggagcgatgttgacgccggtacggctcggtacgttatagaggatcgccgggatcttgatggagtttgcgatctttgtgaaatgtgcctttaagccattctgtgtcgctttattgtagtacggggagactaacaggacaccgtccgcaccagcttcctcagcctcaacggaaagttcaaccgctgtctgcgtacaattggatcctgttccggcaacgaccggaatccttccgtttacgacttcgcatacgaaacggatcacctggatgtgctcctcctcggatgttgtcgcggactcgcctgtggttcccatcgctacgatacaatcagttccgcctgcgatctgttcctcgatcaggctttcaagtacctcataatttactgatccattttccttaaatggcgttacaagtgctacgccggctccttcaaaaatagccatactgcgtcctcctctttattatgtaaaatatcatgtcaaaagaaaaggagctgagatcaaataagatgtcagctcccggatcttccagattaagcagccctccatctttttctaaagatgacagtcatacgattcttcaccgcatgcccagaaacgggaaccctagggacttattttcctgtctcttcggcgccctccccttttctccgacagccatttccctttatctgccggtctactcatgtcaggcgcgacctctacttatcatttatggtatcatcattcctgatgattgtcaatgtctatgttttctgcctgtgaaatccgtaaattctttcctgtggaaactacggaaatttcattcacatacttctcgattccctccggacacacccgtccggtcatgatcagatcggtctcctcatctcttgcctcaaggaaactccggaattcttcggctgagatgatcccctggtccacgatcccaaggatctcatccaggatcagaacgtcacactcccccgttgtcattacctttttcgcgaaattgaagccatttcgcaggttcatcaattcctcgtgcttctgctcttccggaaggtcctcaaaccgttcctttgaatgttcgaagcagaaaaatttcagatccggctccagacgttttaaaacgtccgccgcttcctctccgatcattcctttcaggaactgtaccataatgaccctttttccgcggaaaactcccatcattgcgtatccaagcgccgatgcggactttccgttacccgctccgcagatcacacggactctgccacttgccatgatcattccctctctttgtgtataccattcgctgaagcttttcaagacttctgttatgctatattatcacaccttacttccgtttgcaagagatttgcctgtatgccggcgggatccggacggcagtatgctgcagtacaccggcactccacccgtgcactgcagcaggatcttctacacttctgcgtgttccgcgcattccagtttgctcacggatacctcgtacgccacgcgtttctcgcactctgtctcactgaccttttttgtgtactccctgctctggacacgcccccagatcaggatccttgttccgacgccgaatccggatgcatatctcgcgttcctgccccaggcgatgcacgggatatagtcagattttccgtatggccggttcactgccacgagaagatccgcgatctctcttccgagcggggtcttccggtagaccggctccttgcatatgtacccgtccaggaagatctggttcgtcttcgtataatccgtgaactcctccatgaaacggacttctctgacaaacacagacaggaccagacggttttttgtcccctcatggcggttgtaggagcggaactgtccggaagcttccattgtacagccccggtaatctttcgtcacatcgatcagacgttctgatatcataagcgggatcgtgtccgcctgctcactcaaacgatttacgagaagatccaccagatagaatccttccccgaacactgcatgactgaatgtgaatcctgaaacgatcgttccgattacggttactttgttgttctccattcctttttctgtcatagtattttctcctttttgattgttttttccgctatacagcttttaccgtatatttgtatgtaatcagaacgtatttcagaaccgttttgtgtccgttttttccctgtttttgtcgacaatactccttttgtttttctagtttctgacaggaacccccatttttaccatatgcaggcagaattattacttttcgtggataagaattttccgagctgaaaatcccggacaatgcagttacgacagcagattttccctggaactcttcacgggacctcttcatttttgcctgtacttgttatttttttctgttcatgttaatattttataaagatcgtcgtaactgttcagtaccctcaccgttacgggcaaaaatccattccggatcggctccgccgatgggatttctgccttccactctatgaatatatgaaaggacaacagccctgggatccccgggctgttgtgaaaaggaaaagacttttatgatccacctgcttctcttcggacgacaggtctatttgaaatattctgcggacgaaatgtccgtatatgccgcacaggcatcatttttcatcatcatggcggcattcccgtttttcatggtcctcctggccctgatccaggtcgctcctatgatccacgaagcggaccttctccgctttctgctcccggcgatcccggaccgctttcgcggactcttgatctaccttctggacagtctgcgctccgactccccggcagccctgatctccgtgactgcgctggccgccatctggtccgcatcaaaggggatgctcgggatcgaaaagggcttaaaccgggtattcggagtcacgtccccgcggaattatattctccgcagggcactctgcagcgtttacacgctctgtttttccctgatgtgcgtggcaagtctcgcgctcctcgtcttcggaagcttccttcagggaatgctcttaaaatggatcccggccctggcgtacctctcgggaacgatctccctgtgccgcggtcttgtcatgtttttcatgctgacgatcttttttattgcgctttacactgcgcttccgcaccgcaggctttcaatccccggacagatccccggtgcaatgttctccgccgcaggctgggcgctcacttccctggcattctctgtctacttccggtatttcggctcatacgctgtcacctacggaagtctgaccgccgtgatcctttttatgctgtggctctatgcctccatctgcatcctgtttgtgggggccgagatcaactggttcctgctgttttacagggaagggatccaaatttcacagaagaaaactgcctcggatcctactacaaagatttgagtttcagaccggccggtctccggagcaattcttaaaatccgtagatcctctttgcattctcgtaaaagactttctcccactttttctccgggatcagccattttacgaccccgatgtaatctccgtaattagctaacggccagtcagttccaaacatgaacttctcatactggctgcaataggagatccaggtcttcagcgtgtcaaaatatcctctctgctgctctaaaagctttggaaaatcgatctttccctccagaagtccggagagatccgtcatcacattctcatttttctccactacagccgccgcatccatgagccacggatttccgaaatggcacatcacgaacgtcacatccggatggcggactgctgcctcatccagggtcagcgggtggctgtactttaagtaagcgcgggaaccggccgtctgccccatgtggatcgcaaccggcttattatatgcctttgcaagctcatagaccggctcatacacttcatccgtcacatacgctttattgtagccgggatacagtttgatcccgacgcagtcctcccgctttaagtttgcctccacctggtccaggctcctctttttatcctgactcaccagaaaatcccggtcgagtccgacacagtattttaagaaatccgggtaggaatgtgccgccgggtcaacgccgcggtttcccataacgacaccgccgacgatcccgtatttctgatagactgctcttaaatcttcttctgtgtttttatgttccgcccgcaccgcgatctcctgaaaataaggattctccggcacaaagtgaagatgtgcatcaataattttcatattctcactccttatgtctttccctgtactgttttgccgcatttgctgctttccggtctttatatacagcaaaaacctctgtttccagaggttttgccggttgcttttcacggtcaggaatcttccggaccgaaaattctgcatgacacagttgtggtcccgggatcagaaatatttcttgctgccccagagattacatcttttcagatccagatattcgtggtaggctttctccaggatctgcttctcatttgagaatttcagaaggtggtacgcctcataatatttataatatccggagtctacgaagtactcttcgcgctgtggtttactgtaataactgtccgccatcatcagataccagtggacttccttgtcgacggtatcctgcggcgtgttaaatgaatactggctctttccgatgtacttgatgatctgggcctgaaccccggtctcctctttcacctctctgagagccgtttctttaaactcttctcctgcttccacagttcctttcggcaaaacccatccttcatacttatttctgtagttcttatagaggaccaggatcttgccccgaaatataaccacaccgccacagctcgttgcttctatcatcgcaatttcctcctgacaggcattcaagggactccgctaaaagcagattccgcaggtgtgtttttaactgtgtttagtatacttctttttatccgtgtttgcaaccacgttttctctgaccctgacaccaggaggcatgtgccaaggtacattcgggcgtctcgcgcggtcgcctgcgacaaccttcctcttcgcgcgagtgtgcatcttggggatgcggtgcctttttgtttaacaagaaaac

SEQ ID NO: 2130 - DNA, 18827 bp, Unknown
  gut microbiota DNA sequence
ccgtgaccattttcaggtcgcctgttgttttcttttatgaacgatatccgttcgggtttttggactgccagttccatgcatcacggcacatatcatcgagtgttctctttgcttcccagccgagctccactttcgcctttgtcgcatcggaatagcaggtcgcgatatctcccgcgcggcgcggcttgatcacatacgggatctcttttccgaccgcctttgaaaatgcgtggatcacatcgagaacactgtatccgtgaccggttccgagattatagatatataccgccggcttgtcctcaaatttctttaatgcctttacatgaccttccgcaagatccatcacatggatataatcgcggacgcccgttccgtccggagtatcgtagtcgtttccgaatacaccgacctcttttaactttccgatcgcaacctgagtgatgtacggtgtcaggttgttcgggattccctccggatcctcgccgatcaggccgctctcatgagctccaaccgggttgaagtagcggagcaggatcacattccactccggatctgccttctgcatatcggtaaggatctgctccagcatgctcttcgtctgtccatacgggtttgtgcactgtcccttcgggcactcctcggtgatcgggacgaacgccgggtctccgtatacggtagcggaggagctgaagataatcttcttcacgccatgctttctcatcacgtcgagaagaatcagcgtaccggtgatattgttgtggtaatattcccacggttttgccacggactcgccgactgcctttaatccagcgaaatggatcactgcgtcgatcttctccgcgtcaaagatcttttccatcgcatcacggtccagcatatccgccttgtagaatgtgatatcctttcctgtgagctgttttactcttttcaatgactcttccgacgcattgtagagattatcaaaaactacgacctcatgtccctgctctaaaagtgccagacatgtatggcttccgatatatcctgcgccgccggttactaaaattctcatgatgaaccctccccgaatattgccgttctgagatacggttattttactttttcgttatcattttaacaccgctgcagataaaagggaatatcatttttcttttatcctatacagatttctttcctttactgcagccacgcgtcaaacaatttcgccgcgatcggagccgcagtgtgtccgccggaaccgccttcctcgacgatcacgcagactgcgatcttcggatcatccgccggagcaaagcctacaaaccaggcgtgggtctcttttgccttgtcgacttccgcagatcctgtctttcctgccacctggtaggaatcccgcttcagggcggatcctgttccgacgttgacaacctgtaccatcagattctttaaggcgtccgcctcgttcggcaccatcagttctcccgccactgacggggaaaacttccggatcacatcgccgccggaattttccacatgatccatcagatacggtttcatcagaatcccgccgttcgcgatcgctgcagtgatcaggaggttatgcatcggggacatcagtgtctgtccctgtccgatacttgtctgcaggacttcccatgtctctgcgtccggctgcatcttgaaggtgctcctgctgtacgggatatcgagcggcagactccggttaaacagcagctgctccgcaagattccggtagcttgtcagatcaagctctgtgccgaggttcgcgaacgctccgttgcaggagtttgcaaacgcctgcgtaaagtcctgggacccatgagccgtcttgtggtagcactggatcttattattctcaaacgaaaagatcccgctgcagtcaaagtgatagtcattgtatgtgcccgggtgctctctcatatactccagagccgtgacgatcttgaaggtggagcccggcgggtaaagtccctgggtcgcacggttcaacatttttgcctccgtgctgtccccgtttacaaggtcctgccagtttgccgccaccgtgttcggatcgaacgacggttttgacaccatgcagaggatctttccggtatccggctcgatggcaatgaccgatccccggttttttccgagtgcatccgaggcgatctgctgcagattcacatttaaggttgtcaccacattgtcaccgacgctctttctccccatgatttcatccgccgtctgctcgatcaggtttgtatgggaccgcaggaggtcaaagtttgccagcaactcgattccggtctttcccaccgtcgaatatcccaccacatgggcaaacagactgccgtatgggtactcacgggtctctgtcccgtcagaaccggtcgctgtcacggtcctcgcaagcacggtcccgtcatcggcaaggatctttccgcgggtgacccggtcctcgaagatcgtcgctctggcattgtaaggattgtcgatcaccgtatcgctcttcacaacgagaaagtatcccagatagatccccatcgccagaaataaaaatactgctgcatacacaaaccagaggatattccggtttgctttcggattcggtttactcttcttcacttgaatgttcctcctcctcttcttctccgcgttttaagacgtagagtccctgaatgacctggaatatgataaatgtggagacgatggaacttccgccgtagctcacaagcggcagcgtcacacccgtcgacgggataaactttgtcacaccgccgatcgtcaggaacacctgtgtgatatagacgcttccaagcccgaatgcaatcagtttgtagaacatcgcctgcatcttcatcgcgatcatcatgaactgcatatagcagccaaggcacaaaaacagaacacagagcgcatagagcgctcccatctcctcggagatcgctgcaaagacaaaatccttgtccaccaccgggatcttctccggcattccacggtataatcccattccgaaccagccgcctgttccgatcgcgaacagcgcctgggcaacctggtagcccttgttcgcgatatcagaccacggatccgcccaggcctccacacgtcttctcacatgcgggaaaaggtagtaagcagcgaccgctgcaacggatccgcctgcgatgcctgcgccgaaccacagataactggatgtcgcgacaaagagcatcgtcatataggccacgaaaaagatcagcgcacttcccaggtccttcgagagcaccaggaccagaacatggaccgccgcaacaacggtcgtcttaatgatcgtgtcccggtctgtcgactggtagaacatggcagccacaaagaatacaaagctgatctttacaaactcggatggctgcaccgtaaatcccccgaacgtcagggagagctgggctccgtaggaagtatttccgatcacgcacaccacagcgaggagcacaagccccaggatcccgtagacccacggaaacgtgacaagctgccacacccggtcgatgatgaacgggatgatccatgtcacgactgctgccgccgcaacgatcgcaaactgacgcatcgcccggtcgggattcagtcttgtcaggataataaatcccgttgccaggagcgtgcacatattgttgacgagaagcctggagctgttccggtaaaacaggcgggtcagatagatatacagcaggaaaaacagcacctgcgccccataaaaggctagcatcgtcacagatcccgtattcagccagatcaggacattcgccagaaagtgaagcataaacaggcacacgagctgacgcccgcagacgcggtcttttccctcctcatcccgcacggaaaagaaacggaaattatagtaagtatccagggcaatgaggaggatcatcagatatctcgatatttgtatgatcagattcgtcaaaaattatcacctactctactccgcgcttaaaatgtccgcgcgtaaactgatttttcaaaacagacggttctgctgccttttctcccagagcgtactcctcgaaaaacgcgtccaggatctcgcccgcagccgccggttcctctaccgtaaagttcaggcggagcgccttcggtccgagttcttccaccgaagccgaaagtccaagaagagaaagcggagccgagttgtagatcgtgttataacagaaacggcactgattcaccaccgggaaacgcatctctttgcggtccttcagccacatgatctccggttttccggaacatccgagcgtcgtcttcctgatacactgtgcggagatcatcatcggcagatagccgtatacgatcatctctccgtggatcccggaatcccggatctcccgctcattcaactccacaggaacggtcagacggtctgccccgtactgctccatcgcctccccggccaggtggttccaggaatacattccctggtcaaaaaagagcggcagcccgatcccggcttccttaaggaatcccggttcttccattgatccgatcccgagagcgtcaaaaccggcgttttttaaaagatccatctgctttctaaaatactgctccgcctctttccggaagattctcggcatcatcagataacacctcactccggcctcatggcagcggtccgcaagttttttccactcctgggcatcaaagctctccgccgccagatagatcccgtattctcccgcggataatttccagtacatcttgaacttcccaagaactgtctcgaactgtgcctttgtctggacaaacgcagtaaattccgggatcttttccgacggtttccttacaggaagcgtctcctcttcctttgtcggaggaactgagctgtttctccgatatccggaaaggatctcttccttaagtttttccaggacatcccgacgcatcttatttaacgcctgtaccggcatgaacacatttccctcgcactccacggagagatctgtgaaggtgaacatggaatctcccgtctttgagagctgtttccggatgcgctccgcgtccatcggggcattctttgcctcctcagcaggctgggattcctcccaggccgtattcccggcctcatctgacacagaaaaatatcccgcgtttccaaccgcgatatacgcatttcccgtcaccgggatcttcttctccgtatttacataggtgcggtccagatagtcgaaaagctcctggttcacgtcgcggtattccggtttttctttcaggactaccatatcccggccattgtgggctctgtaatagccctgtgactgcccaccgcggtcaaaaagggcgagcagggcgtcacggtccgcctggtctacatggtacccggcgcggccctcttttaaatagaggtccacatatttccggtaaatgctcacgacaccggccgtatagcgcgggctcttcatccgtccctcgatctttaaggaacagactcctgcttccaggatatccgggatcagatccagggtgcagaggtcctttaagcttaaaagatacttctcgttctttttattgacatattttccattctgctccgcgtcaaaaggcagacggcaggtctgggcacaacgccctctgtttccgctgcgcccgccgatcagacttgaaaacaggcactggccggaatagcagtagcagagcgccccgtggacgaacgtctccacctcaagccctgtatcatcataaatctcgcggatctccttcagtgaaagctctctcgccgggaccacgcggacagcgcctaacgactttaagtccctcgcgctgtactttcccgtcacggtcatctgggtactgatatgcaccgacagatccggaaagtgtttccggatataggtgagtgcgcccatgtcctggaccaggacagcgtccagccccgcctcgtaatatggtttcagataggaatacagatcccacatttctttttctttgacgagagtattgactgtcatatagatcctgcatccgtgaaggtgcataaaatcgatcgcctttaccatcgtctcctcatccaggttgttcgcataagcgcgcgcgccaaaccggcttccgccgatgtagactgcgtccgctcccgcgttcaccgctgccaccatactctcgtaggagccggccggcgcaaggatctcaaccgttctgttcttcatcttgtctccttctttacatcaggatctgcagctggctggatccagcagctgcagatccgcatatatttacagtcacattcccggggacaacccgtattttccccggctaatcctctttctgggcagcctcctgcttcatctgaaggctgatcagctcatgtttcaggctgtagatctctttctccatctcatccttctgggcgcgcagcatcatcgcttcctgaagcgtcttaaaataatcatccgcaagatttaagtagatcatgacttcctggtaatctttgttctgtcttgtaaaacccggctgcgcctttaatacggtaactttttcattgatataggcagccactttctgcagatattccgggtcttccgctccgcccagtgtatagacgtttccattgatcagtacttctgtataattcttctcttccattccaatattcctcactttttctccccgcatgaccgttcttctgccttccggtcagcgaaaagatctatcttaactggtaactgtttcatgttctcacagctgtcatattttttcattcttttgccgtctcaagtccgaaatgtctgtaggcgagatccgtcgccattcttcctctcggagtgcgcatgatgagcccgttcatcagaagatacggctcatatacgtcttctaacgtcccggaatcctccccgatcgatgctgctaacgtctccagtcccaccggaccgccggagaatttctggatcagcgtgaggagcaaggtcctgtcattattgtcgagaccgagtttatcgacatccaggatatcaagggcaaagtccgccacgtctcttgtgatcgcgccgtcatattttacctgggcaaagtcgcgcactctctttaagaggcggtttgccagtctcggagttcctctggatcttctggcgatctcgaacgcgccctcctcatcgatctcaacgccgagaaccttcgcggagcgcttgacaatcacgcagagttcctccggcgtataaaattccagccgctggatcacgccgaaacggtcacggagcggggctgtcaaaagtcctgccctcgtcgttgcgcccaccagcgtaaattttggaagatccagccggatcgagcgggccgaggaatcttttcccagcatgatatcgatggcaaaatcctccatcgcgggatataatacttcctccacctggcggttcagtctgtggatctcatccacaaacaggacatcgccttcctggagattatttaagatcgcggccatctcccccggtttctcgatcgcgggaccggaggtcactttcagattcacgcccatctcgttcgcgatgatcccgcagagcgttgtctttccgagtcccggaggaccgtagaaaagcacatgatcgagcgcctccccgcggctcttcgccgcatcgatgaagatcttcaatgtagatttgatcttctcctgaccgatataatcttttaaatattgcgggcgcagagtcccatctattttcttatcttcttccgtctcttcggtcgtaatgattttccggctcataatatttcctatcctgtcttagtttctgctcctctgataccgaattgcttcacacgctgcggtatcataaaaacgcaagatgtttcagcgcaccctttaacacatcctcggaagtcatcgtttccgtgatcgtcactttcttcacggccgtctgtgcctcggatgcggaatatccgagcgccgtgagtgcctccactgcctcttttccggcttccgccattccggagaattccgtctttcctgtctcttccggttccaccccggcaaacaggacgtcctccgcttttaccttgtccttgaggtcaagaatgatcctctgggccgtctttgctccgacaccgggtgccttcgagatcgccttcgcatcgccggagagcaccgccatccgcaggacatccggcttcagggcggataagatcccgagcgcactcttcggtcccactccgttcaccccgatcagctggcggaacatctcaagatcctgtttcgagagaaatccatagaggctcattccgtcctcgcgcacagaaaaataggtatagatctttacttcctccccaagtcccggcagttccccgagaaccgacgacggaataaagatccggtagccgatattccccgcctcgacaacgacggaatcttccctcttttcctccagaggaccgcgtatatatgaaatcactggatgaacctccttaatcataatgcatgtcgtaatcataccatagccgccatttaagtgcaagcaaaaccgccggccgaatcgaacatattttcgattttattttatcgatgcttcattgactttccaaaagcccacaggtataatcagaaaacgcagacaccgaacataaacactacaggaaaaacgtatgatcacaatagaaaaaacatttcccggcaccatcgcctacccgttagagcgcctcggcgacccggaaaaactcgtcttttttgacatcgagaccacgggattctccgctgactacaacacggtgtatctcatcggctgtatctggccggaaggagatcagctccgctttatccagtggtttgccgacacaaaaaccgccgaggccgatgtcctcaatgcattttttgaatttttaaagaatttctgcacgctcatccatttcaacggggacatgttcgatatcccctttgtcacaaagcgcgccggcacattaaaactcactcccacgtttgactgcgtggaaagcatcgatatcttccgccggatcaaaccattcaaaaaactcctcggtctgcctgacatgaagcagaagaccatcgagcggtttttaaagatcagccgcgaggatctctataacggcggcgatctgatcgaagtctatctggactatctgaagacccgggatgaggaagaaaagcgccttcttctcctccacaacgaggatgacttaaaaggaatgccgtcacttctcccagtcctcttctatccggactttttcgctcaggatttcacattgagatctgtgagggaagcttccggtgagacggaccggcttctcctctccctggccggagatccggaaacgatccttccggccccggtgagtgtctctgtccccgcctacgctttccgggcagacaaagaccggatggagctttccatccgggtctacaaaggcacattgaaatattactatccgaactataaagactactactatctgatctacgaggacactgcgatccataagagcgtcggcgagtttgtcgacaaggacgcccggatcaaggcaacgaaggagacctgctatacgaaaaaagacagcgtctttctccctcagcccgcggatatctgggaaccggaatttaaaacttcctgcaaagataaaacaggattttttgaagtccgggaagactgtttttccgatgccgaaaaactgaatcactacatccatgagatcttttcatttctaaaatgaccgcacatgaacacagatcccgcccacgatcgtcattttccgggaaccggcatgacaatgatgacagcagccgactgtgagatccttctctcttcccgctgctgtcgttttgcctgcacatctgttcctctaataatccccgtctctcagaagttttctgatatatgcaaacgtttttctctcgcccttttcctttaacatcaaaaggatcttatcgagacatgccttcgtctccggatgcatgacgataaattccttgtttctggagaaataggtatacggcgccgcatccgtgtaattctttccctgatagatcttagatgcggcgatccggtccatgaccatctctgccagataattcaccggcatcttcactccgacgatcttccagttgttttccgctgtggacacgtcagtccagtactcaaaatgatgcttgtttcttcctttatgatgaagccatgcggaggaatatcctttttcttccttctccgcagcattcgggcttctcgttccctgataatactttactcctgtccgaaattcctcccaggaatattttgacaggtcatggagcagtccttgtttaaacagccccaccttaaaacatccttccatgacaaccagcttgtggtgcgtgatcgtcagaaaatgatgccatgcattgcaaagcagccgtttttcctcatcatttaacttaacagaactcatatctttatttccttatcttccgggccgctccatcttccggtgtgcggcccggcaaagatccatatttttgcagaggtctgccgcggcggatcctcagttactctcttgtcgccttttttaacatctcacccagttcatccacagagaatttataatgtttgttgcagaactggcagttgacctcgatttcttttccctcatcgatcatatcctggatctcttttcttccgatgctgatgatcgccttctccactctggaacgctcacagtcgcagtggaactgcaccggcatcttctttaagatctcaagtccgaactccccgagaatatctgtcaggatctcctccggagtctttcctgcatcgagaagggatgtgatggaggaaattccggaaagctttgcctcaaggcggtcgatgatctcatcggatgctcccggaagaagctggatgataaagccgccggcctgacggacggtattgtctttgttcatcaggactccgagagcgacagatgacggaacctgctcggatgttgcaaaatagtacgtcagatcttccgcgatctcacccgtgatgagctgtgtctgtcccacatacggctcttttaaaccgatatccttgatcacactcaggacgccgagtcccaaggaaccgccgacatcaagctttccctgcgcattcggcggcagcatgacatccggattgaacgcgtatccctttacatcgccctttccgtcagcagtcactaaaagtcctccgattgggccgtctccctcgatccggagtgtcaggagttctccttccccctttaagtcggatcccatcatggcagccgccgtcatgagacgtcccagggcagccgtcgcgatcgggctcgtattgtgggcattcttcgcggtttccaccatctcttttgtcgttgcggcaaaggcgcggatctgtccgtccgcagccgtcgcacggatcatataatcattcatgctctatttcctttcttttccatgttctctcgcgatcacataaacacgctcgctatcttttcgcggcgaatttttcgtaaacgcgtcgtaaacggcaacaaactccatgcctgcctcactgatcgcgcgtttcacttcctccagagaatacgcccgctggtagtgcgtttcatgatatttccggaaaagatctccctcttcccggacaaagatcgacagatcgtagatattgatcttttcctcttcttcgtactggttgtcccagataaagctggagtcgtcccggtcctcggcgatcgtactgtcacccatgatctcccggtatttgtactcggtattcagatcaaagataaagactccgcccggatcgagatagttgttgaccaggcgaaacacctccgtcagatcctccggctccagaatgtaattcatacagtcacagatggagacgaccgccgccaccgtgccgtaaagttcaaattccctcatatcctgacagagatagaggatatcgcttccggatttttccttcttttccagggcaagttccagcatttcttcggaattatcgactccgatcatatcgtagccggactttgccagaagctccgtgagacttccagtcccgcagccgagatccaggagcagtccttctgaaactccctgctcttttaaaagtcctgtgagatactcacaccactcttcatatgggatattgtccatgaacgtatcatagacagcggcaaatcctgtatatgcctgcattgttttttctccttatcaatccgcggtcacaactgtatcacacagaattttccgttcagaaaattcctgccagtgtacagtaatgaaaaagccactacccgcaataggtaatggcttacgtttcatcttatgcgttgcggccgcagcactttttgtacttctttccgcttccgcacggacacggatcgttcgggtagatcttgtggccctggcggcgtacggttccggaagctttctgcttcttgtagagctcggttcttgtctccgcggagaggatctctgtccactgcggaagctcatagagccaggaagcctttgcctctaccatattgtagtaaagcttctccggatcgatctcgatcttaacaacagtatcttctgtcattgtgtcgatcgggttctcatatccctttaagctctcgttgattccatcgaggaaaccggtcataataagaacttctgtgccatacttctcagcaagctcttttacagttccctcaacaacctctgtcgggttggagaggatcttctcgtagatgcctttctcgatcgtaaaatagtttgtccagagttcttctttctttttatcatcgagaccgtcgccgtaagcgaggtttctccatgtctcaagtaatgttgccatatcagttccatccttttcgtatactgtttctattcttttccgcaccggcgagctccaaaagggcagactggtacaggaaacgtctagagcgtattataacataggatattttttctgtaaacaggaaaattggcaaaaggttattccaaatagtctaatgcaaactgcgcatagatccctgtgccgtggaacagaacgtcctcatccacatcgaatgccggatggtgatgcggcgccgtgatgcctttttcctcatttctgcagccgagatagccgaacacgcccgggacatgttccgtgtagacgctgaaatcctcggcccctgtcatcttctttaacggaacgagtgcttcctcgcccatctcctccgcagccgcgcgtctcgctgtcttcacgagttcctcattgtcattgatcagcgggctcggtccgaaatagtagtcaaactctgccgtacagccgtagccctcgacggtcggctccacgacctttttgatcagctccggcattccgttccggaattcccggttgaaggctctcaccgttccgacaagctccgcctcatccgcaatgatgttctcctttgttcccccgtggaacattccgacggagacgacgagtgcattgaacggatcgttgatcctgctcgggatcgtctggaggacctggatcgccgcagccgccgccaggatcgcatcctttccgaggttcggggcactcccgtgtgctttctgaccatggatttttatcgtaaagcggtcgctgcacgccatccgctcgccggattcaaagtttacggttccggtcggcatcgtcgcccagatatgcattccgaagatcgcatccacgccttccaacgccccacgttttacatattcctccgattttcttccgatctcctccgccatctggaagatcagtttcacggtcccgtgaattttgtcacggtttgcacttaagatcttcgcagctccgagcagcatcgccgtgtggcagtcatggccgcaggcatgcatcacgcccggatttttgctgcagtatgatttccccggattttcctggatcgggagcgcatcgatgtccgcgcgcagcatcacggtctttcccggcatcgtcccctcgatcgttccgacgcagccggtgatcccgtcgaattcctgtaccgggatccccatctttgtaagctccgctttgatgaactttgtcgtctcaacttcctgcgtgctgagttccggatgttcatggagatggcggcggcacgcgatcacatatgcttcctgttcttttgcaagttcctgtactctcatcgctcttctcctccctttttctccagataatctgcggcaaactgcgcgtagaacgcagctccctttttcaggatcttctcgttgactctgaattttccgttgtggagcggatagatgtccttgtcgttctcatcatagcagcctaaaaatgcgaacatggaagacgggatatgatccatcacataggagaagtcctcacttccgcttgccttcttcgcctcagcccatgcacccggtccgtagagcttttccgcagcctccctggcgatcttcgtaagctccggatccccgtttacaaccgacggctccagataggaatattcgagctccgccgtgcatccttccgcagctgcgatatccgtcacgatccttctcatggtctcctcgaccatcgcccgtgtctccttcgcgtaacagcggacagttccttccatgacagcggtgtccgtgatgatgttgaactgggttcccgcggagacctttccgaccgaaacgaccagcgaattcaacggatcattcacacggctcacaatgtgctggagtccgagcaggatcgagctcgccgcgacgatcgcgtcctttccgagatgcggcatggagccgtgggtcgaaatgccgtggaccgtgatcttaaagttgtcacagcttgccatcagctctccatctttgataaggacctgtccggcagggcctgtcggccacacatgcattcccatcgccgcgtcgatcccttccagatatccgtgatccacatagtaatggcttccgataaacgcctcttccgccgcctgaaacaggagttttacagttccctttaattccttttcctgctcctttaagagtctcgccgcccctaaaagtatcgacgcgtggcagtcatggccacaggcatgcatcacgcccggagtcctgctcgcgaaatcgactccgctctcctccatgatcgggagtgcatcgatgtccgcgcggagcaggatcgttggtccgtctcctttttctccttttatggtcgcgatgcagcccgtataatccgggaatgtctgcaccgggatccccattttttcaagttctgagacgagatatgccgttgtctctttctcctcgaaagaaagctcggcatgttcatggaggaagtggcggtcttttatgatcgcactctctgtttcctctgctctttttgcaaaattcataagtgctcctttcttaacaagtaaaaagagcactgcacggcataacagccatctcatgcggtgctcttttttactatagttcttttatctgctcaaacatttccgtttgtttctacagatagatcgctcctccaggtccaagcggaaggtttaagagaacccagatcacaacctgaaggatccatgcaatcgcgaatgttaccgagaacggaagcatgttcgcgatgacagttccgagaccaaccttctcgtcatacttgtgagcaaagcccagaatgaccggaaggtatgtaaataacggagacagcgggtttgtgatggaatcgccgattcgataaacgacctgtgtgatcgccggatcgaagcccatcaacatcatcatcggaataaataccggtgcaaggatcgcccattttgcagaagcagatccaataaagatgttgacgatacaggaaaggaagatcaggccaagaagcagcgggattcctgtaaatccgatcgtgcttaaaaggtttgctcccttgatcgcaaggacagttccgagttttgatacggagaagaagtttgtaaagatggcgatgaagaagcacatgaatacatagtttcccatctcggcaaagccctggctgatatctgcccagacatctttatcatttttatactttccgatcacaacaccgtaaacgatacccgggatcatgaggaataaagtgaccgtaaagacgataccctttgagaacggggatgcaccgcttgtgatggatccgttctcatctgcgaggatcgcacgtccgccgaagatcggcaggcacatgaagactacgacagccgcatagatcagaacagaaagacctgctgctgcaattccctttttctggatcggtgtgatattggaattatcttcatcaaaatcgtatttggcaagttcttcttttgaaaccgggaaacggtgaagaagaactttctcaaccaggatcgtacccacgatcgtaagaagtacgcaggagacgatcaggaaataccagttgatcgcgatggactgctgatagttcggatcgatcatctgtgctgcctgctctgtgaatccgtatgcaagtgcatcggaaagaccgagaagaatgttcgcacagaaaccggctgcaaccgatgcgaatgcggtgtacattccgagaagcggatgacgtccgatggacatgtacaggatcgctgcaagcggcggcagtacgataaagcctgcatcaccggcaatatttaagttgattccgaggaacatgatgaccatggtgacgatccatccttttgccttgccaaggaaattgaccatgacggcaacgaggaaaccactcttctctgcaacggaagaaccgatgacagcgacaagcaccatgccgagcggtgcaaagccggagaagtttgtgatgacattcgtccagagataacgaattccatcgagggacaggaggttaaatacctcgatcgttgatccatccgccgggtttaccgcggagacgccggctgcactgcagatcgctgaaatgatcgtgacaatgatcgccagtccaaggaacatcgtgatcgggtccggaagtttgtttccggcacgctcaatcgcatccagaatacgatcaaggcggcttttctttgcggaactgttctcactcatagatgaccccttctttccactgccatattgattaggcagctctttattttttaatatattatagcggtaaagtttttcatttgcaaccttttgttgaatatttatgaaaaaaataaatttcctatgaattttttctaaaagaatcctcgatccgttcttctttatccgtcgggctgcagattcagacagtccgttctccattgatcatcaagcaccccgctgcttattggaacgcactgtaatctgcagtattattgataaaaaatgcatgggattccgacacatcttctgtctgcaatcccatgcgttttccgagtctctgctgcggtctgtattttcagcagagcattttcatgattctcctgatctttccctcaaaaaagcaacgtcctatctggcagtgataaacccgttgtcatcgatcgcagtttccggggagatcttcctcatatatgcaagaatccgctccttctccgctccttccgccttcgtgacacggcagttttcctgctttgccgggataaactgcagggactccagtccctccgttccaaacaccgcctcgacgaggcaggtgtcgagactctttgagttaaagaggtaatttccgaggctgtacacgaccggaacttcccccacatacccgatcggctgcagcacatgcgggtgatccccgatgatgagatccacgtctgctgccgcgatctgcgcagcctgttccgtctgccagtggtccagcttgtcagttccttcggtcccccagtgaatgtacacgatcacatagtcactgtccgctcttgcctccccgatcacttccaggagttttgtgatatcgagacaccggaacacgcccggggatgtctccgtcgcccctttcgtatccggcggattcagccgttcgatctgtgtcgcggagatgaacgtaaatttcttcccgtttgcgataaaagaaaccggtctgaccgcttcctcgaggtttctcccggctccgacatacggcattccgatggactccagcgtatcgagcgtgtccgtcagggacacctccccgtaatcatacgcgtggttgttcgcgagcgacacaagatctgcgcccatgtcaaacagccaggacgcatacttcggatccgcccggaaggtaaacttttttccggccgtcggcgtcccgcggttcgtgtacgggaactcgttgtttaccataaaaatatctgcgtcccgcatgatggagagaagatccgcggagatcccgccttcgattccctgtccgcgctttaaaagcgatgccatgatcgcatagtgggagtcaaacaggatatcacccgcaaagacgatccgcgtctttccgggctctgctgtctccttcgcatagatcttatttgccgccatcacttccggatcctttaaaagatccgcgtaaggatccggcgtatccgtctcaggttccggctctgttcctgcttcgctctccgaccgttctgtctcttttcccatctcctcctgctgcaggaccacgcgcggtttttccgccttttcttcagaatgatcagctatctcttccgtactcccggcctgactttcaatggctgccgccgttctcgctgccccggctgcctgacttccgcagcctgtaagcaagacacatgtcagaattgccgtcagccagccagctgctgtttcttttctcataatatactcttaccgcaagaaaacgctctttcggttccacctttcttttctttggtttctttcgatttttctccttcgttccatcttaccagacttttccctcccatgcaacgctttaatccccacaaccatccctgaactgccaacctgttacagtacacgggcactccatgcccgcgcactgtaacaggattttgccgatgcttcgcattccaaatcg

SEQ ID NO: 2131 - DNA, 9260 bp, Unknown
  gut microbiota DNA sequence
gtaacgtcaacctctcacaacggcgctgtgcaacgcgaccggctgcatacgcaaaaaggtgcggcagacccactcacagatctgccgcactcctctactcatcattcaattttataaatccaatatcagcttttcaccctttcacgctgagacttccagccgcgatcgccttcccggacttcctgtcaaacagcaggatatccgtacctgcgatgtccacacctgtctcctcgccgagcttaaaggtaacgcctccgaagatcacgcctgtcaggaggtactttcctatctttaacttcacggtcgactccataccggtcggcatcgctccgtagatcgtagatgcgacagaaccgtctttcgaaagctttaatgcttccggccggatcgcaaggacaaaatcctcgttggtgatctccggctcttcctcaaccgcatagtcggattcatcgaccttcgcgatatgatatttaaatacctcatccttattgctcttctcgacagccttcttatcctttaacatctccagccgctgggcttccaggtccgccgcatcctgatcacgctttctgaaccaggcatccatatcgatcggctcattcggccggaaagtcgcctcgaggtcatccaggatcgtaaagcggaagcttccgtccgcctgttcctttcctttcgcctccacaaagttgatcgacggatttccgacgaagtccgcaacaaagaggttcgccggtcggttgtatacatcaagaggtgcgtcatactgctgaaggaccccgttgttgatcagacagatcttcgtcgccagcgtcatcgcctccatctggtcatgtgtgacatagacaaaggtgcttcccgtctccacatggagtctctgcagctcgtatctcatctcaagacggagcttcgcatccaggttggacagcggctcatccatgaagagcacggacggctccggggcaagcgttctcgcgatcgcgacacgctgctgctggccgccggaaagctctgccgggtagcggttcatgaacatcccgatctttacgatccgggagactctgcggacggatttatcgatctcctcttttgtgagttttctctcctcggtgaggacttttcctccggatacgatcgcatattcgtcattcaaggactgtccttttgcttcataggattttctgatcccgtccagtttctttttcagctcctccgccttcgccttcgcagccgcatccggatccgatgcatcctggatcccgtatccgtagaggatttttgctgtatagatcgagaggatgaacgcgtcgataaacttcagatataccttgtctgtgtcgagttttccgcgcttgtcccggcactcttccacgagctctttgatcttctttccgctctttaaagcccggaccagttccccggtcgtcatggcatcaaaatcatatttcgggagttcctccttgatattgctgagaccgaaggaaatgttctggtagacggtcatgttcggccacagtgcgtagttctggaacaggaaaccgacttttcgcttattggcaggaatgttgatccccgcctcactgtcaaagaccaccttgtccccgatcttgatctgaccggtcgtcggcgtttcaagtcctgcgatcatacggaggatcgtcgtctttccgcatccggaaggtccaagcagtgtgatgaaggagttatccgcgatatccaggttcagatgatcgaccccgtaaaatttcccccaacgttttgtgatatttctcaatgtgatttccggcatattagtttcctcctattccatcgtcaaggcttgcacctgtcagcttattgactaatgtattgaagatcaggatcgtaacgatcaggatcaggttgatcgcactcgagaacgcgtaaagtcccatctcgtcgaagtaatcgagcgttgtcgagaggataaagccctgcgtacataagagcaggaacagggacagctcacggagacatgtcatgaacgggagcatgtatccgctgatgatcgctgacttctggatcgggatgatgatccggaacattcgtttcgtccatgggatatcctggatgatcgccgcctcctcgatctcattgctgatctgcagcatggagttcagcgcgctccggctcgcaaacgggatgtacttgatcgtacctgcgatgatcagcagcgtatatgtattaaagaggttgatatgttcattcgaaaacaggatgaagaacgctgcaccgactgcgatggacggcatcaggtacggaagaaatgccacaccatttacatagctcgcccaccggcttctgcggttcttcgcgaccgcatatccgatcagggtaccgatcgttccggcaagcagggcacagcagacagcgacgagcaatgtacctgcaaatgcatgccagatcgtattgttgtagaggatgccgtgctgtccgtacataccgttctcggtgatattctcctttgtgatccaccacttcgtcgtcaggttgctcagatctcctgtatagaggaagctgtaatcgcccgggttcggaaggaaggtctcaagtgcgaaggagaagatcgggaaaatacttgtaaagaatgtcaggacgatcatcacgataccgatcgcatattttccgacttttccaaggttcatctttgacagctgtcccgatttaccggtgactgtcgtgtaatttttccggctctttaagctcacttggttcatcgtgaggatcgcgactccgaagatcatcatgatgatcgccaggatactcgcctcaccggtgtacttggagtttaaggagatatactttgtggaaagcgttgtaagacctaagtaatgcggtaccgggtagcttcccatcgaacttccgaatacaagaaggatcgtcgaaaggatcgccggttttaccatcgggagtgtgatccggaacatcgtcttgagcttcggtgtatcaaggatcgtcgctgcctcctcaaggttcgcatccatattccggaagatcccgccgatcaggatataggcgaacggcgcataatggagtcctaagacaacggaactcgggaacagcccctgacaccaccatttcggcatacagatccccacaagagatgcaagaagtccgtttgatgttccgacaaccgcgttgctgttgaacacgttctgccatacaacagcgagtgtccactgcggcatgatgtacggaaaaatgaaaatagagcttaaatattttttgaatttcaggtttgttcttgttactaaaaatgcgaaggttccgccgtaaatgatggagatcgtgcaggtaaatactgctaagaggatcgtattccacagcggcttccagaggtttgtcttcgccagacggcttgtaaagaggtccacatagttgaccagcgtgtaaccggacgcttttcccgcgaggtgggcgtcgatggttcccggatggatcgtgatcgtatcctttacgatcgcaacgatcggtgcaacagtggagaaagtcagtacgatgccgaacaggagaaggatgatgttctgcggttttgaaaaatatgtttttacccggttatatccattcacagaaatgtccgctcctttcctaaaacatggatgccgtttgttacggcagatgccatatgtaacacgagggcgccgcacgcatgtacggcaccctctcaagtgtcagtccgatttacttagcagagtcactgtacttcgtgagaagttcgatccagcttccgactgtgaaggaaacggatgcgcagtagtccggatcttccagaactaactcgccgtcagttgtccaccagtcatatccacggtcatctttacacggatatacatcttcgccggcctcgttgtagccgcccttgctgtgctggtaagtttcctcgatcgctgcagcaacttccgggttagcggagtagccgcccatatctttgccccatgcggagaagccgttctctgtacatgtcatgtactggatgaatgcgcacgcggtccacggaagcgggctgttgtttgtaacgaagagataatggcagtaaccgtaaccgccgatgcctttgtagccgtcctgataagcggcaaccttaatgttatttaaggaaacgcctgcggactcttctacggaacgaagtttggagtaaactaataatccagcctgatctgttgcggaatccgtaacaagtgtgttgcagatcgggccatcgtctgtctgctcattgtagttctcaacccagagcttgatccatgcgagggcgtatgcgccgttctcgccaagtccaagatcctcggcatctgctgccatctcgtcgatgaccggcttgaagtatgctttctttgtatcatcgagagcatcgtaagcatcttttaaccatcccgcatacttatcttctgtcagcatgtataagaagttctttccgacgatctcggaatcgatatccatgtataacggatgaacgccttctgccacgaaatcccagcagttattgtactctgcgcttccggtgctgttgtacatgaataccttgtttaaggtctgcaacggaaggaatccttcatatgcatccggtgtggtcccgtttgcctctgcccattccttcgggatataagtctttaagattcccggctctaccatcttcgtctggatctggttgccgtcctggatcagggtcatcgcgaaagttccctcggtctttaaggaatctgcggtcagctgctcaaagatcttgttgttctttggctgctgccactcatattccatattgtaggacgggtcgatcgactgcaggtattcgatgaataacgggagtgcgctcttaccacggctggagtttccgacaccgtaaaaggtctttccgttggactcctcgatggctttctttgcaagttcttccatcgacattccttcggcttccttgatgatcttttctacatcggaaagatcagcatcgtccgtcttcgctgcctctgttgccgcttcactttcggctgcctctgtctcaccgcctgccgccgctgtggttgccgttgtggttccaccgccgccgcatcctgcgagggacatcgctgccatggaaattgcaagtgccaatgacaaagtacgttttctcataaaactgttcctccttcatctgattgggtcattttgtttttctcacgactcattttgtacttttattatagcggtacgcagaaaaatttaacagtggacaaaactgcgatagtttgtgaaatcctgtgattttgtataattgtgtttcgtatttctgctttttttgtgcagtttcgacatatgttttagattgtcagaattggtagtaccggcatgttgctgtaaaggcatgttcttcgatatgaaaagaatgtgccttgtcacatttgggcgtatcgcgcaagcatcctgtggagcaaaacttccgatcacagaatagtcgcgctcttccttcggaatatcaaagaaatggagcagagatttcacatcgtccgtgttcttcacgcccggaacgaccgtcagaacgccaggtttgtcaagcgcgtactggatgcactgatacggagtcagcgccttcccgaacggggatgtctttgcatcgagaagctgaccgccggagaacggtttcatgaccgtgatgccgatcccctctttctcacaccgtctgtaaagatccatgcgctccttcgcacttccgttcgcataatcgccgtgatgatagtcatatcccgcattgatggaaaacatcatctggtccacgacgccggtgtcgatgacctcccccgcgagctccagtgtatgggtggaaagtccgatatgacagacaacgtctcctctcctgcctgatgacagacttccttagcttttactataaggcttaaagtaaagtttaagtcaagaagttttcatccggccggacaaaaaataaaccccagtcccgaaaagcttcccatctctttccggactgaggtctctttacaacaattttctccgctattaatacaggtttttcaccttaaactctttctcaagctctcttctctggtcctttttcgcgatatccgcacgtttgtcgtacaatttcttacctctcgccaggccgatctcaacctttacgagacttcccttaaagtacacctgaagcgggaccagcgtgtatcctttttcctggatctttcccttcagcttgttgatctcatagcggtgcatcaggagtttccgctcgcggagcggatctttattaaagatatttcccttttcgtacgggctgatgtgcatgccgtagatcatgacctcatcgttcgtgatccgaacaaaagattccttgatgctgcattttcccatcctgagagattttacctcggttcccgcaagcgcgataccgcactcaaatttgtcatcgatgaagaaatcaaaatatgcctttttattgtttgcgatcagcttaaatccgctgctctttgccataacttcgtcctcttttccgttccggcaggagtgtcccatgccggaaccatttctatcacaaggtctgtccgctgcaaaaaacgaaaccgtgctatcgtttgtcgaaattccgcaccggaaggaaatcgatcgttttcagataccggtccacagagacgacctggatcttcacggtctggccaagcttgaatttctttctcgtccgctctcccaccagttcatagtgttcctcatcaaacacatagtagtcgccgtcgaggttcgctaagcgtaccatgccttccaccgtattcggaagctccacatagaagccgtaattgctgatcccggagatcacgccagtaaattcttccccgatatggcgctccatgaactgaactttctttgccttatcggtctccctctccgcctcgtctgcgagacgctcccgggaagatgtccagatcgcaacttccggaaggatcttctcataatgggcgatcctctttttcgtgagaccgccgtggagattttccttgatgatccggtggatctggagatccgggtatcttcggatcggggaggtgaagtgcgtataatagtttgctgcgagaccaaagtggcccatgcattccgtcgtgtactttgcctgcttcatcgagcggagtgccagtctcgcgagcagcgcctcctccggggatcccgctgccttttcgagcagtttctgcatctccttcggatgaagctcgccgttctggagccggatcgaatagccaaaattgttgatcagaatgccgaagcgcttgatcttctcaccgtccggcttctcatggctccggtacaggaacgggatctgctgccagtaataatcctctgcgaccgtctcattcgcagccagcatgcagtcctcgatcagcatcgtcgccgcgttccgctcatacggcctgatctcgaccgggcgtccctttgcgtccaggatgatcttgcactccgggaaatcaaagtcgaccgcaccgcgcgccatgcgctttttcctcagcacacgggccgtctcatcgagaagcaggaacatcggaacgaaatctgcatattcttcgaggcacttctttgcaaattccgctttttccttcgatttctctttctccggcgcatccgtctgcggttcctcagtcccattctttgcctccaggatcgcattcaccgccgtgtatgtcattctgcggtcgatccggacgaccgactcacagatcttatgtcccacgatgatccctttttcatcgatatccatgaggcagctcattgccaagcgatcgcagcccgcattcagggaacagatcccgttggaaagccggtgcggcagcatcgggatcacacggtccacgagatacacgctcgttccgcgcttatatgcctccgcatcgagagacgtcccctccttcacatagtgactcacatccgcaatatggactccgagatggtagatcgtctccccgttgatcgtctccttcgacacactgaccgcatcgtcgaggtctttcgcgtcctcgccgtcgatcgtcaccatcgggacatctctgagatccactcttccgttcttcccgatctcctccgccacatagtctgcggagagttcctccggcgcatgggaaacttcttccatcacgtcctccgggaactcctccggaagtccgtaggcacggacgatcgacaggatatcgactcccgggtcattgatatgtccgaggatctcctgcacatgtccctccggattcttatttctggtcgcatatgtgtccagtttcacgactaccttgtgtccggagacagcgccgttctctttcccctgcgggataaagatgtccatcgtgatccgtggattgtcgggaatcacaaagccaaagcttttatttttttcaaaggtaccgatcagcgtctcgttggcatgttttaatacctttaaaactctcgcctccgcgcggccgcctcttccgttttcatcaataatgacctggaccgtatccccgtccatcgcgtccccggtatcatccggcgggacaaagagatcgccgtcgcgtccctcgatcgtcacaaatccaaagcctctgtaatgcgctgaaaagatccccgtctgcgcaaacacctcggatctcgcgtactttcccttcttcgagatcccgaccttgccggaagcgaccagttcatttaagacctcttccagatcttttctctgctccttcggaaccccgagaagcatcgcgagttcttttaatttcatcggaacatatgtcggatccttcatcagggtcagcagcatctgtttccgctcttccattaacgtttcttccattcttctccttgtcatatcaaaaacagtttttcaaaagttcccggcacagacttcacgccgggcagccgcaaataaccggatagatcctgcggacagttctcagacagtgcagcttccgatcttcgtgttaaacaaaaacactcctgcacgggaattatcgctgcaggagtgttcgtcatcttaaaattagattacctttaaatttaataccagggcaagtacaaaaatcaggactgccgcaatttttgtaaatttctcaaggttgccttccatagaacggcctttattttttccccagtagctctcagccacaccgctgatcgcgccaagtccggaagtctttccttcctgcatcaatacgatcaccgtcatcgcaatacataagatcacgaatacgatcgtcagaataattctaatcaccgactacacctcctgtccacagataaaagaatcatagcataaaacg

SEQ ID NO: 2132 - DNA, 326 bp, Unknown
  gut microbiota DNA sequence
ctcccgtaggagtctgggccgtgtctcagtcccaatgtggccggtcaccctctcaggtcggctactgatcgttgccttggtgggccgttacctcaccaactagctaatcagacgcgggtccatctcataccaccggagtttttcacaccgtaccatgtggtactgtgcgcttatgcggtattagcaatcgtttccaatcgttatccccctgtatgaggcaggttacccacgcgttactcacccgtccgccactcggtaaataagaatccatccgaaaacttcatctcatttacctcgttcgacttgcatgtgttaggcacgccgcc

SEQ ID NO: 2133 - DNA, 402 bp, Unknown
  gut microbiota DNA sequence
aatccatttaactggtcttgggcttttcattgggatcaaaatagtttattagcatttgcacctttaaagctctctttgattgcttcaagtgttgctaaagttcaagctatatggtctatcaatgttgctttattaatcagtagcattgtcgctgcttatattggtcgtaaaaaattacgccgtttaggaggcgttattcatccaataaatacaggtgctattggctctacctctgctgttttaaatgtagcttctggttatgcttttggttgtgttatcgctgcacttcctgcttttgctatgataaagtctgctcttttaggactctcttttggtgatggtcctttgttctcttctatcattactactaatatcatggttggtattacaggttcctcttct

SEQ ID NO: 2134 - DNA, 904 bp, Unknown
  gut microbiota DNA sequence
attctggaggttgatacatctatgatgcagaaatagacctgcactatttgttcgaatatttatatttaatatgaaatttaataaaattcttgatgttctatatccccgccgctgtccggtatgcggggatatcacaggcggcttcgggcggatgatctgcccggactgccttcataaactatcgtttgtaagatcaccggtatgtaaaaaatgcggaaaagagattgaagacgggagtctggagttctgcccggactgcatgcgccatccgcgtgcctttgagtacgggatcgccctgttaaattacgatgagacggcgaggcattccatggcgcaggtcaagtacaataataagagagagtacctggatttttacgggacagccctgacggcacggtacggacggacgatccgccggatgcaggcagatgccctggttccggtgccggtccatgccacgaggaaaaagacccggggattcaatcaggcagagatcctggctcgggtcatcggaaagaagcttgagattccggtgatgccggaaatgctggtgagaaataagaagacgctgccgcagaaggatctctcggaggcagagcggcttaagaacctttccggtgccttcgcggcgggggagatcccggaggggatcaggagcgtgatccttgtggatgatatttatacaacaggcagtaccatcgaggcgtgcgcgagagccctgcgggcatcggggatcagccggatctatttcgttgtgatctgcatgaccgggggcagataggacagggaaaagtgatatgcatacaggttatagaatgagaggaactgcataaatatgcaaaagcatatgcataaatgcttgctttttgtataggcctgtggtatagtgggttccgtcgaaaag

SEQ ID NO: 2135 - DNA, 1413 bp, Unknown
  gut microbiota DNA sequence
gaatagatcatggtcagattgtgccggaagacggcggcaggatcaccaatgtggcccgcggcgatcttgccgtgaaaaaaacggtatccggaaaccgcggagagcggaacaggaaattccgcttcacgatcacactgtcaggtgtatcacagacgggaatcgatgccgcggcattcacggatggaaatttcgagaacggagtttcagagatttccttaaaggacggggaagagtaccggtttgaggagatcccgtcaggattttcctacacagtgaccgaggcagatgacgctttgcgggacggatatacggttacagcaaccggaacatccggaacgatcccggcgggagatacggtggaagctgcgtttgagaaccggaaaaatgaagatccgacggttccgacacagccgacgacaccgacaagtccgtctgatccgacaacacctgtcactccgacgagaccgtggcatcatgattccgatgacccggaggagacggatccgacgaaacgtcctccgaagatgccgaccgggcagtcaacggagactgtgacagagacagatccggcaggtacgacctcaccggatgagactgcggaaagctggacggaaacaacctcttcggagaccgaaaccaatatcgaagaaactgccacggcggaaaccgcgacagaaaccggcacagagacggataacgatgacagggataacccgaaaaccggtgattccacccatacctggatctgggcggttctcatgatcctctccgcattcggtgcgatcatactgcacagggtgaagaaggacgatgagaaagaagaaaatatgaagtaaccgaaaatgaaaaagctccttcggactgcagagagattctggcggtccgggggagctctttttgtaggaagttcctttggaatgggtcgaggcatattctttttatttggaatattttcgttcgtatggtatactgaacacagcagtctgcactcttactgggagtgagagaaagggatgaatcgacattatgaataaacagcagctcgcccagaaaatctgggcttccgcaaaccagatgcggtcgaagatcgaggccggagaatataaggactttatcctcggttttattttttataaatatctttccgataaagaagtccagttcttaaaggaaaacgattgtgatgacgaatatttaaaaacattgtcggaagatgatccggagacggtggaatgggtgcaggagaatattggatattttatctcatatgaaaaccttttttccacatggctgaaaatgggaaaaaattttgatgtctccaatgtgcgagacgccctctctgcgttcagccgcctgatctctgcaacgcataaaaatgtgtttgacaagatttttgatttaacattcctttgt

SEQ ID NO: 2136 - DNA, 524 bp, Unknown
  gut microbiota DNA sequence
aaaatattttatattgagtgaggattacatatggaaaattataagagtaagatcataactgcggaagctgctgttgcagcagccgtaaaagacggcgactgggtcgattatggattcggcggaggcttcccggaacttcttgataaagcacttgccgcaagaaaagggcatttgagggatgttaaaatccgtggcggtctcgtgatccgtccgcgcattgaggtcgttgaggctgacccggaacaggaaagcttctcctactacagctggcatatcggtgactacgaacggaaactccagacccgcggtctcgtaaaattcatgcctgtggtactccgccttctcccgacgctctaccgccagcgctatatccggacagatgttgccttcgttccggtatctgctccagatgaaaacggctactgtggtctcggcatctcaaacttcgcatggagaaccatgtttgagagtgcaagaactgtgatctttgagatcaatgaacattatccgaagcttcagggtgt

SEQ ID NO: 2137 - DNA, 331 bp, Unknown
  gut microbiota DNA sequence
gacgactttgtcagggtcaatacgcctaagctgaaatgcttttaagacgtcttccccaaaagcctccagggcgacatcatacggtgtacgcccattcaaactctcccgcggtgttgaattgatgtggctggtgattagattcacatcccattgagtcaggaattcaaaggtagttcgtttcggcaggatcatgcggagcatggtgtgtgcctgttcaatgccgcctttctgtccgcttctcatgggatcacagtaataaatgttggttctctggataccggtaacaccggtttcgagagaatcaggatcaccgaattcagcgcctctgtcg

SEQ ID NO: 2138 - DNA, 1127 bp, Unknown
  gut microbiota DNA sequence
attgatggagcgtatcggtgaattgaaggcaattcttgcagatgaaaagaaattacttggagttatcaaagatgaaattgcactgatccgtgacaaatatggcgatgaaagaagaacacagattggatttgatgttgatgatatttccatggaagatctgatccctagagaaaatactgtgatcacaatgacaaaacttggatatatcaagagaatgactgttgataatttcaaaagtcagaatcgtggtggtaaaggtatcaagggaatgcagacaatcgatgaggattacatcgaagaactgtttatgacaacgacacatcactatatcatgttctttacaaatacaggacgtgtatatcgtctgaaagcatatgagattcctgagagtggaagaacagcacgaggaagtgcaatcgttaatctgcttcagttacagccaggagagaagattacagcagtgattccacttgtagattacgaagaaggaaaatatctgttaatggcaacgaaatatggtgttgttaagaaatcatctatcatggaatatgcaaatatccgtaagacaggattagcagcaatcacattaaaagatgatgaccagctgatcgaagttaaatatacggaagatgatgaggatgtattccttgtaacgaagaatggacagtgtatccgtttccatgagagtgacgtcagatgtattggacgaacttctatgggggttcgtggaatcaatctgacaggtgatgacgaagttattggaatgcagcttgacagtcagggagaagcgttactgatcgtatctgcaaatggtatgggtaaacgtacactgacttctgagtttacaacacagcatcgtggtggtaaaggaattaagtgctacaagatcacagaaaagacaggtgatgttgtaggtgtgaaggctgtgaatgacgataatgagattatgatgatcacaacagagggaattatcatacgtacagcggtagattctatttctattcttggaagaaatacttctggagtaaaagttatgaatgttggtgaaaatgttgaagtagccagcatcgcaaaagtccgtgaagagaagcttgaagacgaaatggaaaaaaatacaacagaagaat

SEQ ID NO: 2139 - DNA, 1164 bp, Unknown
  gut microbiota DNA sequence
gtagatgaattgtctatgtcctgatttcgttatataataaaacaatgataccaaggtcaaaatctgatgcagctttatttgcaggaaaatttatgatattttggcagtgacaataaaatatttttggaggaaaacatgagaacgattcatacagatgagatcatcaagaatataaaagagatgtgcatcgaggcaaatttatctctgacagaagatatgaaatgccgttttaagaatgcaacagaaagtgaaaagagcccattagggaaacagattttaaatcaattgcaggaaaatatggaaattgcagcagcagatcagattccaatctgtcaggatacaggaatggcaatcgtatttttaaatatcggacaggatgttcatattgagggtatggatttacatgatgcagttaacgaaggggtgcgtcaggggtatacagaaggatatcttaggaaatctgttgtaaaggatccgttgatccgtgagaatacaaaagataatacacctgcgatcatgcatatagatattgtcccaggggaaaatcttgaaatcctagtagctccaaaaggatttggaagtgaaaatatgagtcgtatatttatgttaaaaccagcagatggagaagaggggataaagaaatcagtaattcaggcagtcaaagatgcaggacctaatgcctgcccaccaatggttgtaggtgttggactgggtggaagttttgaaaaagcagcatttctagctaagaaggcattgacgagaaacttagatacaccatctgagaagccacatattgcgaaattagagaaagaattgttagaagaaatcaatcagttaggtattggtccaggagggcttggaggttcaacaactgcgttaggacttaatattgagacataccctacacacattgcgggaatgccattagcagtaaatatctgctgtcacgtaaatcgtcatgcacatagagtgttataaagagttagatattatctatcgttcagacgaaattttgagaatatagtattttttaaatacaaggagtagaagattatggagaaacatttaaatgttccagcaaatacagaagagttggcagagcttaaatctggagattatgtatatttgacaggaaccatctatacagctagagatgcggcacat

SEQ ID NO: 2140 - DNA, 848 bp, Unknown
  gut microbiota DNA sequence
tgcttgatctctttctttacgatcgcgttctcctcatcctctgtgagcggagcttcacgcttgtcgatctgcgcgttctttaatgcggagagaagcatggaaagggaatcttttctctctttatcttttgctttcatcgactcgaccatagctgctcttacaacatcgatcttactcatcttatattcctcctgtctatgcggtattcccagtcaaaacaactggttccgcatgttcctgtgatgatataatttgtaaacttgattagttctttccgaactcactgagtttcaagttcggatttctctcctcgaccatgccgacactccagctgttgatgaataacaataacggattgcccttgaggtcgcagatgcgcttcatgtcagaagtaccctggatcttcgccacatccacttcctccgggttctcaacccagcggatgtactcgaacggaagctgttccagacggacatcgacattgtactcgttctttaagcggtaggtcaggacctcaaactgcaggacaccgacaacgccgacgatgatctcctccataccggtattgaactcctggaagatctggatcgcaccttcctgggcgatctggttgaccccctttaagaactgttttctcttcatggtatcgatctggcggactctcgcgaaatgctccggtgcaaaggtcgggataccctcgaactggaacttctcgttggacgtacagagcgtgtcaccgatggagaaaatacccggatcaaaaacgccgatgatatctccggcataagcctcgtcaatgatcttacggctctcagccatcagctgctgcggctgggtcagacggatct

SEQ ID NO: 2141 - DNA, 1643 bp, Unknown
  gut microbiota DNA sequence
ctgtgaagctgcacttttgggggactgcgccgtcataccggaagtctgtactggattttgtctgaacttctggctattcggccgctgtactctttgagcagttttcatgtaaaacggcaggtctgttccctgcggtattccctgctcctgccgcgctgtttccacctgttgtttttctgtttccgactcagaagttttctccggatccaggttcgccgtctgaccattctcctcttcatccccggaagtctcttccattttccgctctatcggtctgtcttccatatttccgcatgtgtcatccggctttttatcgatttcatcgtcttcccccgacaggtagaacctgccgcggtcttcactttgttcctcctgctgctgtacttcatgatccgcagtgtcttcctcttccgctctcccatcatatgacggcgctttctccgtctttaggtctccctctgcaccgctcagctctgctgcatgcgccgtcttttctctctcgtctgattccaccgtatgcacattctgcttctccggggctccgctttcctcttttttccccggtcccggatcatgtacgctcttttcctcctgctctctccgctcttcttccctggcgatctcctcctcgatctcttttaccaccttggaaaccgcctgtgtatccattcctttttccgcctccggcagcatctgggcagtaaatttcgggaccgaaaggaccggattctctccggtatttccctcctccgctgccagagcatcctcccagatcgtcttatagcaccgccaggaattctttacgtcatggaccgacaagccgaaatatgtatcaagtccggtaccgcttccctccacgttcttcgcgtccacattgacccggaactccccgtttccgccgcgaacgaaaacattcccaagaaatgtctcacgaccgcctgtccctaaaagatacgcaccaatggcattgccgcccatatagatccgcttcacattgacattgatcctgcactgcccgttccgcgcctccagcttcgcgaatcccacatttttccctttcttttttccttcgtactcgtaaatataagaaatcagtctgcgataatctgccataatcaaaaacactccttctgcacttatgtatatgcggaaggagtgtttctcataactattttttaattgtcatttgccatcgatgatcttatccggaaatatgccgatctttcagagagatctattatttgcggatcgctccggattttacagccgcctcagcaacacgttttgcaacatgctctgcaacgccttcttcgagcgcacccggaatgatatactctgcggagagtttgtccggtgttacaagctcagcgatcgcctgggctgcagcaaccttcatatcgtagttgatatctcttgcgccgcagtctaatgcgccgcggaagattcccgggaatgcaaggacgttgttgatctggttcgggaagtcggaacggcctgttcccattacctttacgcctgctgccatcgcctcatcatacatgatctccggattcgggttcgccattgcaaagacgatcggatctttcgccatcgtcttgatcatctccggcttcagcgcgcctgctacggacacgccgataaat

SEQ ID NO: 2142 - DNA, 564 bp, Unknown
  gut microbiota DNA sequence
gttctcaaaaaatctggttatgatggatatgtattaaaagacgcaccggagaaagttcttcagttcggtgagggaaatttccttcgtgctttcgtagattactggttcgaccttgcaaatgagaaagcaggctggaacggaaaatgctgcctggtacagccgatcgctccaggtcttgcaaagatgatcaacgagcaggaaggtctctacacactgtaccttcgcggaagcgagaacggacagaaggtagacgctaagagagtgatctccagcgtaaaccgctgcttaaacccgtatgagaaagaggattacgagaagatgatggaggttgctgcaagcgacgaccttgagatcatcgtttccaacacaacagaggccggtatccagtatgatccgtcctgcaaacaggatgactgcccgccgtccagcttcccggcaaaattaactcaggttctctatcatcgttacaaagcaggaaagaaaggtatcatcatgcttgcctgcgagctgatcgacaacaacggtaaagagctcttaaagtgcgtaaaccagtacatcgagcag

SEQ ID NO: 2143 - DNA, 1065 bp, Unknown
  gut microbiota DNA sequence
gaacggaaatccgatggacatccagataacaactacgatgatccatgcgatctgaagaacgatggacatcgggatcatgttggagatcagagtaccaattttgagatccggaacgtactttgtctgagcaacacttaagatcatccagatatatgcagacatcggtgtccagcagttgaacggggaatcaccaattctgtaaagtaactgtgtgaagcccggatggtaaccgagaagcatgaacatcggaacgaagatcggagcgaaaatagcccacttcgcggaaccggaggatacgaagatgttaacgaaggagcagaggacgatgaaagctacacagagcggaatgcctgtgaaacctgcagcctcgagaccatcagcacctgcgatcgcaaggagtgtaccaagctttgtccagttgaataagccctggaactgtccacagaagaagcagaacagaacgtaggagcccataccagccatctgctttgacattgctttgttgacatcaacagcgttcttgaatgtacctgcagtgaagccgtatgcaagaccgcagagacagaacagaacgaagaggatcgggatcaggccctttaagagcggggatccgataaacgcaccgttttcgccggaaagaagaccggtgaagaatccgattgcaatgatgatgatgtagatgattgcggtaagacctgcagcattaagacctttcttctgctgcggagtaacttcttcaagctttgcttctccggcaccctcgtattttccgaaacgcggctcgatcatatgtacggaacagaatccgataactgctgcgcagaggaaggtggagaagatcatgaagaaccagttacaggtcgggtcaacctggaatgttgtatccgggatgaatgccttgatcgcatcgtttgtaagaccctgtaacagagtatcagtaccggcaaccatcaggtttgctgtgaaaccggcctgagcacctgcgtaaccaaccatcataccaactaccgggtgcttgcctacgcccatgtaaacgatggcagccatcggcgggataacgaccat

SEQ ID NO: 2144 - DNA, 828 bp, Unknown
  gut microbiota DNA sequence
gaatgcgattacgtacgggatcatagctgcaggaacgttctttaaggaactgttcagcatggagatcagcattccggactcctcacagagaccaataccgagtgtcatggtgataaccagacctaacggagcgaagcctgtgaagttctttaccatgttgcctaagatccagtcaacgccgtctttggagaacaggttcgcagatgttacgacctctccggaagccgggtttgtaagggcaacgcccattacactgaagatgcagccgatgatggctgtgataaggaagagccagcagaacagaatcgctggcggcggcaatttgttacaaactttttcgataccatcaatcagtttgtccacgccggttttcttagcggtagtgttttcactcatttgaaaaacctcctgtaaacttaatttacgggacctaaacccccgagatcccgcttgcatagatattatactataaatagttcagaaaagctatatgttttttataaagtgtttatattttttatttttacattagaaaactgaaaaaatagccggagatttcaccaaatggaatgataaatatttggtaaaaatgcataaagcaggaaatgacgatcataagaagattattgcgtttatagtggattcatgttaagataaagtatcgtgcatgaaacgtgatgacagacaataaaggaatcctgcctgatggattcaaaaaagactgtcagtggcagcagctgccaatgtgcggttaattgaatacctgggaggataaaatatgtttggtggaaactttcagacatggaaacttcattcggcgcaggacta

SEQ ID NO: 2145 - DNA, 1305 bp, Unknown
  gut microbiota DNA sequence
cgcggattttgccgatttggaatgcgaagcatcggcaaaatcctgttacagtgcgcgggcatggagtgaccgtgtactgtaaccagaaatgtcagctgtctgcgggcaattcataaaaaagacagcatgttcagctgtgaaaaaacatgatcaggccgcagggccgtacaatatcgggaaaggggatatcttcatgacgacagttacacttggaaagaccgggatcacggtcaacaagaacggattcggcgcgcttccgatccagaggatcacgaaggaagaggcggcaaagcttttaagaaaggcgtacgacggcggaattacatatttcgatacggcgagagcttactccgacagtgaggagaagatcggttatgcgctcagtgatgtcagaaaccatatctatctcgcaacaaagaccgcggcaaaaacagcggatgaattctggaaagatcttgagaccagcctgcgtctgttaaagacggactgcatcgatgtatatcagttccacaacccggcagtctgtccgaagccgggcgatgaatccggcctttacgatgcggcattaaaagcgagagaacagggaaagatccgtttcatcagtatcacgaaccatcgtctcgcggtcgcaaacgaggcggtcgattccggcctttacgcgaccttacagttcccgttctgctatctctgcagcgatgcggatctggcgctcatggagaaatgtaagaaggcggacatgggctttatcgcgatgaaagcgctgtctggcggtctgatcaacaactcaaaagcggcttatgcattccaggcgcagtacgacagtgtacttccgatctggggagtccagaaggagagcgaactcgatgaatttttaagctacatcgacaatccgccggtgatggatgacgagatccgcgccctgatcgagaatgacagaaagcagctgttcggcagcttctgccgtgcctgcggctactgcatgccatgcccggcagggatcgagatcaacacctgcgcgagaatgtccctgcttctcagaagatccccgtcccacctccagctcacaccggaggtacaggcgaagatgatgaagatcaaagactgtctccactgcggccactgcatgagcaaatgcccgtatggactgaatacaccggagttgctgcagagaaacctgaaggattatgaggagatccttgcggggaaggagattttgccgggaaatttctaggataaataagaaatgatctgcatattcggaacttacatatgcaaaaaagaaaaaggcttttcggagaacaatct

SEQ ID NO: 2146 - DNA, 2182 bp, Unknown
  gut microbiota DNA sequence
ctcctcgatcgggaacggcggtacctcggactcggagaggattcttaagaatttcgctctcatctcgatggtacctgtctttaaattcgggtttgccgcgccggaacgcttttcgatggttccgacaaccgctactgtaaactcacttcttaatttctcagctttcgcgaagctttcagcgccgcaatcgctctcctcaaagatgatctggatgattccggaacggtcacgaaggtcggtgaagataataccgcctttgtttctgctcttctggacccatcccataagtgtcatttcctggcctacgtttgcctctgtgacttcagcacagcgacaggaacgctttaagcctgccattgattctgccatgattttcctcctgaaacagccgggatgtcaacgatcccaactgaatgtattatggtatatttagtgttttaagtcttccttatagaattccttaaattcactgtagccttcttttccaagctgttccttctggaacttcttgttcttgttcatctgtgcaacaaggatgatctttccttccttgcgggccgccatcgcctctttcatgatggaagcaagtttctcggagctcatgcccttttcaaagagccatgcctctttctcgttgccgcccggaacggtaaatccgttgtcgagaagaatggtaacaatccgctcaaatccgatggagaaaccgcaggccggtgtgtccatgcctgtgaattttccgatcatcttgtcgtatcttccgccgccggctacggaacctccgaagccttccatggaaacctcgaagatggttcctgtgtagtagcccattccgcggactaaagtcgggtcaaacgcaagcttgaagcttccatcggaaacctcgccgactgtctccatgatctgcgcaaggttctccgcagcgccgtcctctaaaacgcctgcaaggatctcgcccatgcggcggacgcctgctgcatcgtttgttgcctggctcatcagatccaggtatttatcggctgtctcctcggagtagccgttttcgatgagttctgcctttacgccgtcggtaccgatcttgtccatcttgtcgaccgtgatgaatactttatcgatatcttcctccgggaaaccgctgtatacagccatcgcgcggagaagctttctgtcgttcacgcggacctcaaagctgttgtccgggcagatcttctttaacgctgtcgtcgtcgcaaggatcagctcgatctcagcctggttcgtcgcatcaccgagaatatcgatatcgcactggacgaactgtctgaaacggcctttctgcggacggtctgcacgccatacgctgccgacctggagtgccttgaacggggacggcaggtttgcagagttattggaataatatctggataacggaagtgtcagatcgtagcggagtccgccgtctgccaggtcgttttctgtctctgctgtctcgatatttaatttctcgccgcgctttaagatcttgaagatcagcttctcattgtcgccgccctgtttgctaaggaggttctcaatgtgctccacgcacggagtctcgattgcggaaaatccgaacccgcggtaagtctctttgatctggttcagcacataatcccggatctgcatctctgccgggagaatatctttcatgccggtgaccggctttttctttaatgccataaagctacctctgtttctctctttgtcgcgcaatttcacgcctacgttcaccataatacgctgattgccttaggttttcaagggttttttctttccttaataaaagtattatatttttcggacatggataagtcaacttattttgtgagtttttcccatcccgcatctaaaagagcggcgtgatcagccgcctgcacagaaaaaggacctccgccaggaaacggaagtcctttttccttatattatacgtctttctacagtccggtccagccgatgctctgtaagatcgtcaaggatacgaatgagaggatcacctggcatccgaggagcggcatgagccactttgcatattttgtccagtctgtctttgcgatcgcgagggaacccatcagagtacctgctgtcgggaagaggcagttggagaagccgtcaccgaactggaatgcctgtacagcaacctgtcttgtgatgcctgcaaggtcagcaa

SEQ ID NO: 2147 - DNA, 2728 bp, Unknown
  gut microbiota DNA sequence
gataagaaaagagtacgataaaaagtagaatcagaaaacgtgtattgaacaagggtagacggtgtacctgaggagcaattcaaaaaaatttaaaatgaaagaacaatttagaattggaatgcagacagtacatagggacaataaaacggatacccacaggaggaaatataaaatgcgaaaagtaaaagtcgcagcagtacaaatgcgctgcacaagagacgtgaatatgaatatcgcaaatgcggagaaacttgtgagagaagcggcggcggacggcgcacagatcatcctgctcccggagctctttgagcgccagtatttctgtcaggagcggcagtacgaatattatgagtttgcgaaaccggtggaggaaaacgatgctgtaaaacatttcgcaaaggtcgcggaggagctcaaagtcgttcttccgatcagcttctatgagaaggacggaaagcgcctgtttaacaccgtcgcgatcctcgatgcggacggaacgaaccttgggatctatagaaagacccatattccggacgaccactattatcaggagaaattctatttcacaccgggagacaccggatttaaggcattcaagacccgctacggcaccatcggtgtcgggatctgctgggatcagtggttcccggagaccgcgagatttatggcagtaaagggcgcagagctcttattttatccgacagccatcggcagcgagccgatcctctctgtggacagcatgccccactggagacgctgcatgcagggacattccgcgtcgaacctgatgccggtgatcgcggcaaaccgcgtgggactggaagaggtaacgccatgtgaggcaaacggaaaccagaaatcagccctgaaattctatggctcttccttcatcacggacggtgccggtgaagtgatccggtctatggaccgcgacagtgagggcgtcatcacagcggagttcgacctggatgagctggagcgcgagagattctcctggggactcttcagagatagaagaccggaaatgtaccacgaataagaaataataaaattcagtgaaggaaaaggcacatgccatggaatgaacattggttccaggggtgatgtgccttttatcatgaaaagaagcagtgagagtgaaccctgttaacgtataactgggatttatataaataatagaaaacatgtatgtcagtaattcctccaatttattgaaaattaaaagaatttagggtatgattacgaaggaaatcaatttagtcttatggaggaaaaagacatggaatatagaatcgcagcgatctccggcgacgggatcggtccggaaattgtaagagaggcaaaaaaagttttagataaagttggacagaaatacggccataaattcaactacgaggacgtcctcatgggcggaatctccatcgacacctacggggtgccgctgacagatgaggcgcttgagactgcaaagaagagcgatgccgttcttttaggcgcagtcggcggaaatgtcggaaactcccgctggtatgatgtggctccgaacctgagaccggaggcaggtcttcttgcgatccgcaaaggcttaaatctgtttgcaaacatccgcccggcgtacctctacaatgaccttgccggtgcatgcccgttaaagaaagagatcatcggggacggctttgacatggtcatcgtccgcgagcttacaggtggtctgtatttcggcgagcgccacacagagacggtagacggtgtggagcaggcaacagatactcttgtatacagtgagaaggagatccgccgcgtagcgatcaaggcctttgagatcgcaatgaagagaaaaaagaaagtgacgagcgtcgataaagcaaacgttcttgattcctccagactctggagaaaagttgtagcggaagtcgcaaaggactatccagaagttacacttgagaacatgttagtcgataactgcgcaatgcagcttgtcatgaatccgcgccagttcgacgtcattttaactgagaacatgttcggcgatatcttatccgacgaggcgagcatgatcacaggttccatcggaatgctgtcctccgcaagcttaaacgagagcaaattcggtctctacgagccgagccacggttccgcaccggatatcgcaggcaaggacatcgcaaacccgatcgcgacgatcctctccgcagcgatgatgctccgcttctccttcgaccttgataaggaagcagatgcgatcgaagacgcagtgagaaaagtccttgcggacggttaccgcactgtggatatcatggatgagggcatgaagcaggttggaacgaccgagatgggcaacctgatctgcgagaggatctgagaatgaccgggcccggatttctcagtgagagaaaaaagggagagatcacgcagatacagaaagtaaaatagaaagaatacaggtaactgttcagtaggtctgggcacttgctgcgctgaccgtaataaaacacaggcttgaaggcaaaaatcccatcggcgaagccgatttgaaatggatttttgctcgtaactgtgagggtactgagcagttacgaatacagaaagacagagtacatataaaacatatgcagtctgtctttcttttttttacgcggacaacgagccaaagtccgctgcttctattccaacatggttcattttgtttatctgcttgagataaaatccgattttcccagagcaatct

SEQ ID NO: 2148 - DNA, 575 bp, Unknown
  gut microbiota DNA sequence
atatggaactttttattttttagtgaaacgcctctttcgcatactgttccagttcatccctgaaatccgggtgcgcgatcgcgatcatggcctcggcgcgctctcttaaggtctttccggagaggttcgcaataccgtactcggtcgcaacgctctggatcatggtacgtggagcggatacggtggagccgcccggaatgaacggaacgatgttggactttaaggtgccgtcctttgcttttctcgcggagttgatgcagatatatccttttcctccgacggagcggtaagcgccctcaaggaaatccatttgtccaccgatgccggagagctggcgggttcccgcggactcagcattctcctgacccatcaggtcaagctgcacgccgccattgatgctgatgacattcttcatggttccgatgcgctgcggatcatggacataatcgaggtcagccgggtggaaaagcttcggattttcagagatccagtcatagaattcctgagatcccatcgcgagattccaggtggagagaccggtgtcaaattctttttttgcatttgtgagctttcct

SEQ ID NO: 2149 - DNA, 360 bp, Unknown
  gut microbiota DNA sequence
cgtaggtgtcgtcggaatcgtaggtgtcgtcggggtcgtaggtgtcgtcggggtcgtaggtgtcgtcggggtcgtaggtgtcgtcggggtcgtaggatccttcgggatagcctgtcctgccgcaattctgataccacagcccttacaataggtgtcccccgtatagccatctgcgctggcggtggcctcaactctgccgcgcacctcggtgccgcccgtgtgatgatctggattcagttccccataagccgcgccgcagacagaacacaccgcctgatctttgcaggtggctgttccgccggagtgatcttccctgatgtcacttgcctcacagtggatgcatttcttccaatgttgatc

SEQ ID NO: 2150 - DNA, 2317 bp, Unknown
  gut microbiota DNA sequence
atcctgatcgcgcttctctactggttcttcggaaccgagatcggatgctccatccgtgcaacaggttccaaccagaacatgtcccgcgcgcagggcatcaacactgattttacaaagatcctgggactgatgctctctaacgggatcgttgcctttgcgagcggcttatatgcccagtatcagggctttgcggatgtcaacgcaggccgcggtgccatcgtgatcggtctcgcagccgttatcatcggtgaggtcgtattcggaaagatcagccagaacttcggtttcaagttgttctccgttgccttcggtgcaatcatttattatctggtccttcaggtcgtactctggatgggattaaattccaacgatttaaaactcctgtcagctcttgtcgttgcggtatttcttgcgatcccgtacatgaaaggcaaatatttctctaaaccggtaaaaagaggaggtgcacctcgtgcttgatcttcacaatatttataaaaccttcaacgcgggaaccgtcaatgaaaagactgcgttaaacggattaaatcttcatttaaacgaaggcgattttgtcaccgtcatcggcggaaacggagcaggaaaatctaccatgttaaatgcggtcgcaggaacgtggcttgtggacgaaggaaaaatcaccatcgatgatatcgacgtgacaaaactcccggagcataaacgtgcgaagtatcttggacgcgtatttcaggacccgatgacaggaacggctgccaccatgcagatcgaggagaacatggccctggcggcgagaagaggaatgacgcgcttcctgagaccggggatcaccgcgaaagagagagaattctacagagaacagttaaagatcctggggcttggcctggaggaccgccttacatcgaaagtcggccttctctccggcggacagagacaggcgctgacacttcttatggcgaccttaaagaagccgagacttcttctcttagatgagcacacggcggctctcgacccgaagacggcggcgaaagtcctcgagacgacggataagatcgtaaacagtgaacatctgacaacgctgatgatcacccataacatgcgtgacgccatcgcacacggaaaccgcctgatcatgatgaacgcgggccatgtgatctacgatgtggcaggtgaggagaagaagcacctgacggttcaggatcttctcgcgaagtttgaggaagccgcgggcggcgcgttcgcgaacgaccggatgatcctctcataggctttcgggatgcggaatcagaagcgatatattatatagaagaaacagatcagaagatggaaaaacggcagtcgattttgcgaaaatgcgggaccggctgtctgtttttatgtggcagtaaatgcagcacaaaatggtagctgttcagtaggtctgcacacttgctgcgctgactgtaataaaatacaggcttaaaggtacaaatatgtgggcagacattcttttatagaaaagactggatttttttacaaagacgttgtataaagaagatgcggtcgagaggatgtgcagccggctgcagtcaaaggcggcagagagaatgccgctttcaggaggaagaatttatgagcaaatttgcaaaaaatgataaaacaaagacaaatgtgatgcggcttttagatgccgcaaagatcccgtatgagtcaaaggagtacccggtggatgaacatgacctctccgggagccatgcggctgacatgctgggagtggaccacgggagtgtgtttaagactctcgtgctgaaaggagagcgcacaggatttctcgtctgctgtatcccggtggatggggaagtggacttaaaaaaggcggcaaaagcggccggagataagaaagtggagatgcttccgatgaaggatcttttgaccacaacaggctatatccgcggcggctgttccccgatcggcatgaagaaaaagttcccgacatttatcgatgaagcggctttaaattatgaaacgatcgcggtcagcgccggccagagaggcttccaggtcctgctttccccgcaggctcttgcggactatgtcggggcaaaacttctggatcttcagcaaaattagttgacataactgaaaacgttatgggaaaccactcaaaaatgggaactcaatatttaacaaaattgtaatatttgcaatattttatacttgccaatactaccaaaaatccagattttgtgtggattatatttggaaaaactattaaaaaaatgtaacaatctttaaaaaacaggctgtaaaatgtaacaaagttgtgcaggacttattg

SEQ ID NO: 2151 - DNA, 27304 bp, Unknown
  gut microbiota DNA sequence
gacggagaaagagggtattcaaatgaatccatggaactcatttcttcagacagtctttcagtttgtgaaatcactcttcggcggtgtgacaaagaagatgcaccggaatgcggcagtcctcacgatgggcgcaacactgatcgcagtgattccatttacagcggtggacttccagggcggaggcaaaaacgcgattgtcgcgtatgccgagacgcagggaggttcggatgaagacagtctggaggagacagaagatactgctcttccggaaacagacggaaatgttttagaggatgagacgacggcggatgaagcatcatccgcggagacggaagcagatatcaggacagaaacagaaaatacagagacgaaagaggagagcatcacagagcctgctgcaggatcggaaactgcggctgcggatcatggtccggaagaagctgcagaaacagaaactgcggctgcggcggatgaagtgagcgggatcacgcaggcagagccggaaacagaggtgtccggggaagccagggtacaggcggcagcagaagagaccgtcgtggcagaggaacctgcaagagaagcgttcacgaggtattccgaaagcgactacaatgttcttctccggatcgttcaggcggaagccggaaactgcgacatcgaaggacgtgtcatggtggcaaacgtgatcttaaaccgtgtggaggatgatgcattcccgaacacgatcacgaaagtcgtttaccagaagcaccagttttcccctgtgggaaacggatccatcaagcgctgcaaggtcacggccgagaccgtagaggcagtcgagagggcactttcgggtgaagatctgacagacggcgccctgtatttcatgaaccggcgggcatcttccaggaagaacgcaagctggtttgacagacatctggaattcctgtttaaacatggaaatcacgagtttttccggtaaaaactccgggtcagataaaaggattaggataaaaaaggataagggaaaagcggcatgcgacgggcggtgaagatcgttttggagcatgccgctttttacaattgacatttatactccgccatgggataataagacactggtatcgcagaaatacctgtgaaattgaaatatggaaaaacggtttcgctgtgagcaggagaaaatatatgcggcggaatgatgatattggaatacatgaaagaggaaacagaatgaagttaaaaaaagtatttttcgaccttgacgggacactgacagattccatgccggggatcacgaaaggcgttcagtatgcattgaagcattatgggatccaggtggatgacctgaatgttttaaaaccgtttgtcggtccgccgctctccgacagttttaaggagtattacaatttctccgagaaggacgcggaggatgcgatctacgtgttccgggactattacgatgtggaaggatggaaggacaacgcaccgtttgccggagttgaggagatgttaaagtccttaaaggacgcaggactcgaactctatgtggcaacttccaagccggaggtgaccgcaaagcgcgtgctggaatatttccatctgacaaactactttaaattcatcggcggcgcgtccctggatgaaaagcgcgtgaacaaggatgacgtgatccggtatgtgctggaagaaaacgggatcggcgaggaagaaaagaaatccgtgatcatggtgggcgaccggaaacatgacgtggaaggcgcgaagaaaacgggactttccgtggtcggcgtgctttacggatacggcagcagggaagagcttcaggatgccggggcagattatctctgtgaaactccaagagaggttgcagagctgttaagatcactggcttttgcagatggaaattccctgaactgaaaattttgtatcatacagcggctgcgatcctgacggtccggaatgcgaagcagcggcaggatcgtgtttcagtttcagaaaccggacgtttttacgggcagaaaagtgcacggatccgacagtaagaaaattggttacttttcgcgggtaggaattttctgaactgaaaattccgtatgataccgttaaggccgcggattttgccgatctggaatgcgaagcatcggcaaaatcctgttacagtgcgcgggcatggagtgcccgtgtactgtaacaaaattgtacggtaccatgaaatggaacttgaaaaatgatcgatgatgcgctataataggtgtcagtgaaagggaatgtgattcctgggatgttcgacactcctgtctattttgaacctacattttgacatacgggattcctacatccttgaacggatgccaggcctccatcgagtggaaggcagatgtttaagtgcggatgcccacctagcactgctaggcgtcaattattcaggaaacggcattttgggattgcgaaagataaaaaagcagcgagagatcgctgcttcttttcgtttaacaggaaatttgccgatgctctgcattcgttcagattttgctaaggctcttttctaaatatgagaagtatggtatgatgatgccatggtcgacgatacaaaatggtttcgatagacggaaaaagagaagtaactgcaaaggagaaacttttatatgaaaaatgaacggttcgaacggtacatttatacaggtgtgacggcgatcctggtattgatcgcggcggtgttcgtcgtgtttctgtttctggaaaggtcggcggtgtttgcctttctgggaaaggttcgttttgtgctcgcaccagtgatctatggagcggtcctggcatttttaatgtccccggtctacaactggtgctaccggctgactgtgtatacaggaaagtccggggagccaaaggcaagatttaaaaatgaaaaactgggtgcttttttcggaagaagcgtgggaacagctgtcagccttgtattccttttggctgtggtcgtcagcctttccagtatgatcatcccgcagctgtattccagtatcgtagggatcatcaatatgatgccggaatacttccagaatgtgtatgactggctgacggatttcttcgtgaacaatcctccggtggagcaggcgatcttaaatatttatgagcagtcggcccagtatttccagaactggatggagacagatctcatgtcgaatctctcgaacttccagaatttccagaatatcgagaagatcctcggcggtgtttccagcggtgtcatgaatctgatcaccctgacaaaaaatctgctgattgggttgatcgtcatgatctacctcttaaacatcaaggaatcgctctcggcgcagggaaagaaatttatctattcgatcctgtctctgaaggcggcgaacattgtagtcggagagttccggtttatcaaaaaggcgttttccggttttatcatcggaaaactgatcgattccctgatcatcggaatcctctgctttatcctgatgaacctgttcaaactcccgtatgagctgttgatcagcgtgatcatcggagtaacgaacattatcccgttttttggaccttttatcggggctgtaccgtgtgcgatcctcgtattcctcatcagtccgaaacagtgtctgtattttatcggtctgatccttgtactccagcagtttgacggaaatattttaggaccgaagatccttggaaactccacaggtgtttccagcttcggagtcctgttctcgatcctgctgtttggcggcctgttcggatttgtgggaatgatcattgcagttcctctgatggcggtcatcatccacgtttacagacagatccaggatcatttccttgcgaaaaagaatctgagtcaggaagaaaacgactatgtaaaactggaccgcattgacgaaaagagcggtgagtatatcaggcgtacggacaaacagtaagtccggatgttttcacacgggaagaacccgtgtacagtgaccgggccgggtttgcccgggaaaggaattatgaacgagagtaggaaaatgataaactggatggcaggggtcacgacatttgtcgtggcactgctcatcgtgatcgtacttctggacacggaacaggatggagtttctctggcggcagcgtccagaacggtcgctctgacgctggagtcggagagcggaatcctggaaaatgcgccggagacatcgaactttgacgaaaaactttctgatcagtggtatgtaaaatatatggattacctgtatgcgcagggatatcttgacagcggggtgatccaggcggatgagaggagcgcgacatccgcagttacatacgcagtcctttcggactgggcgaagaaggcatcagaggagggaaacgggaaaaccgatgcactcctttcctatgtggatgccggggaccgcgcaaaaaaagcagtttccagcgaaaatttctggaaattttatgatgcgttccgcgcagcagcagatccggaaggggcagttgccgaggtcgagacggatctttacgggactccggacaatgtggacggagctccggcatggacggcatacacaagggacgggaccttccagtttgagggactttatctggataactatattgaccggaagatccggttcctggcgagagacgatgagatcttaaaggtggagacgatggtctctgacgagatcgtctacgagaacgcctggatctctggattttccgggcggactgtgaccgtctttatcggaaatatccagagggaatttccggtaaagggagtattaaaggatgagagtgagatctctggccagatcggggatctgtatttaaagggcggtcagccaaagcggctggtgctgaaaaaggaaaagatcaccggaaccgttcttgcggtccgcgatacggagatcgagatcgatggctacggcagtgtgccgctggcggatcagtttaagatctaccgcacatacggggtcctgagggagcagcagaaaaaggacattcttgtcggttaccatatgcaggagtttgtggttgcagacggggagatctgtgcggcactcacgacggagaaaccggatatcgacgcgatccgtgtcctgatcatgacaaatggctttaaatccctgttccacgactcgatcacgctttcctgtgattcgatggcggtcctggaatacggggatgagaaggatgcgaagacagaatccatcgcggcaggagagacagtgacgatcaagccgggcgactccagactggcaagcggacgtctcaccttcaaatccgccaacgatggcgggatgatcacggtgcacagcttagagcgtgcccagggaactccggtctatccgggacatatggagatcacggaggagcgcgacggactgctgctcttaaacgaggtggatctcgaggaatacttaaaacgggtaacgccgagcgagatgccgccgacttatgagctggaggcactgaaggcccaggcgatctgcgcgagaacttacgcatggcgccagatccagggcaacgcctattccacttacggcgcccatgtggatgacagcacgaatttccaggtatacaataatacattgacgtatgattccacggatgccgctgtgaatgagacgttcgggcagcttctggaatacaacggggacccgatcgaggcgttctattactccacatccgacggacatggaaccgacggaagtgtgtggggagcggatgcgtccaacacaccgtatctcagagcggtgacgatcaacgacaagacgaaaaagctggatctgacttcgaatgaagcgtttgagaactttatcagggacgagaacacggacgcttacgattccgatttcccgatgttccgctggaacacaaagacgaccagcacgatcctggatgagaagatcggcggtgtcggccggatcacgggacttacgatcacgtcgagaggggacggcgggtacgcaaagaccctgaaggtcgtgggaacggaaggttccaagacattctccggacagagcaagatccgcagtgttcttggaaattcatcgcttgtatacaacaggaaagacggatcgacatccacgggatgggatacacttccgagcggctttatttacatcgagaataacggaactgatgaaaaccaggtgacgacgtttacgatctatggaggcggcttcgggcatggcgtcggcatgagccagaacggcgcccagggcatggcaaagcagggaaagacctgccaggagatcctgaagttcttctatgatggatgcgggctgatggatatcagtgaagtgaattgatcgaattgaatattgaaaaaggtccatgaaagcggaatgatcactttcatggaccttttttgtctgacaggaaattcagatggaacttcctgctaaacaaacttttttattaacaaagaagaatggtgctgtaaaactatttccggtacagatatttcggcacgccgttttccatcacgcgcttcggctcgccctggatcagcgggagagcgtaagcgaggaaatcatcggtgatatcgtttcctgctgcggagatccattccttcgggaattttttctcctggttgcagatcaggctcacatcctccgctgcacagtgcattgtgtacggaacatcggagtcacgcttgaaggcgatcatcttttttgtctctccggcgaggacagccttcacaccggcagcaccggccatggcagcttcctcgatatcagtctcggataccatcattccgctgcagcgttggttgacgttcagctcgatcgagcggactttgacgccgaatttgtcacgcacaaagctctctaagacttcgccgcatccggtgagcatcttgtgaccgaaggagtcgagttttgcagcgtcggagtactcacagatgaatgtgccgccctcatcggcgattccctcagagacgcatacgacgaggttcggagactttttgaacgcttcctccaggtctttatagaactgctctaaggagaacggagcctccggaaggtagatcagatatggattgtcgccttcgtattttcttgccagtctggaagccgcggtgagccagcctgcgtggcgtcccatgatctcgacgatcgtgacggatttctgctggtagacagaggcgtcgaggacgatctcgcggaccgtggaagcgacatattttgcagcacttccgaatcccggtgtatggtcggtgaggaccagatcgttgtcgatcgtcttcggaattccgatgaatttcacgtcactgccgatcttctccgcgtagcgggagagtttgtcgacggtatccatggagtcgtttccgccgacatagaggaagtaaccgatgttcatctcacggaaattgtcaaagatcgccggatagacttcactctcgaggtctgccggaagcttatagcggcaggagccgaggtatgcggccggagtcagctttaagagctccagttcttcatcggaaagatctgtggaaagatccatcacatggtctgcgaggaaaccttcgatcccgttgatcattccaagtacatgtccgtccgtaccggattccttaaatgctttgactgctccgtaaagacttgcattgatgacggcggtcggtccgccggactgtccgattacaaggtttttcataagattctccaatctgagtaaatttgcagcgatccgtctgagaaatgaccggtctcgcagcagatgaacttccacccggatctttcgggatggaagttcaggattcgtttctgtatttattatagaaaaaggtgaatggaaaatcaatcatcttttgagcaggttcgataaagtgcgtatgatacaactgcggtcgcagattttgctgcgaaaaatttttttagaggtgtataaaacaggaaaaacaggcaatcctatgatcagtaccaaagaaaaagattaatacttatcctcccctttttaataccttgcctgtttgcttcgtgcagcgggtgaggtattttttgaaaaaataaggaggaatacaacgtaaaaagttttatattcaaaatatttgaatggaaaagcttgacaaagcatatacaaaggattactatcagaattaataatatggttataaaaactacatcatataggatataaaacaaaatcaatgggaaaggaatgcaaaaacgatgagcaaaaaaggatggaaagccggcgcagtcctggcagcgggagcagggatcacagcggtacttgcagcgaagaaacggggaaacagaaatgcagaaaagacggacaggtcttttgcgggaagcaggtctgactaccgcaacacggaaatcggaaagcatgataagaacagcaaggggatctactacacaaacggaaactatgaggcgttcgcccgcccggaaaaaccggcggggatcgaggagaagtcggcgtaccttgtgggaagcggtcttgcgtccctggcggcggcctgctttcttgtccgcgatgcgcagatgccgggaaagaacatccacattttagaggcgatggacattgccggcggtgcctgcgacgggatcgaagatccgacgagaggatatgtcatgcgcggcggccgtgagatggaagaccatttcgagtgtctctgggatctgttccacagcatcccgtccctggatatcccgggtgcgtccgttctcgacgaatattactggctaaataaacatgatccgaactattccctctgccgggcgacggaacaccgcggggaagatgcccacacggacgggaaattccggctgagccagaaaggcagcatggagatcatgaagcttttcttcacaaaggatgaggatctctacgacaagacgatcgaagacgtgtttgacgatgaggtgttccgttccgatttctggctttactggcggaccatgtttgcctttgaaaactggcacagcgccctggagatgaagcggtacttccagagattcatccatcatatcggaggactcccggacttctccgcactgaaattcacccgatacaaccagtatgaatccctgatcctgccgatgcagaaatatctggaggcagcaggcgtggaattccggttcggcacggaagtcacaaacgtccgctttgagatcaaagacggaaagaagacggcccgcgccatcgagtgccgcacaaagaacggggagatggagatcccgctgacggagaaagacctggtattcatcacaaacggaagctgcacggaaggaacgatctacggggatcaggaccatgcaccgttaggagatgcggaagtccgcagcagcggctgctggagcctctggaaaaagatcgcggcccaggatccggcttttggacatccggaaaaattctgctccgatatcgagaagacaaactgggagtccgcgactgtcacaacctcgaatgaggagatcatcgaccagatcaaaaagatctgcagacgtgatccgagaacaggaaaggtcgtcaccggaggcatcgtgagctgccgggattccagctggctcttaagctggacgatcaaccgtcagggacagtttaaaaaccagaaaaaggatgaggtttgcgtctgggtatacagcctgttcaccgatgtcccgggagatcatgtgaagaaaccgatgaaagagtgcaccggtaaggagatcacagctgagtggttgtaccatctcgggatcccggtggaggacatcgaccggcttgccggggaagcatgcaactgcacaccgacgatgatgccgtatatcaccgcattcttcatgccgagaagagccggcgaccgcccggatgtgatcccggacggatctgtgaatgcggccttccttggacagttcgcagagacaccgagagatacgatcttcacgaccgaatattctgtccgcacggccatggaagctgtttacggactttgcggcgtggaccgcggtgtgccggaggtctggggcagcgtttacgatgtgagagaacttctggacagcaccgtgaagctgatggacggaaagtctccgctcgagatgaaacttccgatgccgtttgagatgatgaagaaaccacttcttaagaaaatcgacaggacgatcgtaggaaagcttctgagagatcatgatgttctgaaggactggatgttaaaataagaaaaacatgggcagcgcacggactggagaagtccgtgcgctgctgtacgcggtaggaattttctgaactgaaaattccgtacaatacagttatggcagcagattttgccgattcggaatgcgaagcatcggcaaaatcctgttacagtacgcgggcatggagtgcccgtgtactgtaacagatttcctgtaacgatttgatcctttctaaattttttcttgcatttcaagtatagcatcccctataatatatgtaaattattgtttttgtatagaaatacaataaatattatataatgtaagaagattctttacattcagactatgatttttacgatccgggatccagatcccacagctcgcaccgttgtgggagtggaaatccgcagatcgccggtcagaaggagagattatggagatcagacagttagaatacttccgggccatcgttgacgccggaaccatcagcggtgcggcgagagagcttcatatgacacagccgccgctaagctaccagatgaaaatgctggaggaggaacttcaggtgccgctttttatccgcggtatgaagcatatcacactgacggaggcgggaaaaacgctctacgaacaggcgggaaagatcctgatgctttcggaggtaacgaagcgtgaggtcataaaatcaagtcaggcggcgacgatccatatcggaatgactccgtccaccgtgtccatgatgtcccattacctgatgcgttttgcaaaaagccatcccaatatccattttgatatccacgagggatccacattcacgatgagggatcagcttgagaaccggatccttgacctcacgaccctgcgcacgccaattacgttaaggggctgtgagacgaaaactttggctgaggaacgccttctcgccatggcagttccggagttccctcttttaaaaggacgcacatcgcttcagctgcaggagctctcggaacagcccctgatcctgtcccaccggtttcagaaatatatcgcctcgaggtttgaggaggcaggacttgtctgcgatatctaccttgcctgtgaagatgcaaggactgcgatcacgatggcggaacggggaatggggatcgcgatcctgccgacttcgatgctggaactttctgataagctgaaagcatgtgaggtctgtgatgccgattttacaacagaggtccttcttgcctggagaaaaagtcggatttcgtcggaaatacaggaatttctggaattttggaattaagaaatgtgttcgtggaatgcatgaatcttgaaaaaaatcttgcaagcagcttttgcaggcagattagacgagtgattttctgaaaaatgtgccataatgagaaataatgaaaagcttcatattatgaaacatgtcaggtgcagagagtctgacagaacaggagaagaatcgttcatgaagtatgatctggaacattatgggcaatatttaacagaatgcgagaaaagtaaaaatacgatcgaaaagtatctgagggatgtgcggactttcctgatattttcaggagaacgggagttgagcaaggagatcgtcttagactataaaaagctcctcgtagaaaaataccggacgtccagcgtaaattccatgctgatcgcggtgaatggatatctgaactggatcggccgggacgatctccgggtgcgtgtgtgcagaacacagagacggatctttcgcgaggaggagcgggaactgacgcgcgaagagtaccagagacttcttatgaccgcgagacgggagaatcgcgagcgcctgttctgcatccttcagaccatcgcgggaacggggatgcggatcggagaattaaaatatctgacagcggagactctggaggagcgaaagatacggatcgactttaagggcaaagttcggatcatcctgattccaaggtcccttcggatcatcctgaaggactactgccgaaagcacaagatcaaggaaggaagtattttccgatcaaggaacggaagaccgctggaccggagaaatatatgggttgagatgaaaagcctctgcgagaaggcaaaggtggcagcaagcaaagtattcccgcataatctgagacatctcttcgcgagatgcttttacgaaaaggaacacgaccttgcgcggctggcagattatcttggacacagcagcattgagacaacaagacggtatacgatgatcacaagcgaggaagcctgcgcaaagaatttagagcttggactggtccaaagggaagaagcgatatcggaaggtgaaaaaggtagtatggaacaaatgggaaaaaaggaggatccgtttacgacataatgtgtattatgtcataacgaatcctcctctgtattcatatatatacataacaattctaacacgaaaaacctttgttttcaacggatattccgggttttttacatttttgcgtttttttaacatgattttcaaaaaatatgcggttctggaaacagattcgcagatcggatacttttttaaattaacttaagaaagcgtaaaaagtatgaaaatttcatgtaagaacgatgcaggatcttctaagacaagccgttcatgacataatacacattatgtcatggacggcttttttgaatgaaaaaatgtatgatcggagaacgatacggaagtcttgtggtaattgaaaaagtgaagattcctgggaaaccgaaaacctattggcggtgtcagtgtgactgcgggaatacgtgcaccgtggaagattcacacctgaaaaacggacatacgaagagttgtggctgcaggagacggatccgactccaggaaaaacgccttgatctaaccggacagcggtacggtaggcttgtcgttctgggaccggcagcggggctgacagaagaaaaagaaggcacggtggagcaaagcggatcgtctgcaggtgatcgcgcggatcgtccgggcaggatgagtgactactggctttgtcagtgtgattgtggaaaacaatgcatctgccgaaaagagaatctccgctccggggtcacaagaagctgcggctgtcttcaggaagcacagagaaaggtaaatatgaagaaagccatccattttatggacggaacctgtgtggaacggatcgcgtgcagaaagacattttccaataatacttccggtcatcgcggagtatacagaagagaaaacaatcgatggagagcatccattggctttcagggaaaatcctacaatcttggcagcttcgtaacctatgaggaggcagttcaggcgcggctggacgcggaaaaacggttatatgatccgtttttagcaaaataccgcgaagaaaattcctgacaacgcagggagatcacaatactgataaaaacacttccaaatgcaggaataccgggcagctctgctgcatagaatgcagtttaggaagtgatttttataaatttttaggaacagggggaaaggaggagctttgtgagcatacagagacagaagaatcctgtgtgcagcaattgaaatattgacttacagtaactgttcgacagagatacagttacgatccacgattcgaaaaaaggaggaaaagagagatgaagaagcgcggaatgaaaaaacgtgttctggcagcactcatgacggcctgcatggtcgttgggtctgtgccgggagtgtcgttggcggatgtgtcaggtgaaacagcgccgaatttatctggtacgctgacaccggatgcaaagaaatacaactttaatggaaccgtgtcaacagaagcaaacccggatattgtgcttaacaagacagctgtatataatgctgagacgaatgattatacgattacactctcagcaaaagctaaaaagaaagtagaaacaaaaaagacgcatgttgtatttttactggatgcgtcagggtcgatgaatttctgcacggataataatattgaagaagtaaacaggaagccgaacaaaaaagatgaacatgtgcattattattacacggaggggatttttgacagaaagtatgtaagcggatgtacccaaattgataaagattctacaaggaaaagtcgatgggaaattgcaacagaatctatcaaatcaatgacagatgaacttggttcagacaatatcgattatgattatacatggtttaatgatgatcagggagatggaaccggttcagagaatccatatagcaatgtaacaccagaggagggaacttacctgacagaaggtgttgagcatgctttaggaaaatttaagaatgatgctccagataccgataaggttatggtaattgttgcggacggtgagacaagtaatattggttttttgggatcgaaatactatccaaaaagagaattaaagagctttaaatccgctcccagtaacggcaaagtctatacggtaggcttcacgttcagcagcgaaggcttcaagagtcttgcaaacggatctgactataattttaacgcgacagatgaggattctctgaatgtggcgttaaataagatcagccagaagatcaagaccggaattacggacccattgggaagtaatgttgaactggtcggtggcgtcaatggcattacagttagcggcagcgaggctgtagctaattatgactctgcaaagaacgagattacctggaatgatccgaatggactggatgaaaacggggtcaagcttacttatcgtgtgaaggttaaagatacgtcggacgcgggaagtgtgaatcttaatggagatgcagtgctcagttatacggcaggaacagagaatcatacagtagagttcccgaaaccgtccattactggagcaaaacttacggttcagtacaaagagcaggggactgaaaagattgtaaagacagccaacgactggattggttttaccggtgaaaatgtttcttttaagaatattacagaaattccgaaaacgattctcgttgatggtacgacatattatgtagtatccagtgaccctgaagcaattccgacaccgacagaggcaatcaactatattgttaatgttcaggtatccacagaggagccgaatcaggcaatctacagtgttatatatgatgcaaatggtggaacctggaaggatgagtatgaagcgcaggaaccttatacgctgaatccagagcgcagcatgctgacacgagcagggatgaattacggagatatgattgaaatccttgacggtaatgatgcaccagaaaagtctggatatgttttcaaaggctggcagcttgatcaggacaaattggtcgttcgagtaccggttggtcgtgcggcagattccagtcatgaggttcatctgagcgcaatctgggaagaagatggctcatctgaggaaaacaatattacttactctgtgaaccagcactatattgctcctgatcatacagataatgtatcgattaaagacctgacagcaggaaaagatgcttctataaaggatgcaatctccggttatacacagaatcttccgtggcgaggtgacacatatttatatcgccgcacaacggttacgactggcggaaagaccgtagattataatccggacactgcaagattcactgaagacacgacaattgatatctattattatcgtgattcctggaatgataaaaacaacagtgaaacaggcggagatggtatcccggataccgaacaggttcttgtaaaattcggaagtaaggaccgcggagactgggtaacaggaaacggtattattcaggtatacacattagatgaaggacagacaacagtgactccatctcaggataacgtgacggtaagctgtgacgaaggatatcattttacaaagtggacaaagaataattctgtaaatgaaatcgacccgtttacagagcagactggtgtaaaaggcggagagacgatcaacttctgggcatggtttgcagctgatgaggtgaaagtaccggagaaaccagtatctgcggagcttccgtatgtcacagtaatttgtacaaacaccaatgcatcccacagtgtattagagagaaattattatattctcgatgaagagattgacgaggggcgtgtgatcgttggtgatgtgaaatacgactcaacaaatggcaattatgtcagccatgtcaaggtaatgggcgcatattatgcaggcctttttgatatcggcgaaggcggaaatcatatagctaccaaggccaacgatgtttccttcgatatggcatgggacggagaaaagtggacagctccagattcaatcgatacaatcaaaatttcctgcgcaggcagcgaagatccggatggaccgacagaggatgaactgaaagatctcattgaagttgcgcttgtccataccggcagcaatgcacacccgaataaaaattatacgcttattgctgacagctatgatgtcgagacaaatggcagaacggcagttgtcactgtaaaggcagataagtatgtaaaagagtacaactcacagtatggagaacatgctgtacagggaaagaatacggcaaagcttgtttttgaccatacaggtgctggttggaaacttgtcaatgacaatgcggaagtcagcttcaccgtaaagtgttccgagaagaagccagaatccccgaaaggaccgacaaaagaagacttaaagaagctattcggaaatgcaatcaccgtgatctgtacgacagacgcagatcatgcggaagagacctttggtcttattgatggcagcttccatttctcaaaggacaaagatgttgatgatgaaggtgttgtaacggtaaatgctgataagtacatcaaggcatttaatgatggaaaccatacgaatgcaggtgacgatggggcgagagtaaaactctattacgacgctgacgaagcaaagtggtgcgcagataaggatatcaacattaccttcaaagcaaaatgcgacaaaacaccggagacacctgagaagcagtacaccgaaatcaagttcgttgttgtaaacggaacatttacagagaacggtcagacagaactcacaaagacctttgaggttggaacgaagctcacacttgcagatattccagcatccaagggtaagagcagcagttacagcgatcagacctgggataagttcccggttggatatgttgtaggaaaagatggaacgaccttcacgatcacttacaggtggagatcaagcagcagtgatagcgatgacagcgattatgactatggcacttccacaagaggcaaagccacaaacgcagctggtaagtccggacgctggatcttagagggcggcgagtttacggaggacaacggaagacttccgtccaacgagtacttaaagatcggtgatacgatctacggtttctacacctacggatttgccatcgactttgaccgtccggaatactacacagacgcggcaattcaggcaaagggcggctaccgcgacgcgacaggaacatggagattaaacggctggtggttctgctatgatgatggtacattcccgcatgacgagtgggtatacctcacatggaacggccgctccgactggtactactttgacgtagacggctggatggaagacggctggttataccggaacaacaactggtattatcttcatactcagtacgacaacacaagaggacacatgtacaccggctggcatgagatcgacggcaagtggtattacttcaacacagcatccgacaagggaacacttggcgtaatgcttgcgaacaccacaacaccggatggatatcaggtagatgcaaatggagcatggatccggtaattccggcaggaaaccttcatggttcaccgggcgcgggatcctcatagcagtcatatttcttctgggactgggaattttcctgtacccgcatatctgtgactggtactatcagtatcagttcaacaaggcgatcgcggcgtatgaccggtttcaggggatcgactgcgaaggaatgatccaggcggccagagagtacaatgaaagacttgaaaagaaagaggaacagtttctggttcccgcagaggaacgggaggagcttgaccaccttctggatccatggggaacagggatgatgggatatgtggacattccgaagatcggggtccacattcccatttaccacggaacggaagagcgggcgcttcagtcgggcgctggtttctggtatgggacaagcctgccggtgggcggtgaaaatacccattgtgtgctggccgcccataacggtcttgtgaaggcgaaactgttcactgacctggacaaactggaagtgggagatcggttcactctggatgtcttaaacgagacattcacgtatgaggtggatcagatcctcgtaacacttccggaagagacggaagaactttatatccagaatggaaaagaccttgtgacgctttatacctgtactccgtatggggtaaatacccacaggctccttgtccgcggacaccgggtaacagaaccggaaaaatgatggaaaaaatgcgccggttcacaaaaaagtgaaaacggcgcttttttcgatataaattgacatggaggggatcgaaaatgaaaaagaaaataaacaaggttttcatggtctgcctggcagcgactgcgatgacggcgggaatgtcggtttcggcatttgcgcaggtacatattggtgagactacctataggacgtttgatgaggcagtgactgcggcagcagatggagcggtgatcgttcttgatacggatgagacgacaagtgggcttaatctgagcaagaacttgacggtagatggcggtacggataagaagaatcttacatttacggacaaaggaattgcactttggggcaaaaagctgacctttaagaactgcgctctggaactgaaaggaatcggatcgacaccatatacagcggagtggaattggatgacgatctctgcatcaaggaatgcagagctgcatctggagaacgcagagatggtaatgaatggtgaaggtgttgctgcaaaaactcatgcgatttatttcggttcgaataataagctgaatctgaaggattccaagttggagatccgaaattatccgcaggatgccctggagtgggatggcggtgactggggatataatgtaaatctggaaaattcaaaaattctctcggatcataaccgatctggttttaccgggagcttttctgtaagggcgaaagacagcacgattgatgttgtgaatagcaccggaaacggatctaatggttcagattttgaattttatcatagcacggtccattttgacggaaacaaagcccatggactcagcgcgagaaatctgactgtcgataacacgacactcagtgcatcggaaaatggagcaaacggaattcatatcactggaaatggtgtgattgaaaataactcaattgtagatgtatacagaaataaatgtgaagtattatcaaaatggacaatcccagcagcaatccgtgttcagggaaacggaagtttcacagtggacaagtcggcaaccctcacagtcatggaaaataaaggctcaggaatcggagtggggagcagtgcaaaagcggagatctggactggcatcatcaagaataacgaggcacagaagctggagtttggcggcggcatccataacatgggaaaggtgagtctttccagtaaagttattctctacaataaccatgccggaaaaggtgccgacgatatctacaacggagaaaacgcgacactgaaatttggagacacaaacaaagagtggatcctggacgattgtaatcacgcgattgacggctggtatgatgatgcagaaggaagccgctggaatgccgatggcggtgaaagtgagcaccatattgttcttgtaaacagcggaagtaagaacggtatgctgcagattaaagctgcgcatggacttgatgcggacgataaggagagcagaccggatatcgataaaaaggcagacggtgaggatgagatcaagggcgtaaaaccgggcgataatataagctttacgctggaatcccatcttccggcaagactggctggatttgtagtacgttccgattctaatgcagagagattgctgattccggagaagttctccgagcgcatgatcttccatgacaagatgagcaaaaatctggaatttgacaaggaaaccctgaaagtgacagtcggaaatgatggaaatgaacttccagaagactattacaaggtagaaaccggaaaaggcgatgagacattccgggtaagtatcgctctgatcgcagcattcaatgatggatatattacatatgatgagttaaagaatgcagagccggtgattgtttcctatgacgcagctgtctctgacaaagccattgatggagacaaggtggataaccgtgcatgggtcaacgacagcgaagaggatatcgttgacggcccggtcatcgatccggatgttccgtctaccggtggaattggaacaaaagccttcacagcagcaggaatcgccctgatgggagtggcagcaggtgctgtgatcgtgacaggtaagaggaagaaaaaagaacagtaattcagacttttcggattattgctagttatgagaacgaggtagagacatgaaaaaatcatggaaaagtttcatgaccgtcaccgcagccgccgctgcgatgacggctgccatggcattttcttcgttggcggctgtggcgaaggtaggaacaaatgagttcaacaatcttcaggatgcgatcaattctgcgggagagtcaccggtagtgatcgatcttgaggaaaatgtaagtcttacggacggacttgtgatcggtgcaggaaaagatgtgacgatccagtgcagcacgtcggatccgaagacgatcaagatggaaggaaagggaatccacacagaaggaacttatgatgctacagctaaaagctggaataccagtcggctgacatttaagaactgcgtattggatattgccgcgaatgataatccgggtggaagtggcggcactgcgaatctaatctcgaatacagatctcaccttggatcatgtgacatggacacagaatagtgcggatggcggcagtggaagcggaatgtatttgtatcagaaaagtaatttataccttgtaaatggtacagtcatgacgatatccggctataaaggaccccgggcaagtggtattttcgcagacgattcagagtatgaggatatgccaaaccggagtattaaaatttcagatcattccagtctcaatatcattgattgtgactggcacggaatgacggtcaatccggtcgatgtgacggtagaaaaatattcacatatcgatattacgggctgtggaaatccgaactacggtggtggaattggctgctattacggaaaactgagcgtaacagattattcggatgtgacaacgaatcagaatattggtagcgcctggggaatttttgttaaagagctgtttgtagacggcacttcaaaactgacttcctgtaagaataccggaaatgggctgaatgtcggaggaaaaggaaccattgagggaggagctgagatcagtctcgacggaaatggggaaagaggtctttgggtatatagcggcagcgaatattggtacggcgatgttgaagtcaaagcaggggcagttgtatcggcctgtgaaaatagatcaaacgggattttaaatacgtataagctgtgtgttgagaatggagcaacacttaaggttgaaaggaatcatgatcgcggaatctgtaacgtgggagaactgactttaaatgcaggcagcgtttgtgaaaatcaaacgggttcaaccggagcaggaatcttcaatgagggaaccttgaagatcggcaccggcgtccgcatctgtaacaaccacgcagccacttacggcggcggcctctataacgaggaaaacggaaccgcagagctttcggacggtgtgatcctctacaacaaccacgcagccaaaggcgctgacgatatttacaacactgcagggcagaagctgaccttctgcgcagtcggaaccggttggaacctcgacgactgcaatcaccgcatcgacggctggtatgacgatacagagggctcaagatggaacgcagacgatgcccttccggaaaatcgtcatattgtatcggtagcttccggcggatatgagacgggattccagatcaaggcggctcatggcgcggacatctacgagacgacaagctatccgatcgataaaaaggcagacggcgaggatgagatcggaaccgtaagtcagggaaagaagatcgagtttacactgacctccagtcttccaaagctgcttgcacgctatgttgtaacggcatccaacgcctcaccggcaaactccgcgagggaggtccgcaaagtccgcgtacacagtgcgtccggtgcgggaacagtccgcgtacacagtgcatccggtgcggagacagtccgcgtgtacagtgcgtccggtgcaagaagagcgagaagcgtaagcagagacaactacgacaatgagatttctgcacagtccctttctgcagatgaaaaatatgcgatcccggattcggttgtggagaccatggtcttccacgatgagatgaaccggtatctgaagtttattgacggtacgctccgtgtgaccgcgggcagggctggaaaagaagttccttccgggtattatacggtaacagccagtggttccaatgcattccgggttgaggttgatcttgtaaacctctttaataccggaatcatcgattatgaagatctgacgggtaaaaatccgattacagtgacctatgaagcggtcgtgacagacgacgcgatccagggggacgagctgtttaacgaagcctgggtcaacgatggggaacatgactccgtggaaggtgatgtcctcgataagaaggttccgtccacaggcggaacgggacggggaatgttcacgggtctgggactcctgtttatgggcacagcggcagcagcatggaagagaaaaagaagcatgtagatcagatacagaaatcgatgtagaaggaaggaatccaagatgacaggaattcggaaaaagaataagatcctgggctttatttttgccgtgcttgcggtatggatggtgatatttcaaaatccgtcctacgcggcacagcggggcagtctgaacgtaaaaacagaacagaccggaatgacggtatatctctatcgggttgccgaaaaacaggcgggtgtctatgtgctgaatgagaaatttcaggcatccggtgcggatgtttccgggggtggttccagagaggctgcgatcactctggcagattttgtgaaggcgcaggggatccagccttaccggaccggaacgggaagcggaaagcatgtggtttttcggaatcttccggatggagaggctctctaccttgtgacgggggattcgatgaccgttggcggcaagacctacattccggcaccggttctcgtggaagcgggcggtgccgcggcggaagcagatatcaagtgtgatattgaagaaccggaaaacccgacaaacccaacggaaccgacgaagccgaccgaacccacaaacccgacggatccatcaaatccgacctctccgacccgttatcatgatgacagtgatgatgatgactgggatccgaccccgaataagaagccgacgatcacaacagcggctgacgagacggtgacgatcacagatgcggagactcagccggaaaccagggtggaggagagtacggcagagaatgaaacagagacatctacggagacaaccgtggagaacgagaagaagcttccccagacaggacagctgtggtggccggtagggatcctgctctctgcaggcgcgatccttctggtggcaggtcttgtgatgaaaaagagaagtaaagaaaaataatgaaagagaaacatgaggatacgaatatgaaaaagaaaacgcttcatccaatcatgattgcgttactggcactttttgttctgctgcaggcattctgcctgacagcattcggcgctgaatatacagaggtgtgtataccggctggaacagatacggagattgtgaatcagatcctgacagatacgctgcttccggacagcgaagaaacactggaatgggagtatgagtgtgttggaaaggaagatggtggtcgtctgagaaataccgcctggggatcagtaggcggatttgaaagtacaacaaataaattttttatgactcaaacctatatccatccggcgctggcggacaatgcggatggtgaatacaaggtacgcgcaggagagaaaaaattcacaatcagaaaaacagcaaaacctaccgtggattgcgaactgctccgggatcaggaaattccgctgatatatgacgaggacggaacccttaatgccgaagagacgaaagaagagatcttcacgagagttttttcagcttccaatgcggagtttattacctgtgacgatgtgacgatccagtactacggtaaagctgagtcaggctctgtaggaaatctcggaaagaactgggtcgcactggacggggagaaggtaaatggcctgacctatccgtcaattccggcaggaaaacagaagatccgtattttatgggacggcgatgagaagtattccggttttgaaaaagagacatacgtgaccatgacggaacgggagcagatgaagttcaacctgaaaaaggctccttacgaggcagggcttgtttttgatcataatcagaatatcgattatactgcaacagcaaaagcgatctacgaggctgtagtggagtccacagaaccggaagtggattttgatgagttcgaggtgaagtacaatgcagatctttccggactcattgaaaatttcaaaccgctcgatgatgagtcacttgtaacaaagaaattcggtccgggaagctggaagatccgtatttcctggggcggaagcggggactatgcgccgggcagcgtgacggtatcagtaacagtgacggataaccggatcaacagtaaagtcgtattaaagagcgaaacctccttcacatataataaggatgtggaagcagtaaaacaggcggttcttgacaatgtgatcgactgggaaaattccgagcttccggagcgggacacactgtctgttgacgatttcacgttttcctacaatgcgagactttctcttctggacggtttgagcagcgagctcggtgacagctttgctgacaaattcctgaacggagaaggaatcagggacgatgttccgtttgaaggaaaaaactatgagctcggcggaaaggttctcggaagcttcccgcagatcggcgcaggggtgcagaagatcaaagtaactttcaagggaaattcggagtatcgcgcaagtgaagaagctgagggcagcgtgaccatcaacaaagcaaatgtgaaggtcagcgtcaacagcgccagtagatatgtgagcgaggctgtgaagggcagagagcttgtctccacggatcctgaagatcatttcaacctgtatatcatctatgccggaatcaccagcaatgtgactacaggcgtttatctggagcttccggaacagtatacctccaacagcaccgtcatcaagatcgtcgataaggcgctggaaagcttaaatcagccaaccctgacagaaatgctacagaacggaatcacagttggtgagcttagaaagcttttaaataccagtgaagtgatcgatgtgcttgagaagatcggtgtggataccggcgctctggaacaggtcatcaaggtgatcaataagcttccatccatcgctgataatcttcggatcagcattggtaccccgaatcacgccggaatttacagcgtgacagcagtcaccgacaacaagaactacaatacgggtgtcggtgccggcgctcttgtcttaaaggctgacaaggcaaatcttgtatggaaccagagtatcggcaaaaagatctccgcagcggaagcggcgggtgctgattttggcgcacatctcgagatcggcggggagagagttgacgaccagtccagcgtcagcgtgctctactctggatttacaagtaaatggagagcatactccagcacaacaaccccgccgactgagccggggcgttataccatgacagtcgttgtcctcggcggtaactatctggcttccccgatcaaccggtccttccagatcacgaagtaggacggctgaatggtaaaatcgcgggttctgcagcccgcgatcaggagaccttcatatgaaaaaaagtacgcatcacgtgcccattgccagatcaatggggatgtgatgcgtattttaatgtaaaaagaatgtgcccaggcagttccgtaaggaaccacccgggcacagtagattgtttcgttattagtacagcttcgcaccagccgggatatggtcatcaaccatgagaaggtttaatttctcctcgccctcttcagtatggattgcactaagcagcataccgcaggaatcgattcccatcatggctctcggcggaaggtttgtgatcgcgatcagggtctttccgacaagctcttccggctcgtagaaagcatggataccgcttaagatcgtgcggtctgtgccggttccgtcatcgagtgtgaactgaaggagctttttgctcttcttgactgcttcacaggcttttactttcacagcgcggagatcgcacttgctgaatatctcgaaatcaacataatcagcgaacatcggctcgatcacaactttggagaagtcgatgacttccggagctgcgttctcggatgtcttaacgaccggtttctcagacttctttgtgtctaaggacttcattgtcgggaagagcagtacgtcacggatcgccggggagtttgtaaataacataacaagacggtcgataccgtatccgataccaccggtcggcggcataccgatctcaagggcatttaagaagtcctcgtcagtggtatttgcttcgtcatcaccggcagcaagagctgcttcctgtgctttgaaacgctctctctggtcgatcgggtcgtttaactcggagtatgcgttacacatctcacgagcgtagatgtaaagctcgaaacgctctacctgctccggatgatccggtttcttcttggtaagcggggagatctcgatcggatggt

SEQ ID NO: 2152 - DNA, 1326 bp, Unknown
  gut microbiota DNA sequence
ataatgaaaagcttcttgttgcctgaaagatggaaacgagaggctttttttatttacgcgacaactgaccaaagtccgctcttgcgcaaaatcttgttcccaatagtgccccttctccttggcgtgccaactacacagcagcagggaactttcagaaagcagtgcctggatacagggatctggttcctcttggctcgcaggtgaatgcgttggaaaaaagatgatgcttgtctgagcgaagcgagttgcatcatctttttttcgtccctagcagtcgcctgcaagcctagaggaaccttccctgaatcccacaagcactgctttctgaaagttccctgccccgccaatcaactaaaactccacgaaaactcttatttctcaaggaaatgcttgacgcgccgcaattcttatgttacaatgttcgggcgaatggaagatataggtcttttttttatgctcaaaaaacgatagcaatgaatagagaaaaggccgccttacaaagaaattaaacggaggtggaagtcgtgcgcactaagattacactggcatgcactgaatgcaaacagcgcaactacaacatgacgaaggataagaagactcatccggaccgcatggagactaagaagtactgcagattctgcaagagacatacgatgcacaaagaaactaagtaatccggtttgcaagaaggacgtgaatttatgggagaaacagtaagtaatgagaaagcccctaaaacggactttatcaaaggcttaaaagctgaattcagtaagatcatctggccggataaagatacgcttacaaaagagaccgttgttgtagtcgtatcaacagtaattctggggattgttatcgcagtccttgacctgatcatcaaatttggtctcaatattgtaattggttaaggatgaggtgaagatatgtcagaagcacaatggtatgttgtacacacttattccggatatgagaataaggtaaaggttgacattgagaaaacaatcgaaaacagagggcttcaggatcagatcttagaggtttccgtcccgctggaagaagtcatcgagcttaagaacggtgctcagaagcaggttgagcgcaagatgttcccgggctatgtgctgattcatatgatcatgaatgacgacacatggtatgttgtaaggaacaccagaggcgtaaccggattcgtaggaccgggatccaagccggtaccgctttcagaagaagagatgatgagccttggctttaagacacctgacgtcgttgtagatttcgctgtcggagataccgtcgttgttacggccggcgcatggaaggatacag

SEQ ID NO: 2153 - DNA, 39022 bp, Unknown
  gut microbiota DNA sequence
ctccgatatcctcaacaggctaaagcccataactgaaaagagccggaacttacatcccggcccttcaacttttttatcttattcttcgaacactctatttgtccgcacttttctgcttttccaataagcacacggtctcgatcccggttgttgcagggaacatgtccacacagcagatccgttttgccgtgtatccgcctgcctggagaacaacaagatctctcgcaagactcgtcggtttgcaggaaatgtagaccatgtgatcaacgccgtatttgataatcttcggcagcgccttcggatggatcccgtctctcggtggatccaggacgatgaggtccgggcgctcttccagcgtatccagcaccttcaggacatctccggcgataaagtcgcagtttgtaagtccgttcctctgtgcattgatctttgcagcctcaactgcctcctcaacgatctccacgcccgtcacatgttctgccgccggagccagaatctgtgcgatcgtaccagtaccgctgtaaaggtcgaatacctttcttcctttcgtgtcaccgatatattcgcgagctgtctcgtagaggacttccgccccgagggaatttgtctggaagaaggaaaacggtgtgatcttgaatttcagtccaagaagctcttccataaagaagtcctgtccgtaaaggatcaccgtgcggtcactctgtaccacgtctgcaagactgtcattctccgtatgaagaattccggcaaaggttccttccagatcaagtgcaaggagtttctctttccagccttcaagcagctcttcctcgttcgcttcactcttccaggttccttccgtctgcgtggaagttacaaggtccacaaggatctcccctgttttcacgccgcggcggaccaggagatgtctcagatatcccacatgcgccatttttttataaaacgttgcgccctgctccgtaaaatagtccagagttgcctttaagatcttacagcagtccgggtgcaccagaacacactgatccaccgtcacgatatcataaaagctgccccgtttatgcatgccgagtgtcatcggaccatccttgaattcatctccgaaggaaaactccatcttgttccggtacgctcttgtcagcggactccccttgatcccctcaaaattgtaaccttcaggaaggaccgaatccaggagtgcacggacctgtctctccttgatctttaactgctcttcatacggcacggtctggtatgtacatccgccgcagtctgcgcgatgcggacacgcaccttcagctttttcgtaatctgccggtgttaccactttaagaagccgtccctcacattttccctttctctgcttcgagatcgcgatctccacagtctgacccggaagcgcgttctttacaaccactttttcctcaccgatgtggagaactcccttgttcgggaaatccatcttttccaccactccggtgtaaatctcaccttttttcatctcttctccttctgtctatgtaaaaaagaattttctgttaaaaaaagaatgtgcctcggcatattctcgcgccgagcgcggtcacttgcgacaaccttcatcttcgcgcgagtgtgcatcttaggcacgtagtgcctttttgtttaacaggaagttcctgttaaacaaaagaggccgggcaagcgtactccctgccacagcctcttttctgtcatgagcacaagacttttcgcactgccatcccggcagtccgcgaacttttaagcctctgtctcctcgtcctcatcttttttctctgctgctttttccgctttcttcggagcttcctcctcatcctcgaaaaagtcgtcatcgaaatcatcgtcgaaatcgtcctcaaagtcttccagataatccggagtgaagaaacgataaaccgcatacgcgatcgctgctactgcagccactgcaccgatgatcgcaaggatccagagaatacaggtctttttcttatcttcttcttttttatgaagcagttcgttcagtttggacgcgttcataagttcttccattttgctgagtgcgtctttactcatcatatcgaatttgttcattctcgcacatcctttctgtttttgcagctgtttcgctctcccggagctttcacggctgccgctctcctggtcgaacatttccattcaaagcgatatttgttaatagtataccatgctttttagatttttactatcctaaattttattgtttcgacagactgaacagttcagctcgcgctaactcaaatttttttcagcttcgcaaacgacgcaaacatctttctcgttccgactgtctcccggtcaaattcgaccgtcacctcgaagtcttttccgccgtccgtgattgcttttacggttccatctccgaaccgcatatgatgaacccggtcgccttcggaatagtcaagattctttggtttttccaccgtaaacgcctttccaaaggccggcgttgatgacggggttcccgatgtctttgacgcatacggactcttgtatgcatctgacttctgcccgaacaggctcacaccggacgggcggtccttaaatcttccggaatgtccgccttccgcctttcccgacgcatcagcgctcttcgcccacggaagtcccgcttcctctgccaggtccttatatgcgtccgcagtcttcctccacccgctctttgaatcatcctgatccggccgctccaggcagacatccgggatctcattgataaaccggctcgttctcgcatactgcatttcgcccttcaccatccggctctttgccgccgtcagggtcagccgcttctccgctctcgtgataccgacatagcagagacggcgctcttcctctaacgcctccggtccctccatgagcgacatcatgctcgggaaaagtccgtcttccattccgacaaggtatacatacggaaactccaggcctttcgcagaatgaagcgtcataaggatgatccggtcctccgactcatccatactgtcgatatccgcaaccagggcaacctcttccaggaactcggagagactcggctcatccgcgctctcccagtaggagaccgccttattgatcagttcctcgatattttccagtctggactcggcttccacctcgccctcttccttcagctcttcccggtatccggtcttttcaaggaccgcctcgatcacatctttgatcgttttctcttcccgcagcatctttcggaattcaccgatctgatccgtaaacacgccgatctttaacgccgcttttccgatccccggaaccgcctgaacccgctccagcgcctcgtagaagctcatgtcgttctccatcgcgaacatgttcacgcgggcaacactcatcgcaccgatcccgcgtttcggaacattgatgatcctctggacagccagatcatcccggccgtttgcgatcgtctttaagtagcagaggatgtccttgatctcttttctttgatagaaattcacgccgcccacaagacggtacggcaggttatatgcgatacatttctcctcgaacagacgggactgggcatttgtacggtagaggatcgcgtagtccttccacggaccgcctttttttacaatatcccgtaccacccattctgcctcatcaaaggaggaaccaaactcccggaataccggtcgctcgcccacctcattctccgtccagagcgtcttatctttacgtccggcgttgttcttgatcacctcgttcgcggaatccaggatcatcttcgtggaacggtaattctgctccagtttgatcacctttgcgcccgggaatgtctcctcaaaactcaggatatttttgatattggcgccgcggaaccggtagatcgactggtcatcatctcccacgacacagatgttgcggtatttcgccgcaagcaggctgaccagcttaaactgcaccgtatttgtatcctggtactcgtccaccatgatatagcggaagcggtcctgataatactccaggacctcctgctttgcctggaagagctcgaccgtctttacgaggagatcatcgaaatccagggcattattctttttcaggcgtttctgatactccatatagagttccccgatccgctggagtctcgaatcaccgtcggcctttgcgcttagcaaaaactcttccggtgagatcatctcattctttgcggaggagatcacaccgagaactccccgctcctttagaaccttctggttcacttccagatccttgaagatctgcttcatgagtgtctttgtgtcatcggaatcgtagatcgagaaatctgtcgtatatccgagattttcgataaatcttcttaagatccgcacacagagggagtggaacgtgctgacccatacgctgtccgcaccgaaatccacgagttggttgacgcgttcccgcatctcgcccgccgccttgttcgtgaaggtgatcgcgaggatattccacggttttactcctttttcttctattaaataagcaacccggtgcgtcagggctctcgtctttccggatccggctcccgccagcactaagagcggaccttccgtggtaaagacagcttccctctgcatcggatttaatgtatcataattgttcatcctgttcccctttcatgttcccggatccggtcagatccggacgtaatctttccttcccgacctctcccgcaaccggaaacatatatatgaatattttaccacaggaacactcgttcgtgcaatcccctattccaaaacctgaagcaaaaatccgggaaccgcgttttgcatgccttcatgcagccgagttcccggactttccttttttccctgcagacacagttttcggtcactgcaggggatttatgatcttctcttccagaaaatattttttaaaactccagataagcacctttcatcgggcttgccgcatgctcgctgaacatgcggagcacaccgctcttgtagcggagctctctcggtttccagtttttctttctctcagcaaggactgcatcgatctcctccggagtctttctctcgcccttgatgccgatgatgtttaactttctctccataacatcgatctcgatcagatcgccttcctcaacgagggcgatcgggccgccgtctgccgcctccggactgcagtgtccgatgaccggacctgtggacgcaccggagaatcttccgtctgtgatgagggcgatggaacgtccgagttccttatcgctgctgatcgcctcggatgtgtagaacatctccggcatgccgcttcccttcgggccctcatagcggatgaagactgcatcgcctttctgtactttatgtttcaggactgcatcgaggcactcttcctcgctgtcgaacggtctcgctttgaggactgctttgaacatttccttcgggcatgcagtgtgtttgatgacagcgccttccggagcaaggtttccgcggagaaccgcgatacttccatctgttccgatcgctttgtcagccggacggatgatgtcctgacgtgtcacggatgttccgtagcgctcgttgaacttctgaagccacttctcacagcgctcataaaatccgttctctcttaattcctttaagttctcaccgagtgtctttccggtcacggtcatgacatccaggtgaagctgatccttgatctcctccatgatcgccggaacaccgcccgcatagtagaagcactctgccggccactttcctgtcgggcggatatcgaggagatatttcgcaccgcggtggagtctgtcgaaggtgtcgcctgtgatctcaatcccgagttcatgggcgatcgccggaagatggagcaggcagttcgtacttccggagattgccgcatgtaccaggatcgcgttctcaaagctttccatggtcacgatatcgctcggacgcatattgtccatctttgcgagctttacggcctgttttccggcctctctcgcatagtttaagagatccgggcttgtcgccggcatcagggcacttcccggaagtgcaagaccgagagcctctgccatgatctgcattgtggatgcagttccgatgaaagaacatgcaccgcagctcggacatgcattgtgttttgcccagtttaaacggttctcatcgatctctccgcgctcgaactgtgcgctgtacatgccaagctgctcaagtgtcagcatctccggacctgcgttcatggttccgcccggaacaacgactgccgggatattcacgcggaataatcccatcaggtttgccggcattcccttatcgcagcttgcgagataaacgcccgcatcaaacggagtcgcgttcgcgtggatctcgatcatgtttgcgatcatctcacggcttgcaaggctgtagttgatgccgtctgttccctggctctcgccgtcacagatatcggtgcagaaatactttgcgccgcggccgcctgcctctgcgatccctttctttacttcatctactaaaatatggagatgtccgcttcccggatggctgtcgcccgcggtgctctcgatgatgacctgcggcattgcaagctcttccggtttccagccggtaccgatccttaacggatcaagctccggtgcaagttttctcatttcctggcttttcagacatttcatgatagttccttctttctttgtggggtgggtattattgtgtatcttatcttaattatttgttttttatcttttattgctgtaattcattctttttgtctcgtcatccgtccggatctgcatctcatccgggctgtcaacgtaaaatcttacgcgaagaatgagatgatcagcgctacgataaatcctgttccgccgactaatgtctccatgatggtccatgtctttaaagtcgtcttctcatcgattccgacaagggatcttaccagccagaaaccggagtcattaaagtgggagcagacagtcgcaccgcctgctaccgctgctacggtacatgcgaggtataacggggaaagctcgctgattcccggaagtgctgcaacgataccggccgccatggtcatcgcaacggttgcagaaccaacgctgatgcggacaaggaccgcaatgatgaatgccagtacaacgattgggagattcatggacgcaactgcgtttccgatcacatctccgagtccggaatactgaagtacatatctgagcacgccgccgcacgctgtcacaagaaggatcagaccggtcggctccagggactttgtcatgaccttctcaagctctttcatcgtgtatccatgtcttaatccaagaccgaacatagcggcaagtgtcgcgatcagaagcgctacaaacggctcaccgaggaactcgaagatcggagcaacacctgcaagagccggtacaacaccgcagatggagtccaggatgatcagcactaacgggatcaggataattccgacgatcagtccgaagctcggaagtttggattcgtcgatctcttcctggtttgctacgctctccggaaccggaacaaaatatttctttccgcagatggatccccataccggaccggcaacgatcatcgcgaagattccgcagaagattccgactaagatgacccagccgaggtctacattcagcattgtcgctacaaggaccggacccggtgtcggcggaatgaacgcatgtccgaccgcaagtcctgcgagaagcggaataacataatgaagggaggaacgctttgtcttcttcgcgagtgagaacgcaagcgggatcagaatgatcagtcctgcatcgaagaataccggcatcgcgatcacgagacctgtgataccgagcgcccaggcggccttctcatcaccgaacttctttaccatcgtgacagcgatggtctgcgcgccgcccgatacctctaagatcgcaccgaacatggatcccagacctacaagcagggcaattccttttaacgtgtttccaattccatcatttactgccgaaataatgtcctgtgtcggcattcccgcgagaagtccgatacagatcgcaccgatcaggatcgcgatcatcgcctgaacattaaacttgatgatcaggacaagcaggatcaccagaccgatcagggctgccaggacaaggcgggtcgggttgagtacaactccttcagacatagtggatttacctcccaatatatttgtgttttttgacgcgcggcatccgcatgataccccaggacgggaccgcgcttgtgatgcataccgtgaaaactagatgagtactggagctttccggcattttcatcagacatatccggaaattccggcgcttattttttgtatttgtctgatgtcttatgtccatgtgcataatctaacatttttctgtactttttgcaatatatgtctgatgtattttggtttttctctttttcgcacaaaaaaagcaggggaaaattgtgcattattttcccctgcaatcctgctttttattccattatcaccatgatccggtcatttccctgacggaatcatcagactgatgattccggtgtagatgtacctgaccctgattttttattttcctaaacaatctgctgcattctgtcccgattttgccgatgcttcgcattccgaatcggcaaaatccgcgaccacaacggtatcatacggaattttcagttctgaaaattcctacccgtgaaaagtcacgcctcgtctcccatctgctcgtaggccgtccgccgtcttaaaagctcctgccggttatacgtcaggtgcatcaccatcgcgcatcgcgcccccgtggaatcgtgggaagcgatcgcctccgtgatcgcgcggtgagtcacgatcgtctccgtccgcagcgcacgtcttgtcaggttcacgaacgtattgatccccgaattgatgatcgggatcagggattccatgacctggtttttgctgcagcgggcgatccaggtatggaactcgatgtccttcggcatatggtccttgtccgcgagatagagttcctccgtctccttacacagcctttttagagtctcgatatcctcatccgtcgcatagacagccgccttcgccgcgatctccggctccaggatcaggcggacatcgaagagatcaagcgccagcttaaatttatcgtgaagttttgcggtaagtcccagcggatcatcctcgaccggtgtcaggctttgcacataagttccggcgcctcttctcacctgaaggaccccttttgtcaccaggcccttcaccgcctcacggatcgtacttcgccccacctcgaacatttccgcaagttcaaactcgtttggcagacggtcccccaccgccagcggtttcttttctatatactccaggatccggtcttcgatctggcttcccaggagtttccggtcttcttttttctttgtttccatatattttccccacatttatttcaagttgtctgatgtctttattatacgggagttaagaaaaactggcaaggtaaaaatcataaaaagaatgtgcttcggcacattcggcgtctcgcgcggtcgcttgcgacaatcttcatcttcgcgcgagtgcgcatcttaggcacgcagtgcctttttatttaacaggaagttctgttaaataaaaaagatcccgtatacaaccggtacgttcaccgggatctgtatacaggatcctgatcttatcaaagttattccactcttacagctcatctttcacatatccggccacattgtaagcatggtcagagatacgttccaggttgcttaagatatccaggaatacaacgcctgcggacgggttgcactcgttcttggagagacgttcgatatgcttgtcgcgcatctcttcttccagagtatccacgcggtcctcgagcttgctgacctgtcggatatcttccatattgccatcatttctggctgcgactgcatgatccaccgcaccgatggccgctacggagatttctttaaggtcctcgatacccgtttcagaaaaagcaagctgatgttccttcagatactgagctgcctctgcgaggttttccgcatggtcaccaacgcgctctaagtcgctgatgctgtaaaacagattgctgacctgcaccttctgcttctcgtttaaagagagattgttgaccttgatgagatattcggtcagcttcttatttaaaatatcgatctctgtctcattcttaaagacctcatccagatgttcatactttccctcgacaagaacactcgttgcaagttttaaatttgcaagcgccatcttacccatatgaacaacttccatcacgccgacttccagtgcaaatgtcggagacttgaagatacgttcgtcgagaaccggaagctcgtcttcctttttctcctctttcttctcgtcctcctctgtctcacgcacgatcagaccggagaacgcaacgagctgttttgcaaacgggaatagcagcagggtgttcgtcaggttgaaaaacgtgtggaagatcgagatctgcaacgcattgatacttccctgagcaatatccgggcgcatcatggagatcacatacattccgatcccgaagacaatcgcaccgaaactgttgaacgtcaggtggatcaccgaagcgcgcttcgcattccggcttgcgcctgcactcgataagatcgcagtcagacaggaaccgatattctgtccgagtgtgatatagatcgcagcgttcgttgtcacgactccgcttgccgccagcgtctgaagaattccgacagaggcggtggagctctggatgatcgcagttacaagcgctccgaccatgattcccaggatcggatttcttccgagaaccgcaaatgccttcgcaaagatcggagcatccgtgtacggagcaacggaacttgacataaacgtcaatcccacaaacaggagtccgacaccgatacagacctcaccgaccagactttctttcttcttctttgaaaacatcagacagaaagaaccgattgcaacaacaagcggtgcaaagaaggacggctgcagcactttcatcgcatcaccgagagagtttaaggaaaccatccatgcggtgatcgtcgtaccgatgttcgcgcccatgatgacgccgaccgcctgggtcaggttcaggatccccgcatttacaaagccgacgaccatgacagttgtcgctccgctgctgtgcaggatcgcggtgatcagggcgccaagtccgaccgcaaggagccggttgtccgtcaccattctcaggaacttgttcagcttacttccggccgatttctgcatgccgtcgcccataatgctcatgccgtacaggaacataccgagaccgcccaggaaactgaagatactttccagatatccgatattcataatgtcttctccattctcttttgtcgccgcccggagtttcgcgagcagcgggcaaaatgccgccgttttcgacttcttccgacggattttctccctgtgctccatcatatcatagagcacagtattttttcaattctaaatataatatttgtaaattttaggtaaagaattcaaaatggatttcggatttttagtgattgtaccattattttttcaggattctgatcgcattttttacatctttgtgaaatgtttcccattcttccggatggtccacaaaatacttcggacagatcttgcccgtcacatcataatgacggatgatatcgtccggcttcagatcaaactcaacacagaggtacgcgcacagattcaccagcgtctgatatgtactgtcataaaattttccggtctcgtccggatgacagcactcgatggagatcgtgtcgctgttcctgttgttggaggcgtaggcgatctcatcgagcggaatacactgtaccacttctccctcaagtccaatcacaaaatggctgctggctgatgtcgtcttcgaacccgtctgatctttcagaccttcaaaatagttccggttctccagcgcggtgctgcagggattcgcaacgtaatggaccacgatcccgttcactttctccagaggagtctgcggtctggaatacttattcggagtcagaagatccacttttacatactccggcacctttacatctgccgggttcacctgttttctcccggtaagtttcttcgtcacgagcaccgctgtcgtgatcacggcgatcacgaccacggccgccagaccccctaagatcatacggcggatccgctcctgttttcttcgtcttctccggttctgttcccgccggagtctgcgctcctcgatctcatctctgtttgtcatcatgttttttgcggctgtcaccggtcggtactctcatgcccgcatgatctggcattgtccggccggacagtttttcctttcttctattcttctaatgccgggcagacttcttctcctgccgatcggtctgcatcggatttctgaccttttgaccctgatatcatactataactgaaaacagttcttctcaaaccggatcagcccgtcctttttcatcctggaaagttccgcagacaaggcacttcggtccaccgcaaggtaatcggcgagctgctgacggttgtaggggatcgtaaacgtctgctttttctgtctctccgattcgaaggagagatacgccatcaccttttcccggatggaccgctgtcccatgtgatcgatctttctcgtcagcatgagatttttcttcgccataatatatagaagattgtggatcaggcgattgtggtgggaacaggccggcgtgcagacattcaagatcttcccgatattcaggaacaggatccggcttttctccgccgcctccacgttcaccatcagagcttcccccggcatgcaggcataggcctcaccgaagagttccccgctccccgcatgtccaaggacctgacggtttccccagaaatcgtctctggagatctcgacactgcccgagagcacaaagcccatcgaatggatctcggtccctgcgagaaagacagcgtcgcctttttcatattttttttctactgcggagagacactttaagatgctctccttttcttcgggctggattcctgcaaagagcggggaatccgggattgtttcgtttgtgatcatgggaagctcctttttttgtggaggcaagcttttggccatgtgtggttctcttgccaggtgcggtcttcttgttttcatttcatgaaaacaagaagcttcgggcgtccgccctatggagattactgacgaaaaattttcttatgcaaatagatttgcaacagctatctctttttgaagtgcggtcttcttgttttcatttcatgaaaacaagaagcttcgagcgtccgccctatggagatttatggcgaaaaaatttcttatgcaagtgaacttgcaacaaaatttttccgtcataaatctccgcacttcaaacgttttcgttggaaatacaacatacatttttatgttattgtagtatacttaccccacgaaagtcaatccatgacacaaagttaccacaaatcgataccacgaataataaccagaaatgcggctgaatgtttgtccgcattccggcatgatacgaaaatctgaaaggggaaaccattatgaaaagaaccatcgtaaaaattgatgaagagaaatgcaacggctgcggcgcatgtgcggctgcctgccaggaaggtgcgatcgcaatgatcgacggaaaagcaaagctgatccgcgacgattactgtgatggacttggaaactgtcttccggcctgtccggcggatgcgatcagctttgaggaacgtgaggctgccgcttacgaccatgaggctgtcttagcacatatggctgcgagaaaggctgcttccttggcgccttctgacacccctgtcccaaagccggaatttaccggttgtccgggttccatgagccgcacgatctcccacgctgcggcatccgcatcccacagcgcagcgatcccggggcactccacaccggtctccatggagagcagactctcccagtggccggtccagattaagcttgccccggtccgcgccccgtattttgacggtgcgaagctcctcgttgccgcagactgcactgcctacgcatacggaaatttccacaacgatttcatcgacggtcatgtaacactcatcggatgtccgaaacttgattccgtggactactcagaaaagctcaccgatatcatcaaaaacaacgagatccagagcgtgaccgttgtccgaatggaagtcccgtgctgcggcgggatcgaagctgctgtaaagaatgccctgatggcgagcggaaagttcattccgtggcaggtctacacaatcgggacggatggacggatcctgaagtaactggattttgccgatgtttcacatcccaaatcggaaaaatcggctgccgcaactgtatcgtacagaattttcagtccagaaaattcctactcgtgtacagtaacattacaatcattataaaggaaacatcttatgtcaatatcaacttcacagactccctccggccgtaccccggaacaggatgcagtcatctgcgccctcatcggtcttgcccgcgccgcagaagcaaaggagatcccggcaggaactgccccggtcctcttcgcctccctggccgctgcaatgccaggaaacacactctccgcttccgctgcgaacgatctcatctcgcagatccacgagcagaaagctatcatcgccccggactgtgccgcctgcccttccccctgcggacggaccgcagactttctcccggaggacttaaacaggaccgatgacggtctctttgaggagcggaacaggctcctcaaaaagctcagcgagcaggccaggacggaatggacacggatccttaccgatcaggaagatccggaaatcacaagactctttatggactgcgtgttcatggcaggatacgcgtatgaaaaggaactgtttgcgccgtactttgaaaaactggagagttacagtacacgggcactccattcccgcgcactgtagcgggattttgccgcagtaacgctggagaatcttattttttagtatttcctgtccaatgcttttttcagataaaccactccgcctccgcgcgtctcgtataattctgtttcaacatctccacatgggataagaatgctgcatcatcaaaatattttgctccggtcggacatgccttgatgcaggcctggcacttgatgcagattccggtacaggtatccggcgcgtccttcgggatcgatcccatcggacagacagtcgcgcagattccgcatttcgtgcacttctccgggtccgtcttcggttttgcctttaagaataccgccggttttccatcagttccaagtggtgtataatatgccccgaccggatcatctccgcggaccgcgatcttttccgggatctcagtcaatccagaaaccttttctgccaccttctcaccaaactctgcgatcttcacaagatcatccgcatccggacgtcccgttgcaagcttgctgctgaaaacatgttccgtcggaattcctgctcccgcaactgtatggaagccgtgtgcctcaagctcattccggagctcgatcagaccattgtcaaaatttctgtttccgaacacagaaaccgctaccgcaagcgccccgtttccctcaaacgcagtctgcacatacggaagcatcttgttcgggatacggcccgcatagaccggagtgctgaagaatgcaaggtcttccttatcaaaacttacaacaccttccctgttttccggaagtgtaaagtcaaccgttcccatcggcacacccaggcattctgccgcccgcttcgccatcgttgtgactacctttttcgcgtttcctgtcgggctgaaataaaccgcccatacttttgtgatcttcatattccctgttcctccaatccataagttgtatggtcaaatgtatctctgaccggaatttatatgtttgttatttttgttaagcttattaacttctttttgtatcttaatccatatggcatgatttgtcaatcccaatgaagccacgttcttctggctgtccatatgttcaacgggattttgccgatgcttcgcattccgaagcggcaaaatccgcgaccacaacggtatcgtacggaattttcagttctgaaaattcctatccgcgaaaaataacgagagcaacagctgtcgtaaaacttcatatagaattttgcattcttttttgatatagtaatgatagcatagattgatgtaatgtgcaaattaagatgaaggacggacacacaatatgaccgaaaaaccgaaccggactgccgagatggcagatatcctccaccaggcctccatgctctacatggcctccaatctcccgatcgactatgggaccgggacaaaatacacctccgtggaagtccatatgttaaaatatatcatcgatcatccaggaaaaacagtcaccgagctctcccgcgaatgggaccgcaccaagccggcgatctcccagatgttaaaacgcatggaacagaaaggtctgatctcctggacgaccgaacccggtaataacaaaaagcagctctaccatgccaccgaacaggggatccagcttcacagcgcccacaccgaatacgatatgaacgtctttggacagacgctcgactatctccgcgaaacctgttccgatgaggagatcgagacatgttttcatgtactgaaggagtatacgaaggcgcggagacggaagcattatcaggcgaagtaaatttgcattcctgttctggtaaagcgaaaatctgtgtcactgttgtcaaagaatattcgcagtcagccttcagtatttgcttattcctttacgcagcagaagcaaaggatgtccctgactcagttaaagatcaaaagtcttatctgtttggatcatgacatgctccggcatttgttataaaaaagaaaagtcctccggatcttacttccgtaggacttttcttttttcattcagcaggcttttcgacccgcatctgagtattttctttacagctctgctgcctcttccagtacattttcttctgctgcatcctctgtgttcggctcagactctgctgcagtttctgtttcgttttctgtttccgccgtttctgcatctccggagttttcgacatcttctgcgtcttcggtgctttctttgctgtcttcctccttaatctcatcaccggaaactttcttttcggaaagctcagagccttttctggaaatctcttccgaaacagccggcttctcttcctcaataggttctgtattgatgatcatttctggaagttcgattgccatagtagatgctttctcgatgacctgcttgccatttttatccagtactacttccagatctacatatccttctgcgctgattacaacaacattctcattttctgtaaatccagctttatcaagggaaatctttccgtctgtcgtggacaaagagtatgtattatctctataatatcctttttcgtatgcttctccgtttaccgtgacacctgtgattgcattcatccaatcatcatttcccattcccactgtaatcgtatagctgccaaagaaatagtctgtgtcacccacaagtggagcaggcttttcctctgactcctccggtgctttctctacgagatttcccttctgatcgagaattacttccagatctttatatccttccgcactgattacaacaacattctcgttttctgtgaatccggctttatcaagagaaatctttccatctgtcgttgacaacgagtatgtattatccctataatatcctttttcgtatgtttctccatttactgtgacacctgtgattgcattcatccaatcatcatttcccattcccactgcaatcgtgtaactgccaaagaaataatctgtgtcacttactgtcggagtctcttttaaccgaccatcatcgtctcctttttcttcctctttctttgtgatctcaaactcaaccgtctccacgccataatactgcgccgagatctccacactgtactcgccagcctctttaaagagatcttttccgagtaccagacttgctccaccgatcgtatatccgatcttttcggaaatgctctcctgtccattcggaagaagtctctttttcgttccgtccggtcctgtaagtacaacgctctggagattcttccagatatcaccggtcttatccgccgtgttggtaatcgtcacttctgctccggtttcgaaatcaccgcctgcttccagtgctacctctttgagatcctttgcaatcgcaatattgaatactttatcctcatacccgtcaactttgatggtcacttgattgtctttattgactgcaaagagtgagctgtcaagaacaagaatattgtctttcagtctgtaaagcttctgatcaaccgcctgataggaattgccattcaggtagatttttccgttttcaacaatcttctgtaagtacgcggtgtcatccgacatgatccggacatcctgtccttccaaaatttcattgacctgatcgccattctcatcgaccagaacaagctttggtgcagtctttccaagataggatccgctcatcatcgtcccaccgaggcgattatcttcaagcacatattttactgcatacgggcgattcagggtttctgctgcgctctcatctgcaatatagtctgcaaagcttaaatattccccgttcttatttttcgctttctcaactgcatcacggtattctgcaaaggaatagaatgttgtcccatcttccccgatcaccgcatcccaaccgctcatatcgtaattccaacgatccgcgattgcctgggcagattcattttccactccgatattcttaaggagaagtgcgttcgtgagcagatccgcatcgaacatcaggtctgcagacatcgtcgtgcttccgccttctgctgcatttccgcttccacttgtgcttccgccgctgatggatgcgctggacatcgcatcaattccatagatatcttctgtaactacactgttctgcgcagctgcacctgtgctcacggtaaatgtgtagctcatatccttaaatccggtagaatgtacagtgatcgtatattttcctgcttctggaatattgttgcgtccgttttctgcattctcatcattgtaaaggacaaacgtgtttccgatcagataccagtcacggatcttctccagttcggtcgtatttccatgcggatctgtaagttccaccttgctgaccggaatctcgattccataagtcatgttcttcacttcaaagtgaatattctttccgcttgtaattgctccagcctcttttaagaccatgctcggagccgttccgtttacaacctcgatcgggatcagtgtattctttccgccggaggtgatgcgcaggtaataagaaccgttcgagtagaaattcgactggcccagcggtacaatgatctgtccaaccgtatttccgtaatgctcccccagcttcttctcatatcggagatcaccgttgatcgtattgttgtaaccctttccagataccagtgctacttttgtgatctcatcaaaccactgtttgtccacctctttcgtatagttaaacattacgacagcctgtccgccgacgccatacagattactcttgtcctctgtcagctctgctgccggtgcatagtaacggatcccgctcttttcctctccgagatcaaaggtcgttgtctccggtttccatctgatatttccgttctcatcatagttatcaagatgataatcccacacatatacagatccatgtgccagaaaggcagccggtgctgtattttcgcgaacttccggtgcttccggattctcattttcgctcagacggatgatctgtgtttctccatcttttcctgtcacggcaagaaccgccgggtttaagtttgtaatctcccattttgcaatggttccgtcacgatctacttttgtgaacgcagatgtcacatcggttccatcgactgtgagtgtgcagtcatccagggagtagccttttgcaaacgcaaccgtcacatactggctccatccgagatccaccagctttgtctggctctctacaacaagagtttttgtctccggagtttcctcatttccggaatcatttccgctgtctcccggtttttcattgctgccggaattgtttccattgttgcctgtatttccattatttccggaattgtttccgctatcgcctgcgtttccgttgtttccggaattatttccactgttggaggaattcccgccggaactgcttcctgaatcgctgtccgaagatccatcacttcctccggatctttttccggatgccttctgctcaccacccggtgcatcatactcttttccgtttgcatcaacccaagcaccgttcgcatttaccttgtagccatccggtgtcgtaccgtcatgtgccatttcaccggacgcactcagataataccagcggtcaccaaccggaacccagccagttgccatacttccgttcgcccacagatagtaccagtcctttgtcaccggattctgataccatccggtgatcatatttccgtctttgtcgaagcgataccatttcccgttctcaaaaagccactggtctgcggcatattcacctgtaacacttctgtatttccatgctcctgtctgcatcgactgctcccatcttcctgtcgggatcgcagtcgctgccggagacaccatggtcgtcatcgtcatagataatgcagcggctaccgccactcccttgaatccattttttcgaatacctttcaccttttatcctcctcgtatgttcaattcaatttgaatgccagcacattataacaattcaatgttgttttctcaatagattatatgagaatgattttcaatatcgtttacatgggaaattttctcatttacgtcaaacttatacccgtaggcatttcgtatcacgcgtaatcacttgcaacaccattcatcttcacgcgagtgcgtatcttaggcacgcagtgcctttttgtttaccgggaagttccatcggaattttctggtaaacaaaaaactggttttatgtacattctctgcacacaaaaccagttcgtcattctcccgatattcttttatctcctacggcttacaactcttacaagcctcatatccctcttcgatcaatttcgaccgttttcccgtatactcttccttattttccgccttgatcttctcgacagaggtacaatccgggcggtggaacttcatggtctttgtattgaggatgtaggtaccgctctccgaatcagatgttttcgaaactgtactgccggaactgcccgcggacgtgttctttccgcccgaagaagtatttgcgccattttcggaagcgctgctattcccgctgcctgcagcagctgcgcttccggcgcctccatcttccgccagccagttatccccggtcgcatagtcgatcgcaacgcccggctggacattatagacataaacgcagaacaggacaccgtctccatcgtcctccaccgactccgcttccatcagaacgccggaggccaggagattgtctccctcaaagatcggcgtcacccggtagagcacatggttcccggtttcttttacatagtcggctgtcaggttttcgaacggcagcattccctgaacattcagatatcttgttccggtgatcaggttcttctcatttgcattctccgccgtcagctggtatccgatcagatggcagcggttatacacatattttccatccacgaagtcatacttcttattgtgccagcccgtcggcttgacctccccgatcgagccgcgtttttccgtcggcatcgtatccgtacttaccgaagcgtatgccacgccgcatcgtcccagcgcatcgaggtcactgtagctctcaaaggagacatccgtgagatcgctctccgaaaaatacggaacatttccattgaccgcaacatacggtgatccggaatattccggaatatccgataactggagggttccggagcttccgctcgttttcgatgagccggaatcgctttttcctgactgatcactgcccgctccggatgcttttgattccgcaagatctcccagaatatttcctgctgcctgtgcaatatcagacgccgcgcctgctcccgacgcgacatccgcgccctggcaggcagttaccgcgagtgataccgcggcgatcacgccgagcagccattttcttaaatttttcctcatctgtcattttcctccgatgtcatgattctattccgttcttccctctgaaagatttacctcacataacgttctctcgtgatcttttcatgggacgaaccggcaaactctttcgtttctacacagttccatcctgaaagatcgaccgggaaatacacatccgcagggtaatcccggttccaccggtacagatagatttcctgtatccgctcttcctccccggaaagatccgcatcttccgcaaagcagtattcaccttcgcccgctttctgcaggaaatcttcctccacacggatctgcgtcatcccttcttccacgaactgctttttactgtaggcatccatccacaggatttttccttctgccagctccaggatatccccgcgcaggatccggtcctggctctgtctgcggtgattgaacatcatcccgttatggtcatccacacatacgatcagtatcatatgctcccctccccttgtatcatatctttcgatcctatcccgtattctaccacatttccgctttgcagacaaccgtatgttcgattcctttttcttttgtaaagttcctttcagcagcggaatccagggtagaaacaggcagatacagaatttttacacgaagaatttttctgactttccatcaaaaattcttgacataatcttcctccggtgcgataataaggccgttgagagatttcagacatctcacaatttcataaacgggcttgtagcgcagttgggagcgcaccacattcgcattgtgggggtcgtcggttcgaatccgatcaggtccataaaaaacaccatccgttttccggatggtgtttttgttataacctctgttatttttgttccgtcggaattttctatggaacaaaaaagctgttcactcctgccacaagtccgtctgccagtttgcccagcgtcgcgtcatcatgggcggaagctccgtctccaagctcaatatcgatactcgggatcgtagagtaggaagtctgggtcagatccatctccatggagccggaagaaaagatcttcactccgttctgtttcaatccggaaaccagcgcacctccaagcttattgtgggactcccagtgggattttaccggctccatcgcgcggtaagcggcattattcggcacgctcatatagaaggcgcctttgtccttctttgtcgaatcccagtgaagggcgatatggcagtctgccgtgttattcgccatcacggttctcgccacattatcgagctggacatcctttccgtcccggatcatcaggacatcatatcccgccgcgagaagcttgtcgcggaagatctgtgccatccggagtgtcaccgtgctctccgccgttccgtccgcaaacgtcattccgccggataccgcgacagcctttgtcgctccggccgatgtcgttccgctcgtcaccttcgcagtcttatccgggtgacagtaggtcttgacactcgcaccgccggatgttccatgaccggcgttcacggcgatcactttattttttctatttgctgttccattgtgatagtaaaccgcatgtccgctgttgatcgccgaaaaatccgcatatttccaaccggagttcattccgacctgccatgccttgtccacgtacgcttttaaggaatccgggaccgaaacggttccatctgcggagactgcagccgtacctccggctgccgtactcgttgagccgtttcccgcctgcggtttgctggcagtcaggtaacggcttgccacatagaccgttgttttggaacctcccacctggatctcgctccactctccgttattttttactcttgaaacctcggtccctctcgataaggttccaagcacctttccggaagctgtcgatggctggcttctgtagtttaatttggaagcgttcacataaacggtgtccgcaagagcggtcatcggcattgtcatcgtaaacagcgtgaacagtcccgcacacaggactggttttaatgttttaaatcgcttctgttttctcatctttttcctttcctgcctcaaaaggcaccccgttttccttccggttaaatacacatgaacctctgcgcgtgatccattgtccccggaccatgtgcgcctttgcaaagcgtctgtctccgtctgatctgcctaagataaacagcccggtatctctaccggactgtttattctgatttatatttttgatcgtataacttttagtctcctaatacgttcacgatcttcgcaggtgtacgataattccatgtggagatcttgataccggattttgcattggacgcatggcatacctgaccattaccgatgtagagagctacatggttgattccgccgcttccggagtagaatacaaggtcgcccggacgcatctggctcgatgtgatcgactttccgcttccggcctgtgaaccggagttatgcggcagggaaacaccaaacttcgccatgacggacatcgtgaatccggagcagtctgttccgtttgtcaggctcgttccgccgtatacatagcggtttccgacgaactgtaccgcatagtttgcgatctgcgcacgcttggaggaaacgcttccggacttcgatccggccgctccgtcatttgcactgctcttctttccgctactcttggagctggaactgctctttccggtgctgttcttcgtattgctcttactgttagatgtatccgcaacttcaacaaccggtgtgtacttgatcgcctcttcaagaccatacttaacatccacgtagtcactggacaggtatgcatcctgatcatcgatctcgatcttgacccagccgtcctgctgatccgcgacaaggaatcgctcactgttggagatctgtgtgtagatcgaagagttcgtattcggctccgtccggacattgacaccgtccgtattggagatcgccatcagtttcgcaacctggagagctttatctttcgcctgctgtccggtcaggatatactcggatttgacataaccggtgatatttccggaacggattttcagccatcctgcagtcgatgtgtcgaggatatcacatcccgcattgctcggcagcttcgcgataatcttgcccttcgtctcatccgggttatcacggacgttcaggtagttcgatacattggaaacaccgaggttatcatagaggcttaagacggtctgtctcatatcctgcttgatcgcttcatccagggcatattttaccgtgacataatccgcggagatatatccgtcggaaatctggatccagccgtcctgctggctcttgatgtcgtatcgctcattcttgaatacctggtccaccacgtcggcatccgccttcggctcggaacggacatttaacttatccgcatcgatcacggcgcgttccgccacgttttcagcagccagtttcttcgcctcatcccctgtgtagacatactgggaactcacatatcccgtcacaccgccggatgagatcttataccatccttctgtcgaagtatccaggatctcgcaggcaccgcctttcggaagttttccgacaacctctccgaagctctccggcgtctttctgacgttcagatatccggaaacctccgcgataccgagatttgcatagctgtccacgatactctggaccgtcttttcgaattcttttgattcgatctcctcggcggaaagcgttgtctcgagaacgatatttttctcttctccgctctcggatgccgcctcggtcgtctccaaagaagccgctgccgtctcgaccttcatgccgccaaacgcgtctttatggtttttgatcatggttcccgcgactgcgacaactgcaacgatcgcaacagccgtaccgcctgctgccaggatcttcatatacggcatcgccgcttttttcttcttgatctcgcgaagtctcaggatattgtcgcgctggctcgcctgatgatccttcttcgggcgttcaggctgtctgcttctgtgagttcctgaacttcgttccgaacgtgtcctgtgtaccggctcatgctctgcttcagcagtttctgcctgatccgctcccagagtctcagatttttcattctccggctccgcttcctgtccctgcgctgcagtatcatccggctgctgatccgcttcctgtggtacagactccgtctgcatctgaggagactgttccgccgtattgccgcctgacggctgctccgcgttctgcccgacagtttcatctgccggaacttccgtaatctgatcctcctgcgctgcgttctccacgctcaccggatcttccttttttgtttcttccatcatttctctgtctgacatgtatgttctccatcatccgccccatggacggttttcatatcttttcgtaacggcttcatccttttaccgtcacatcatttacctcttttttactctacccgtaattgtaacaatcccggcggagcctgtcaaattttttccaccgggatttataataattttatttcaattttcttaaaaattcggattttctgccggaattcgcctatttttaattcttacccagcgtctggaaatgttccatgctgccgtagagaaacttgatccgctcaaactcctcccggtcaagaaactcaagttttccttttccgaacgccttcgccgcctcgatcatgaagcgcgccgcgtcgtcaaggtcctccatgtgcatggatcctgttgcgcatccggcaacaatggtctcggtagtgatcgccacgcccaccaccggcgctttggtggctgtcgcaggctgcaggatgctgttcaggtggaagatcccgtttccatacggcgtgatgtcctgctgcgtcagcgcaaatacgtagggcagctttccggtcgtcatctgcatgacatcgagaagatcttcgctgactctcaggatatatccctgacatacggtcggggagatcgcaaaaccgcggtgattgatgatccggttgccctttgtggtatccacgacgaggactgcatccaggtcatccgtcacctcctccttatttacctgccatgtctccaccggggagttcataaacggcaccggttcatgtggaaccgtcggtgcatccgggcagacatgcgtggagacgaaaacgtccccctcaaggaaatcgccttttgtctgcattctcagaagttttgcagctactgcgagtgctgtcagtgcaccgtcgccgtccgagacaaatcctgtctggtcaggtctcgcgccaagtcctccgaggcgtccgaggatcccgatcgttcccgcacttccgcctttcgactttccgttcttcccggggatcaggatccgcaccatgtccgtgtgaccgttcggtcccgccaatggatatgtctccgcctggcacatcgggttgatggctttcagatactctaccacttcgctgccggacgctgacgcactgtccagaatatcaaacaattcgatcaattctttataaagcataaaacatcctccttttcctggtcttatttccattatttaaaatagccctgttcctcatagtaccgccgagccccgtcatgaagcgggaccgggagatccagtgcacggaattctttgtcatccattgcccgcatgaaatcctgtccggctgtatacacaggtccgttgacctccagcgcccaggcgatctcatgggcaagttcctcgtccatgtccgcagagacacagaccaggactttctcgcaaaatgtcgtgatctcctcatcctggttttcgtaggtttccgccgggatcgtgatcttactgtactccgggtgtccggccaggatcgcatccagctcttcgtccgtataggataaaaagcggatcctgttctccgatgccagatccttataagctgaaaccggactctccgtgaacgcatggatcccgtccgcccactggtcacggatcccgtcggctcctcctttgatcccgtagtaccagatctcggaattttcctcattgatccccaggacgtcaaacacttccccggacacttttgcagtctcagaaccttcatttccggccgcgagcggatgtccctttaactcctgtacctcagaaagtcccagttctttcggggatgcccaggtggagacgatcgggtaacaggccgcgatcgcgcggagtttttccttcttttcgccttcgcacgctccggttcccgtgtatgcctccagagccgcccccgccggaacgatcaccagatcatacgttccgtcaaacagatgatccatactcacataggcgcctttcgacggccatgtctccacatagatccccggaactgtgttgctgatggtcgccgccacggcttttccggcccggtccatcacgctgtcctcagtgaaagtccccataatgagcttccgtgtctcctggctatcagactccttattcgaacatgcggacagcacgcaggacgcggcaagaagagccgccattcccgcgcacacccgcttcttcctgtttttcagcattttcatcatgcgatatatccgtccacgcagacagcgccatacgggcggatgctcatgcggtacgcacttcccggtcccatggccttttcgatataggtgatgtactcgtcagccacacggttcggcagcatcgccatgataacgcctgcgaatccgcctccgtgaacacggcatgcgccgcagcctttctccttgataaataactccgtgagagccagcgcggatgtgatcccctgctcctcagagcccggaacataacagttctggagccatttccaggaggaatttccggattccgtgatcagatccaggaattcgtcgaagcggttctcctttaaagcctttacttctttctccacgcgcttgttctcctcaaagaagtggagtgcacgtaaaaatgcgcggtcgcccgcctcttttctcactttttctgcgttgtcgatcacttctttttccgtgatgtccgcgcagaactctttgccgaacacggctgccacgcgtttcatctcattcgggattgaggaatactcttcactcaagtctgcatgtccctttcctgtctggacgatgatcagactgtgatcctgcgcgccgaaatcataatcgatcttctcaacgaccggttttaacgggttcttgaagtcgatcgtgatcatgccgccgaccgcgcatgccatctggtcgagaagtcctgatcccttgttccagtatttgttctccgcatatttgccaacatgggcatatgtaacgacgtccactttgccgtcattaaagaattcgttgatcatggagcagatcagcatctcataggatgcggaggagctgaccccggcggagctgatcacgttgctcgtaatgtaggcatcgaatccgccgatctgatatcccatctcctggaaacctgccagcattccttttgtcagatcgatagtccccgccatcttgtcgctcggctttaagttattgatattgatcgtgaatttctggctgtatgtctcactgataatgtggatctcgtcggttccgtttgctgccgcacaggctacgcagtccagattgatactcccggccaggacctttccgttgttgtggtccgtatggtttccactgatctcggtacggcctgcggaggtaaacatgcttacattcttctccccaaacgcctgtccgaattcctcgagaacatgctcatagcgcttctcattctcagcggcgccggttccgtacatctccttaaaaaatccggacgctttctcgctctgtaatgctttttttgcagcttctctatccataaccccaatctccttttcgatccgctctgcggatattttatttacgctaacaacgagccaaagttcgcgcttgcgcgagaccttggcgactgtcgcgataacaaattctttttttcgcttttcttcatgaaaaattttcttttttacggtatattccagtgaaatgcagcaaaatccgattgaaaagaaactttatattattatataatacctcttatatgtgttgcaaggaaaactttatcttcgtcgtgataagccttctatatctttcaggcggtgagcaagccgctcacgctggtccggctcatgcgtcaggcctcacgcgcattcaacttaaatgaacatgaatcagaaaggattttatatatgttgcaaaccgactggggcggaaaaccgtaccactctctcgactatgaattaaagaagcaatttgggaaaaaaatctataagatctccttagacggcggcatgacatgcccgaaccgcgacggaacactcggcacaggcggctgtatcttctgcagcgccggaggatccggggatttcgcggaaaaacgcacctcttcccttaaggaacagatggatctcgcgaaaacccgtgtcagccgcaagatatccggagatgacagttcctacatcgcctacttccagtcttacacgaacacatatgccccgctcccttatctggaacagcttttcactgaggctgtctctttcccggagatctgcggtctttccatcgggacaagaccggactgtctgccggatgggacagtgaaattattggcagaattaaacagaaaaaaaccggtatgggtggagcttggactgcagacgatccacgaggatacagcaaaactcatccgccggggatatgagcttcctgtctttgaggatgcgtaccgcagattaaaagctgcgggcctcaccgtgatcgtccatgtgatcctcgggctccctggagaatcgaaagagcagatgcttaaaaccgtccgatatctcggagctctgcatgtggacgggatcaagctgcagctccttcacgtcttaaaaggcactgatctcgcagctctctaccgttccggcgcttttcgcacgatggagctgccggaatatctggagctcatcggagactgtctgaaaatcctcccgcccgataccgtgatccacaggatcagcggggacggaccgaagtctctgctcattgcgccggaatggagtggaaacaagcggcttgttttgaattcgatcgcgaaatatctgaaggagcagaaaatctatcagggaatggggcttttgtaagtgcaaaaaagtccggttttcatgagagaaaatttctttttcccactgaaaaccagacttttaatttttttcaaaacggttgctgctttccttcattgttctgatccacagtcagtcatttcattacaaagcatgtgattcccgtctgtcatagacacgtcctttggttttattgttaattttataccgccgcgataattccgccgtctcccgcgtagaccgtcgcaagaccggccatctccgtcacgatgatctccttgaattttgcagtctgctcaaacttttctttcacatactgcgcgcgctccggtgcattgcagtgtgcgatcgtaaggcgtttatcttccgttgttcctgcctcttttacgacgatctccaccattctctgaagcgctttctgaataccgcgggcctgatcgagcttgatgatcacaccgtgatctgcgcccatgaccggcttgatatttaactttgttgcgaagaatgcctgaagtcctgtgagacgtccgttctttctcagcgtatcgagtgtctcaagaacgaaatatgtcttctgtctgtcgcggtattccagtgctttcttcacgatctcatcaaacgggagatcctgctcacacagttcctggatataaagcgcaagatttacctctcccgtggaagccgactcagaatcgatcaccgcgatattcttctttccagttccgaactcttcctcatagagattcttcgcaagaaccgcactgttgtagcatccgcttaagtgggaagagatcgcgataataaagacattctcctcctcacagcaaagagcatccttaaatgtctccggagacgggcaagcggtcttcgggcattccgggctctcctttacgatctgaagaaaacgcttctggtcaaaattctcatcatcgataaactggtgatcttccaccatcagcgtaaacgggatcaatgtaaaatgcggatcttttctctgctcttctgtaagatccatacagctgtccccgataattctataattcatactgcttcctccagctctatttcctatcacggctctgatatatttttattcattccccgtgatgtagtattcaataccatatattatagagtggcttttatagaaagtcaataggatgacagtattttgccgacgcttcgtattctgaattggcaaaatctgcagccgcaacggcatcatacggaattttcagttcagaaactttctgccatgtacaacaacggtttccaggtaacaagtgaaaacacgcttcgcgagtttccccttgttatcgcgacagtcgccaaggtctcgcgcaagcgcggactttggctcgttgttcgcgtaaaaaattccctgccggacaaacaggtgttatcatttctcttgtctgtctggcagggagcatatcaacgtgtgtccgcaagtgtcaagatcactttttacacatcttttctcgatccgatcattcccatcttcttcagatagggagcgaccgttatttcatctctgcgaaaatctcccgcccgggatgaacagcgttcgggtacgcgcagtgattccagtcatacttccatggatcagaagtcaacttctgttccataataagtgcaggtaagcagtttcgccatcgccgccggatcgatcagtctcgggttggagccggtacatgcatcaccgacggcaagttctgcgatatgatctaccttctccttgaactcatcctcattgatgccgaattcttttaatgtcttcggaatattcaacttctcgttgaattcattgatcttagcacagagactgttgatcagtgcctgtctggatcttccttccaatcccattcttctcgcgatctccgcgtaacgatcagccgcaaccgtatctttcgcattatactgaatcacatacggaagatagatcgcatttgcacatccgtgcgggatatgtccggtggagaaagcagcacctgtcttgtgagccatggaatgcacgattcctaaaagtgcgttggagaatgccattcccgcgagacactgtgcgtagtgcatctcttctctcgcatgcttatttccgttgtaggatgccggcagatattcaagaaccatctcgatcgcctggagtgccagcggatctgtaaacggtccgttcaatgtggagacataggcctcgatcgcatgtgtcagggcatccataccggtatatgcaacctgtttgaccggaagtcccataacgagatccgggtccacgatcgcaacatccggagtaatattaaagtcggcaagcggatatttcacgcctgtctgataattcgtgataacggagaacgcagtcacctctgtggctgtaccggaggtagacgggatcgcagcgaatttcgctttctgtctcagttccggaaagctgaacggagtgatcagatcttcgaatgttgtttccggatactcgtagaaggcccacatcgccttcgccgcgtcgatcggggaaccgccgcccatcgatacgatccagtccggttcgaacttgcgcattgcttccgcgcctctcataactgtctctacggacggatccggctcaaccccctcaaagacctcgacttccattccgccttcttttaaataattaacggccttgtcaagaaatccctggcgcttcatggaaccaccgccgacaacaaggaatgcttttttgcccttcagattctttaactcttccagacatccttttccgtgataaatatctctcggtaatgtaaatcttgccatatgttccgttctcctttcacaaagctgtcctttcagacattgatgcagtgtttatatcgcatattgagcgaaaaagatctggcgaatatcctgcctggtttccttttccctttgagagtattatatcattgtgaaataattaacgcaagtaattcccggtttatattctgatatttttatgtgttttagctttactttctatataaagcagtctgttctttttttcagtcttataattgcttgtcagtttttttcattccacagcaacttgactgatcgtattttcctaactatactctctcatatgccttgcataactcagcagaccgatcctttgttcagattcgggactcacaggcattttctccttctcagtattccgatgatactgacctgcaaaacctcttttttacactcgcgagatctcataaatatcttccatcgggatcttgtctccctcttccaggatcagcagatgctccgcctcgtccactctttttatatgccccgagactgtcacatatgcgccgccatcctttttttcatcggggacgaaaaaggtcaccgtaatttcagggtgaatctctttttcttccaatatcagccgtattttctcatccagcttctctttttcatactcatccagctcgatccgcttttccgtgatccgttctgtctccctcaggaccgccccgaaaccggtgagtgccgcaaatggagcaaactgggccgcccggtccccgatcggcatccggggatgccttgaccttgtcggatatggcagatcaatgatatctctgtatgtctcccacgcactcatgccttgtgacctccgatctggctgtttctggttaccgctgtcgctccctcttccaggttcattccctttaggatcgcgttttttccgaactttttcttgatctccagaaccgcctgctgcatccgtttttcccgtgccagatcttccgcttccttctttttctgttccagctgcgctccgtaatcagtaaagagatccaactgttcgtatgtttccttcttttgctccgctccctcacaggcaacatggtttgcagagagcgcgatccgccgcaccagaagtttcggattcatgatctcatcgtaaagagacatcactgcgtccgtgatccgctttgtggaagaagtatgtccgccaaggtttttagaaccatgggcatgtttcgggattcttctcccgtaacggtcggtaacaatctcaccgccataatttccctttcgtttcggatctgtcaggttctcgatatcgtaccccaccgtcaggaccacctgatccgtcgtcagtttcttatccacaagatccagcgccagaaggtctgccatctcccggacaacaagtttcgctttttcaacggtataagggcaggcgagaacctgtcccgatccgacactgtgattttccggtttatatgccttaacgtccgcgatcgtacacggttcatatccccaggcgtgatcgatcagaagttccgcattgactccgaacagccggtacagaagatcttcattataataatccccgtcacttccgagtgaacaccttgcgatatcccccatcgtataaattccccgctcttccagctttttcgcatatccacgtcccacgcgccagaaatccgtcagcgggcggtgatcccacagatttcttctgtagctcatctcatccagttctgcgatccggactccgtccgcatccggctcgatatgcttcgccatgatatccatagcgatcttgcagaggtaaagatttgttccgatcccggctgtcgccatgatctttgtctgtttctgaatttcacggatcatttggactgtcaattcgtgggccgtcgcatgatacgtttccagatacgaagtcaggtcgataaacacctcatcgatcgagtacgaatgaatatcttccggagctatatattttaaatagatctggtagatcatcgaactgatttccatgtagtgcgccatccgcggcggcgcggcgataaaatccagggcgagatccggtcttgctgccaattcattcgcctcgcaggaacttcccgtaaattttcctccgggagcgtatttctttctctcccggttcacctccgacactctctgctccacctcaaaaagacgggcacgcccgggaatcccatacgctttcagggaaggcgacaccgcaagacagattgttttcgaagtccggctccgatctgcaacgacaagatttgtcgtcattgggtccagatttctgtctacaacctcgacggaggcgtagaatgatttcagatcgattgcagcgtagatcctgttttctctgcctgtcgtatctgccattgctattctcccctcccattgttttttctacaatcttattcagagtttctgcgcattcctgttattttaagccaccaaactcttcgtagaagtattcctctccgtcttcttttattttgcactcacaggaagaaggacccgcaaaaaatccctgtgcggccgcgccggatccgcctcaaatacctggatccgcccattatcaggtccacggtctttaaacgcaggaaacataaatccgcagaccggcattccaggctcataatcccctctcaccggacataccgcacagatcaggaaacggtaaacttcctccgattcccatagactctccttatcctttgccttcctcggcacatcatagttcccatgaaagaaatataccgcataatccccggacgcctgatacttttccccaaacatctcataaaaaatatccagcagtgcatcattctttaactcacactcccgaagcgcacagagcagctgccatacactcccctgcttcttctcctccgggtcaaaaacatactcctttaacgcaacattcgtttcagaaaacgggatcatcttcgcgatatcaaggttcttttgctgatccggcagggaaagctgacgaaaatttttattaaaggtcccgtccacaaatccatctttatccagatacgcaccggcgatccggtcaaagcagtttctttttaacgtcattctcctcgtaagttccagcatgtcatcacggttgatcgtacccatatattttctccgccctctcttttttccattcctgttttctgttattcctgtattccgaaatttttattccgacttatttctctcctgattgatactcctattatataaccagaacatatgttcgtcaagcttttctatgttttttcttctctgcccataaagttctctggtcacaatagcttaagcacggaaaacgcaaaaagatccgccagcggggatcattgttatgattcgctgtcggatcttcctttgtcttaccatctcttagatcgtgtgaattctcacatactcccaggtatatgtgccgctctttccttcatcttccaggataaacggtgtcacttcctgatatccttcgtcttccatcatattcgctgcctcaagacatgactccagattattctcaaaatctacggagatatacggattctggtcacaatcggcctttccgtcctgatctaaatgcgcaattgcatactgcatattgataacttcctttcttcattattattttctgaactggtgtgattataccatattgccgcgacattatcaagctaaaatcagtaataattatcattattgtcaattatggcaatctacttgcagcctgcggaatatcacctctctccgcttcgctcaaagatcaaatgtgttcttgtaagtgataccattccaacacttccatcagattttcccgccgtacacgttcaccaccgcggagcatcatatccaacatatcgtcttcctccgctgtgcggtccttcttacccgcaagtgctttccccgcagtccgtatcatgagctccatcatcatgcggtacattccatgaagcttattcacatcaaaatttccctgtatggtaaaaagcgggcactcccctggaatgcagttctttttccggacagcatccgtctgcgttcccgtacgtcccattccgacggcacagacagcctgcacctgataatgcctgacagccgctgaatatccttttatggtacctgccatgatccagcccaggcagatcacgtctgcacctggtcggatctttttttgtgcctctttcattgaatatgcaggaagtcctgtttcctgcgtcaggatcttggcatattgctctgcactgccggtattcgtagtataaatgatcgcctccatatgattctcctccaacaaataaaaacatgcttcgcgagtttccccttcttatcgcgacagccgccaaggtctcgcgcaagcgcggactttggctcgttgttcgcgtaaaaaaagacacaatgcgggatcgatttctcgatcagcactgcgtcttagcgtctggctctttctcttgttccaattggactaccacttcttccatgtggtgggtcataatattttgtcagcttatgctgaaccggatcacacatcaggtctcacttgcgctcaacctgaacctggatcatataattttttgcatcgatcaatgtttcgcttttacatttcgggcagaacaacggaaacgccctgagttccgtctcccaaagcagctgcagacgtgtttttgccccacacaccggacatcggatccagaatctttcccgccctgtatattctgtcattttacatccatcctctctgcttccatccgcctgataaaacggtcgatatgttcgctcagcaatccggaaactgcacttttttcctctgtgccgtcataaacgctgtagagcagaaacatcggaccataaaactccagggcaagctgcgccatgctatatgaacggatcttcccgatcg

SEQ ID NO: 2154 - DNA, 3581 bp, Unknown
  gut microbiota DNA sequence
tgaagatacgcctccgcgaaaccatccggctccgtctccggcatctcgtactcttccgcccgctcataatccatctgattcatccgctccacgatcctgtccaggatctcctgttttcccgtgtagtgcttatacaaagctccctttgtaattcccagctgctttgcgatatcattcatggaagtccccgaatatccgctctgcgcgaacagctcaagggcagcctccaaaattcgttctttcgtctctccagccatgacctgactccttgtttcttgtaaccgttcggttactttgtattatagtaaccaatcggttacttgtcaagaggttttcattttatttttcactcccctcaaactgcagcagcgatagtgctttctttgtgcgaaaacagatttgtaaatccggctctggaaatagattccaaaatatcgcattttatttattcttttatttcgaactttccatgacccggtattgtcatacttatgagattattatatcattatggaagatcctgatatgaaaatcaatgaaaacgtttatttatatatgcgtagaaaggaaaacaaaacatggacatgaaacgtagaagagacatgcagatcgcgtacatcgcagatcagagtgtcatggaggaaatggcaaaatgcagaaagatcctgcaaaagcttaactttgcagaccgctccgattttgatgggatttcggagacagtaaaagaacttttagggaaatccgaaaatgcctggatcaatccgcctttttactgcgattacggctcccatattgaagtcgggaaaaatttttatgccaattacaactgtacgatcctggatgtcgcaaaagtaaaaatcggtgacaactgccagatggctccgaatgttgcgatctatacagccggacatccgatccatccggatacccgcaattccgggttcgaatacgggaaagaagttaccatcggggacaatgtctggctgggcggaaataccgtcgtgtgtccaggcgtccacatcggaaataacgttgtgatcggctccggaagtgttgtcacaaaagatattcctgactggtcgatcgctgccggcaatccctgtcgcgtcattcgcaggatcaccgagtccgacagaagaaaactgttccatgaggaggagatcgatgaggaagcgtgggagatgatatgtgcgcagaacaagtgagactatgaaaaaagtttgtaaccagatcatgaagggcaggaagttcaaaaggaaatccggatgatctatcatccttgtatcaaaccatacagactcactccgatcataaccactgcaagtccaacaaacaccgaataaaccaccttgctccctctggattccgtatttctaatgcaaaacacaagataacagatccagacaatataagcgacaaacagcaggccgctactataaaaaaacatcgccaataagaacagagtattaaccgccttcatgccattctcagaaaaaaggatctcttttattttcctcatagccctcacctccataaattttgccgatgtatcctctctttaccaaagtttcattcaataatcgataaaaccgctccagttcaagatccatctatgatcaaccgtgttctggactttcgacagttaaaatgtgcgttgttagactcataaacaataatcaaagtgctgtcattaacttttgatcatttatctaatatcccacttctatacttaaaattaaatgggaaataatatatctcagtcgtgttttttcctcctattgagttccatatataaattttgtatgtgaaactggaatagacaatagtcccgccatcctcaaatacttgtttactccatggaaaaaataaaaaccaggaaacaataagagttattactaccgtccatagtatacaatgttttttcattttgtccccccatttttgttgtatgtacatcaaagtgtttccactctctggttatgcaatattcagaatttcttatactctcagattagcgtccaggtctgtgctcaaaagcaaacaggatacttaggaaatgatccatcacccgccggaatatgtattgcataacagtcaaaccagtcatattctgatccaggacaataatatacagaattccctccaatatcttttttagtgaatatgttcggattgctttctattacagcgttcagctgttcttcccgttgtctgaattgcatgtcgccagctttacctggagcttattactgtctatctcgcattcatatgttactgctaaataactctttgccacggaagcttttttatccaaagcgctgaatgattcattacctgaattactttccttattaggatcaagcacaaagacaggcgtgctgttgtttgcaaaaaaatccactatggaatcatactccgtgttttctatggattctgtgatattctcatcttcaccactttgaagtgtttcggatggctcctgtacattgcgtgctccgcagcctgttaatgttaagcctgctgccaggataaagataataacggcttctattatgcaccatttatctttatagacagctgttttagtttcaggatataggcgatgtaaacggtataaacgaacaatccccgccacaaaccaaatcacagcaactaagacaatgctattcgataaaagatttcctctaattacccgaaaataagttaaagctcttcttaaatatatacctgctaaaatacagcccagtccgaagagaaaaactcgccatgtttttactgatttatttgtcataaaaactcctattctcccaggggcattatctcaacaatgcactgctaattatattttccctccgtctcattcaatgatcgataaaattgatctaacacagaatccatcgattcatccatgacatatttttgtctgttcaccgtaacatttccccctgaaaaaacgatgtcatattggtgtgtttttgttgatataatagctcttttactccagccatttgaatgggcgatcgataatacatatcgcttttttctgcacgcagatcattgagtttcgttattttccctatgaaaatcaatgcacatatgatcaccagcaggaaaatgctatctcttattttaattttctttttgctcatcctgcctcctatccaggtgactgaataaacatatggctgtcaggaaacctataactgaaaatacaaaaatatatcgagcatatattattaaaacaacatacacaattgttgaaacaagcgaatctggtaaaaatggatgccattgatgtacaagtatcgctgctgttgcaagtacatacactcctgtgacagtaacaatcaaggccaacaacatttgctgtacatttttattaagaattattttactttttacaagtataaaataactcaggaaatatcctcccataaaataagcgataggaaaaaaatagaaccaccaaaatacaattttcttaaaagaaaaagtaagtcccacatcctcatggatctgcttgtagaacggtaaaaggaacagatcaatcacaaacagtgccaacataattttctcacgtc

SEQ ID NO: 2155 - DNA, 145 bp, Unknown
  gut microbiota DNA sequence
ttcaaaagaagtgaaggccagaagatcctccgattggtttcacaaagggacttttcttaatgcgaagaacttctgtaccaagcgtttccgttgtaagaaaacgaatgcctgcaataagatccttctttgcggcgttaaatgtgct

SEQ ID NO: 2156 - DNA, 166 bp, Unknown
  gut microbiota DNA sequence
gaactgtgcgcccggtccgaacttcgggaagagaacagaaaagtcctcggaacccattgacggattcttcacgtaggaaacatggtcagcaccgatggtctttgcagcggcctcagcaactgcctcgatgatggaatcgtcatttacgagcggcggaactccgatt

SEQ ID NO: 2157 - DNA, 93900 bp, Unknown
  gut microbiota DNA sequence
tgtagctaatgtagaaaaaatgcaaaaaatagaaaaaaatcaaaaaaagctgttgacatttccgcaaatctgtattatacttacgtacgtaatcgaggcgtggctcagtttggtagagcgctgcgttcgggacgcagaggtcgcaagttcgaatcttgtcgcctcgacttatacaaaccaaggcctgttggtcaagcggtcaagacgacgccctctcacggcgtaaacccgggttcgattcccggacaggtcacttgctgttgcgtaagcagcagcattttttaaaggtgcttccgtggctcagttggtagagcaacgcattcgtaatgcgtaggtcgccggttcgagtccggccgggagctgattacaaaaccccttgagaaatcaaggggttttcgtgtttttacaggtttgaaaagtaggtccgaaagagggcaaaaaaggtgatttgtctactatttgtctactgttgaatttatacctgtgattgacaactacaggatcattcagaagcgtgtctgacatgatgtttgccacctcttccgtgctttgacgtatgctttttgtaccggattgcaatgggatgatcaaggatccataaaaaatgtcggccctgcttggatttgtattcttgattggtcttgctgtgatgatacttttttactgtttaatgttatacattggcaaagatcaaacataatattataatacaaataagataacttgtgaaggattaacactgggtccccaaatggggtaggtgcttagtactgagcattcctatgtgcctggggttatcttttttctttgcctttttttagactttccacaaaatacgcacgaagtctcacgtgtgttcgatccatataaaaaggacatggaccatcagttattggatggttccatgtccttttttatacgaatctttgctcttattctgtcagtctcttcagttcctcgtaaaacgccggataggagatattcacgcagtctgcgtcaaggatctccgtctccccctcagcggccagcgcggcaactgcgaaggtcattgcgatccggtgatctttatggctgtcaatgacagcgccgtggagcggttttccaccgtggatgatcatgccgtcatcggtctcctccacatcggcgcccatggcacgcaggttttcgaccatgatggcgatccggttggattcctttactttcaattcggcggcgtcgcggatcacggtggtaccttctgcaaaacatgccatcatggcgatcgtcggaagttcgtcgatgagcgtcgggatgatatccccttcgatggtgcaggcttttaagctgctggtacggacgaggagatcagccgtcggctccgcgttcctgtggttctcatttaagagcgtcagatcggcgcccatcgcctcacagactttgatgagtccggctcttgtcgggttgatcccgacattttttatcaggacttcggaatttggcaggatgaggccggctgcgacaaaatagacggatgaggaaatgtcacccgggacatcgatccggttgccgaaaagctccgttgccggccagatcgtcacggaagtttctttggactccagttcagcgccgaaaaatttcagcatgagttccgtgtggtttctcgatacctgcggctcagtgacggtcgtgagaccgtctgcatagagacctgcgagaagaatggcggatttcacctgggcggaggcaacttttgatgtgtagtggatgcctgcgagcggcattccacagattttaagcggcgcacagtcattgccgcggatgctcttgatgtcagcgcccatcatggacagcggttcgatgatccgcttcatggggcgcttctggattgattcgtcaccggtcagtgttacatcaagattctgaggagcgagaatgccggagatgagtctcgttgtcgttccggaatttccacagtcaagcgtcccggacggggcggtcagcccgtgcataccctttccgtggacgatgacggtaccgtttttattttcaatctcgatccccatgcggcggaaacagccgatggtcgaaaggcagtcagcgccctctaagaaattgtggatctccgtggtccccttcgcaatggagccgaacatgacgctgcggtgggagatggatttatcacccgggacagtgatctcgccccggatatgagctgctttatggagtttcatagtaaatacctcaatgtttttatttgcgtgaacaacgagccaaagtccgcgcttgcgcgaggccttggcgactgtcacgataacaaggggaaacttgcgaagcgtgttttcacttgttattttgtcagaacgtagttgtgactcttcaggagacttgctgcctcatttttctgttcttctttatagaaggaaatgcggagcgcgccttccccttcctcacggctgtgattgatgcccatgtttttgacactgatgccctttgcagcaaggatcgcggagaggacggagatggatcccggttcatcgagaacatcgacactgaaggaataatcgcgctcgatcggcccgcggccgaggttcgggaaggaagaacggtattttcctgattcctcgaacatccggtggatcgcacttccgtcatggtgctcgagcgtgtcgcagatggactccagggacgcgatgtagcgcttcaggagagtcaggatattttcggtatttgtcatgcagatctgctcccacatgacaggggaggaggaagcaatcctcgtgatatctttaaaaccgccggccgccagccgcttcatgatctcgtccttcgaatcattgtcatggacaagattgacgagactggacgcaacaaggtgcgggagatgactgatcgcggcgacagaaaaatcgtgctcatggtaatccagaacgagaggcagggcgccgatcgccagggcgacttcacggatccggtcgatctgttccggagtcgattttgtggtcggagtaataatgtagtaggcattttcgagaagatggtcagtcgaactctcataaccggtcttttcagagcctgccatcggatgaccgccaacgaagacatcctcatatccgaggcgttccacagccttgtggatgtcggtctttgtgctgccgatatccgtgataatggcgcccggttttaagaacggacggaccctttccagatacatggcattgtactccaccggggtacagagaaagatgatgtcacatgcggagagcgtctcatcgatcccgtcaaggatgatatcgatcgtcccctctttctttgcctgctcaagcttcgagcgggtccgcatgtatgccataatggtaatatctttatttgcgcggcgcaggcctctggcgatcgaaccgccgatgagaccaagaccgataaaaccaaaagtagaatcagacattttgtaagccctcctttatctcttcgattttataacatgggtgtgggaatgtcaacaagaaaaatcaacactttaaagtggcaaaatcaagacccggatcatcgatgcatttcttatcttttttctgacttagaaaactgcatggcactgtaacgactgcggaggagagatcctattcacattctataaaactttataaattgaaaaccccgcgctgccattccattcgcgggcggtgagtttccgggtgggagtgcttgatcccggcactcccacccggaaactcaccgcaaaacaaatctttcctcaatctcaaaaatatcgcagaaaataagaaacccacccagatttttaaaagcttttccaccaaaacgcccatgttttccgcaatatcccaaaaacaatcgaaaatattttgtgcaatttcgatatttagcttgaaaaattcgaaaagttttggtaaaatatgaccataggcaataagcagtatcgccagaacatctgaactccgtaatttgcggaagtcttttgaaaaaatggcaaaaaaacatatacgggagggattcatatggatatttatggaacaaaacagatccgaaatgttgtacttttagggcacggcggcgccggtaagacgacggtagccgaggcactggcttatctgaccggcgttacaaagagaatgggcaaggttgctgacggaaatacgatcagtgactatgataaagaagagatcaagagacagttctcgatctccactacaatggttccgatcgagtacgagggagcagaaggaaagatcaagatcaatcttcttgataccccgggttacttcgatttcgttggtgaagtggaagaggctgtcagcgccgctgacgcagcgatcattgttgtaaactgcaaggcagggatcgaagttggtacagaaaaagcatgggatctgtgtgaagaatataaactcccgagaatcatatttgtcacaaacatggatgatgatcacgcatccttccgtgaactgatcttaaaacttgagaagaagttcggaagaaagatcgctccgttccaggtgccgatccgcgaaaacgagaaattcgtcggtttcgtaaacgcagtcaagatgcagggccgccgctttacgaatctgtccgattatgaggactgcgagatcccggagtacacaaagaaaaacctcggaattatccgtgacgccctgatcgaggcagttgccgagacgagtgaagagtacatggaacgttacttctccggcgaagaattcacgcaggatgagatttataccgcagtacagactcatgtgtgcgacggttcgatcgttccggtcatgatgggttccggaaccaactgccagggcttcaatgcgctgttaaatgcgatcgaccgctacttcccgtcaccggataagggcgagtgcgtcggcgttgacgtatcaaacggcgagcatttcaccgcaaaatacaatgacgaggtttccctctctgcgagagtattcaagaccatcgttgacccgtttatcggaaaatattccttaatgaaggtatgcaccggaacattaaaaccggacagcaccctttacaatgtaaataaagacgcagaagaaaagatcgcaaaagtctacgtgctgagaggcaaggacgtgatcgaggttccggagttaagggccggcgatatcggtgctgtagcgaaactctccgtgacacagaccggcgatacgatcgccctcagatctgctccgatcgtataccacaaaccgaagatctccacaccgtacacttatatgcgttttgcagccaagacaaagggcgacgaggacaagatctccagcgcactcgcaagaatgatggaggaggatctgacactccgcgttgtgaacgatacggagaatcgtcagagcttactctacggaatcggtgaccagcagcttgaagttacagtcagcaagcttctcggccgctacaaagtcgatgtggaactctccaaaccgaaatttgcgttccgtgagacgatccgcaagaaagtggaagctcctggccgctataagaaacagtccggtggacacggacagttcggtgatgtcaagatgtcctttgaaccgtccggcgatcttgagaccccgtatatttttgaagagaaagtattcggcggagcggttccgaagaactacttcccggcagttgaaaaaggcgtgcaggaatgctgcttaaagggacctctggcaggatacccggtagtcggcatcaaggcaactcttctcgatggctcctaccatccggtagactcctccgagatggcgttcaagatggcatcaacaatggccttcaagaaaggatttatggaagcaaatcctgttctcttagagccgatcgcctctgtgaaagtcgttgttccggataagttcaccggcgatgttatgggtgatttgaacagaagaagaggacgcgttctcggaatgaactctctccatggcggaaaacaggagatcgtggcggatgtcccgatgtccgagatgttcggctacaatacggatctccgctccatgaccggcggtatcggagaattctcctatgaattcagccgttacgagcaggctcctggcgatgtacagaagaaagaagtggaagcgagaaccgcaggcggagaagtggacgcttaaagtttttgcacgtaactgtgaggacactgaacagttacgaacagactacgaattcagggatcagccgcaaggctggtccccttttttacgcgaacaacgagccaaagtccgctcttgcgcgagaccttggcgactgtcgcgataacaaggggaaactcgcgaagcgtgttttcacttgttgaggtcaaaagatatttacgttccgcctgatacaggcaaattccattccctgcctattaccttgcagaagaggtaagagacttccgtggtcttgttaaaatacagacttcctgaccggagtgaggagatttcccggaactttcacagttttgccgaacttatgccatagttttccattgacttccatctggacagaaagagagaaaaatggtatagttattaactgataagctataaatgcagacgaatgaacggaaaaatcgttacagtttatggatgatcgttttatgaacaaagactggaacgtgacagcctgctgatcggataaaagatttccgggatgcagaatgctccgacagaaaatgaggaattagaatgagaaaatggtttttgattatggccgcggcgcttgtactttgctccgcgtgcggaaagaaagacacttcggtgaacggtgtgacccaggaagcgcaggcaagttcaacagaagcggagagcctttataaggaaggagccgggtatgttggagaagaagattatgagagtgcgatcgaatcactgttaaaatgtattgaactcgatccgaattacagtaaagcttatatccagctttccaaggcatatatcggaaatgaggaatatgacgaggcggaggcaatcttaaaacagggatatgaaaagacgaaagatccgtccctggagaaagagcaggagaactgcatccgctcgatctgccaggccctgacagacaatgaagactatgagactgcgatcccgtggctcttaaagcttcaggagatcgacggggttaccgtggagaactccttacagctctcagaagcgtactccatgatggatgactacgaaaacgcagtggcagtcctccagaaagcggatcagaacgatgagagtattaaaagtgctctgctggaggcgagaatttcctacgggcagtattgttatgacgaagggaaaaatgaccaggcgatcgagactttaaaggccgtgatcgatgaggctccggaccggatcgatgcgtattccatgctgatcaccgtgtatgttgataccggaaaggcaaaagaggcggagagcatcgtccagagcggactggagcgctttgtcaaccagaattccacggtgacggatgagcagctggatgaatttttaaattcagcatcctcctattatatggaacttgaggatatggatgcatgcctgaaattctgggagaaggcagcttccatgagacctggaaataagagctataaagaggaactggacagttatcgttcttccgcagcggatgaggcatatgcgaaagcagatgaactcctggaggccggagatgtggaaggcgcttccaaatattacaaacgtgcgttcgcactggctccgtccaactatgacgcgggcgtgatcagcggtggagattatacatactgccttaacaaggacggttcctggagacttggatggtatacggatgagaccggcggctcttattacttcagctcggcggccggacgcctctatgcgagtgcagtgacaggataccagcagcttgacggcgcggtatattacttcgaggatgacggaagaatgctggtggacgacacgactccggacggacgtttcgcggatgtggacggaaaattgttggatcacaatccatatgaggatgatgagacagccggcgatgagacggatgctgcagatgaaacggaagaagaaacggcggcagagaccgaagaggaaacttccgctgcggcaaaggagacgacagcggcggtaaaagaaactgtgaaggagaccacaaaggcaaatccgcagccgacacaggcagcagccgtaaattccggaaatctgaaactgaatgccgatacgctccaggaggcaagcgacaagggcggaacaaacacttacgagaagacggaactctttgacggatcgactggaaaacttacgatgggcgatgtatataactgtttgtccaaatacggaaagaccgagtgggtatcccagaagcttccgtatgagctgaaagttgcaaacgtaaaggtatggatccttccgggcgacaactggaatacaacaggacttgtcatcaaggatgcatcccagtacttcgaggtcctgaagaagaaagcacttcctgacaatgtacagtttgcggtcgagtttgactcctccgcagccgataagctggatatcagcaaggtgagacgtacgaacggaaactaaaaattgcaataatataagaaggggcgggaatcccggcagaagtgtcagggttcccgccctttttccagtttgcgcgaacagcgagccaaagtccgcactttcttatgaaactaaaaaacgccgcctgggatccataatagaaaccgggcggcgtaaaagattttctgaaattcaggattacagaagtccctcgttgtactttctgatgagcttctggatcttgtctgtcggggacagggagtttccgatggaaacgtcgtggtttaaagagttgatgatggcagcaatgtatttgctcatatcagcttccacataccattcctttgtgaagagttccggggaacggtagtttaagtttgttgtgacaacgctgtcgatataacccttctggtagaactcgtcgaatttgtcgaagcctgccgtgaagagaccgaaggtacagcatacaacaaccttctcagctttgcgctcctttaactcttttgcggtgtcgagcatgctctcgccggatgcgatcatatcgtcgacaacgatcacagtctttccttctacagagcttccgaggaactcatgggcaacgatcgggtttcttccgttgatgaccttggagtagtctcttctcttgtagaacatacccatatcaacgccgaggttgttggcgaggtatacggcacggctcatagcaccctcatccgggctgatgaccattaagtggtctttatcgatctttaaggtattgtcatgtttaaacagtgcttttacgaactggtaggtcggcatgaaattgtcgagaccggataacgggatcgcattctgtacacgcgggtcgtgtgcatcaaatgtgatgatgttggacacgcccatgcttactaactcttcaagcgccattgcgcagtctaaagactctctgtgagtacgcttatgctgacggctctcgtaaaggaacggcatgataacgttgatacggtgtgcggtggatgctgtagcgccgatgattctcttaagatcctggtagtggtcatccggggacatgtggtttacatatccggacatcttgtaggtgagagagtggtttgtcacatcgaccatgcagaaaatatcggttccgcgaacagattcatttacgattccctttgcttcaccgcttccgaaacgcgggcatgcgcagtcgagaaggtaggagtcaacatcgtagccgcggtactgtaaattgccctgacggcgaattaattcttccgtatcgttgcggcggaagtttacgatgtggtcattgactttctgcgcaagatcacggcagctctcaagagcagcgatcttaagcggtgcgagcggcagacggtcgttgaaaacgtactgattagacatgtcagataatcctccgatttttagtggtgcggtctgatcccttgtcgggtcagactgtccgatcatatttttgacctgcatttccttatttatgcgggatgagcaggcattcacgccgagtataccattttcagacatttttcgtcaatagtttcgcatgaaaattcgtcagaacattcctttacaaattggaggaagattggtatgattgtgtttagaaccatgcaggaagggaaaataaagtgaaatatcagggacataaaattacggcagtcgctcccggttccatcgcagaagaactggaactggagccgggcgatgtgcttcttaccatagacggggaagaactggaagatatcttcgactatgattatatgacggacgctgagagcttcgtgatggtcgtccggaaagcagacggcgaagagtgggaacttgagatcgagagcggcggggaggacttaggactcaccttcgagaacggactcatgagtgactacaagtcatgttccaacaagtgcatcttctgctttatcgaccagatgccgccgggaatgcgtgaaactctctactttaaggacgatgactcgagactttcgttcctccagggaaactacatcaccctgacaaatatgaaggacaaggatatcgagcgtatcatccgtttccatctggctccgatcaatatctcggtccaggcgatgaacccggagctgcgctgcaaaatgctccacaaccggtttgcgggggaggcgttaaagaagatcgaccggctttacgaggcggagacggagatgaacgggcagatcgttctctgcaaaggcgtcaatgacggaaaggaactggcgtacacgatcgagcagctctcaaagtatgcgccggtaatgcagagtgtgtcggttgttccggtcggactctccaaataccgtgacggcctttatccgctggaaccgtttacaaaggaagatgcctgtgaggtcattgacctgatcgaaaaatggcagaagatcaattatgagcgccacgggatccattttatccatgcaagcgacgagtggtatattctggcggaacgggagatgccggaggaaggacgctatgacggatacatccagctggaaaatggcgtcggcatgctgcgtctccttcaggaagaggtgatggacgccctggacgggaagaaggacgacggggtgaaggaagaactctcgatcgcgacgggatacctgccgtacccgtatctggaaaagcttgtgagggagatcgaaaaggtctatccgggacgaaacgtccatgtatatcggatccggaatgacttcttcggggagaagatcacggtggccggcctcatcacggggcaggatctgatcgcacagctgaaagaaagaccgctgggagagagattgcttcttccggccgtcatgttcaaaagcggagaagaagttttcctggatgacatcacaaagacccaggcggaagatgctttacagattccgataaatatagtaaaatcaagcggatatgaccttgtcgatgcgatcctcgatccggaagcggcgagagagcagactgcggaacacggggcatatgagcttacaatgaaagacgccggactcacggaagacggagaagtcattccggactgggacagcgaagtatagaaatgaggaaaaaatatgagtaaaccagtagtggcgatcgtcggcagaccgaatgtgggaaaatccacactctttaatgtacttgccggcagcacgatctcgatcgtaaaagatactccgggtgtgacaagagaccgtatctatgcggactgcacctggttaaacaacaactttaccctgatcgatacaggcggaatcgagccggattccaaggacatcatccttgcccagatgcgggaacaggctcagatcgcgatcgataccgcggacgtgatcattttcatcgtcgatgtccgccagggacttgttgacgcggattccaaggttgcggatatgctcagaaagtccaagaaaccggtcgttcttgcggtcaacaaagtggacagtatggcaaaattcggaaatgatgtatacgaattctacaacctcggaatcggcgatccggttccggtatccgcagcgtcgagactcggtctcggtgagctccttgacgaggtagtaaaatacttccgtgaggaccagtatgacgacagcgaggacgaccgtccgaggatcgcgatcgtcggaaaaccgaatgtcggaaaatcttccattatcaataagcttctcggcgagaaccgtgtgatcgtgtccaacatcgccggaacaacgagagacgccgttgatacggagatcgtgagaaacggcacggaatatatttttatcgatacggccggtctcagaagaaagagcaagatcaaagaggatatcgagcgctacagcatcatccgcacggtaacagccgttgagcgcgctgacgtggtcctcatggtcatcgacgccgttgaggggatcaccgagcaggatgcgaagatcgccgggatcgcccatgaccgcggaaaaggcgtgatcgtcgttgtcaacaagtgggatgcgatcgagaagaatgataagacgatctatgagtacacaagaaaattaaaagagaccctgtcctatatgccgtatgcggagtatatcttcgtgtccgccttgaccggacagagaatggaaaaactctttgagctgatcgatatggtccgcgagaaccagacgctccgtgtggcgaccggcgtcttaaacgagatcgtgacagaagctgtcgcgatgcagcagccgccgtccgataagggcaaacgcttaaagatctactatgtgacccaggttgcggtaaaaccgccgaccttcgtaattttcgtgaacgataaggagttaatgcatttctcctacacgagatacctggaaaacaagatccgtgaggcctttggcttccgcggaacatccctgaaattcatcatccgtgagaggaaggagaaggattaagcgatgggcagagtgctttgtcttgttatgggttatgtgtttggattattccagacaggatatctttacgggaagatgaaccatatcgatatcagaaattacggcagcggaaactccggaacgacaaacgcgctccgggttctcggaaagaaggcgggactcatcgtctttgcgggcgactttttaaagactgttttcgcatgtcttgcagcccggatcatctttaaggcaagcccggatacagacctctacgtgctctatgcgggtctcggggttgtccttggacataatttcccgtgctatctgcactttaaaggcggaaaagggatcgcatccatggcggggatcctcgtgtccatggactggcgcgtgacgctcgtctgtgcggctctgttcctcggcgctgtgatcatcacaagatatgtgtccctgggatcgatcctggtcgtgatctcattcttcatccagatgctgatctatggatcacggggggattaccgtgtgtccgaaggaagtctcatggagttttttgccatctcctttatgctgatggcgatggcgatctggagacacagggcaaatattaaacgactgttatccggtacggagaataagctctggggcggaaagaaataaaccggcatcaggtgcgtacataagaaaatcaaccttagggcgtagaaaaaggagttcctgaacatggaaaagattggtattatcggttccggtacatggggaaccgcaattgcggtactgctggtaaataacggacatgaggtgacactctggtccgcgatcccggcagagatcgaggagatggcaaagacgaggacccacaagaatcttccgggtgtgacacttccggaaggactcgtctatactgcggatcttgaaaaggcgatggcggataaagatcttcttgtgatggcagtcccgtctgttttcgtgcgcagtacggcgcagaagatgaaaccgttctgtaaggatggccagctcattgtcgatgtcgcaaaggggatcgaggagaatactctcgatacaatgacgcagatcatcaaagaggagctcccgatggctgagacggccgttctctccggaccgagccacgcggaagaggtaagccgcggactcccaacgctctgtgttgcgggatcccacaaaaagaagatcgcggagtatatccagtccaccttcatcagtccggtattccgtgtatacacgagtccggatgtcctggggatcgagacaggagctgcgttaaaaaatgttgttgccctggcggccgggatcgctgacggtcttggttacggggacaatgcaaaagcagccctcatcacccgcggaatggcggagatcgcgagacttggcgttgccatgggcggaaaatatcagacttacacaggactctccgggatcggagacctgatcgtgacatgtgcaagcatgcacagcagaaaccgacgtgccgggatcctcatcggaaaaggatacacgatggaggaagccatgaaggaagttcagatggtggtggaaggcgtttattcggcaaaggctgcgagagcgcttgcaaagaaatataacgtctccatgccgatcgtcgaacaggtcaacgaggtcctgtttgaaggaaaaccggcgaaagaggccgttgctgacctgatgctccgcgacaagcgcatcgagcacagcgatcttccgtgggaataaagatccggacagacctgccgcatgagtgaataaaaacatccccctcgcgcatacactgaaacagtatatgcgagggggtatttttatggatgatttccatgtatacaaggatatcgaggcgaggacgggcggcgagatttatgtgggcgtcgtgggacctgtgcgcaccgggaaatctacgtttatcaagcggtttatggaacttctcgttctcccgaaccttccggacgggcagaaaaagtcgcagaccagggatgaactcccgcagagcgccgctgggaagacgatcatgaccacggagccgaagtttatcccgaaggaggcggcggagctggaactcgcggaggggatccgggcgaaggtgcggctcatcgactgcgtgggatttatggtggaaggcgccgcgggacacacggaaaacggggaggaacggcttgtgaagactccctggtacgactacgagatcccctttacccaggcggcggagatcgggacgagaaaggtgatccgggaccattccaccatcggcattgtcgtggcctgcgacgggagcttcggggagcttaccagggaggacttccgggaagcggaagagcagacgatctcagagttaaaggagatcggaaagccgttcctgatcgtgctcaattccacgagaccgtatgcggcggagacgaaagcgctggcgcttaagatggaaaaccagtatggagttccggtccgggcggcgaactgtgagcagttaaagaaggaggacattgaggagatcctggggacagtccttctggagttccccgtgacggaactcgaccttgagatcccgaagtgggcggagatcctgccggatacccatgcgatcaaggcggacatgatcgcggaggcggaaacgcttttaaaacgttctgttcagatgaaagacgtgccgaaggagacggtcccgggagaagaccgggcggtgaaaaagctgatcgcggatgaactcgatcttgcgagcgggcgcgtgacgatccgggtcgtggtcgacgagaatgcgtacttcgaggtcctgagcgacatctccggactgccagtgcgcgatgaatacagcctgtttaagatcctaaaagattcagcggagatgcagggcgagtatgagaaagtgaaaaatgccctggcggaggtccggcagaaaggatacggcatcgtcttgccggataagacggagatttccctggatgagccggagctgatccgccacggcagcaaatacggggtgaagatccatgcccaggctccgtccatcaatcttatcaaagcgcggatcgagacggagatcgccccgatcgtcggaaacgagcagcaggcgaaggatctgatcgcgtacataaaggacggggaagcgacggaggacggcgtctgggatacgaatatctttggaaaatccgtggaacagatcgtggaggacggcatgcaggcgaagatctcccagatgacagaggattgccagatgaaactccaggatacgctgcagaaaattatcaatgacagtaatggcggaatgatttgcataattatctgaaatttgctataatagatgcaaataatacagctgatttgcagcgcgaggaggggttccatgaaactgacatttatcggcgcggatcatgaagtgactggcagctgccattatctcaatgcggctggaaaaaacatcctgatcgattatggtatggaacagggcggaaacgtctatgagaatgcggatcttccgatcccgttctccgatgtggattacatctttatcacccacgcccatatcgaccacacgggccttttgccgttgatctacgcgaagggcttcaagggtcagatctttgcgacccaggcgacctgtgatctctgcaacattatgttaaaggacagtgcccacatccaggagatggaggcagagtggaagaacagaaaggcgagacgtgccggaaatccggaagttcaggcactctacacggtcaatgacgctgagggcgtcttaaagcactttgtcccgtgccactacggcgatatcctgacgatctgtgaagggatcgaggtacgctttactgatgtcggccatctgctcggctccgcgtccatcgagatctggatcgacgaggacggcgtaaagaaaaagatcgtgttctccggcgatatcggaaacaagaataagccgctgatcaaggacccgcagtatacggatgaggcggattatgtggtgatggagtgcacttacggcgaccgctcccatgacaggacccacgagcacatcgaagagttcgcgaagatcatccagagaacactggatcgtcacggaaacgttgtgatcccggcgtttgcggtcggcagaacgcaggagatcctctattttatccgtaagatcaaggaagggggacttgtcaccggacatgacggcttcccggtctatgtcgacagtccgctcgccgtcgaggcgactcatgtgttcaataagaacatttccgagtgctttgatgaggaggcgatggatctcgtgaaccgcgggatcaacccgatcgcgttcccgggactgaatctttccgtcagcagcgatgattcccgggcgatcaactttgattccgagccgaaagtcatcatctccgcagcgggcatgtgtgatgccggacgaatccgccatcacttaaaacataacctctggagaccggagtgtacgatcgtgtttgcaggctaccaggctgtcggcaccctggggcggagcctgatcgacggcgctgaggtcgtgaagctcttcggcgagacgatcgatgtcgaggcggagatcgttcgtctggacggactttccggtcatgccgacagggaaggacttctcgcctggatcaacgcgttcaagaaaaaaccggaccgtgtgttcatggtacacggtgatgatcttgtatgtacaaagtttgcaaaccttctgaggacggattacgatcttgtggcggatgcaccgttctcgggatcggagttcgatctggcagcgggtgtatggctcaaacagaccgtcggcgttccgatccagaaggagactgcaagacagaaggagaacaagtcgatcttcgctcttctcgtggctgcaggagaacgtctggtgcggatcatccagaagaaccgcgactgtgcaaacaaggatatcaagaagtttacggcggaggtcaatgcactctgcgaaaaatgggatctctaacagcagcttaagactgcatgagcccggaatatcatgaaataagacatcctgagaggaaacaatacgacatgaaagtgacactttatacggacggagcagcccgcggaaacccggacgggccgggcggatacggagcggtgctccagttcatcgataaaaacggggttctccacgagaaggagctgtccgcaggatatgtgcggacaaccaataaccggatggagctgatggctgcgatcgcgggacttgaggcgttaaacaggtcttgtgaggtggacctctattcggattcaaaatatctggtggatgccttcaaccagaaatggatcgatggctgggtgagaaacaactgggtccgcccgaagacgggaccggtgaagaactcggacctctggaaacggctgcttgccgcgatgaacccgcataaagtgacgttccactgggtcaaaggccacgacggacatcccggaaacgagcgctgtgaccggctggccaccggcgccgcagacggaggaaatctgctggtggatgaaggagtaggaaactaggactgtcaaatgcccgggtattccagcgtgcaagtccgctggtctgcacggtcgcttgatgacactttttacaaaagtcttacaatctattactaatttgcgttttttgttcacaaagatcttccgatatggtatctttttagtagaaggacagcagctgtaaaaggggctgtaactgtgagagtaccgaacagttacaagagactgaaaagaccgggagagagcatatatgggcagacgcagaatatggttgatcattattgggatcctgatagccggggtatccatcacgtgggcagtggaacgttttgtttcctcgcggggagtggataccgcggctgtcgttggttttgaggcggatgccctgccgcaggggcctgtggacgcgggaaatccttatgcggcagaaaacaagatgaaggcggcgggaacgccggatccacagactccggaagatgcagaagtcagtgcccttgcaatggcagagaatgagatggcagtggaggagagcgaaacaggggcagcggcggagagcgcagcagaagatctgcaggcttctgaggagattgtgaaatccccgctggaaacaggcagtgacgtttcggaggcgcagaagaacgagaaatctgcggcggaatatacactctcagattttaaagaacgccttgagacggcacggaccgaggcggaaaaataccaggatgatccgtcgatgagccagacttcccggtatgcggaggcggagtatgtgcggaatctctgggaccgggagctgaacatgatctacgcagagatccacaaagcgatggacgagaatgcggcggaatcgctccggcgcgaggaggtggagtggatcaaaaagagggatcttgcggcagataaggccagcgcaaaaagatccggcacacctgcccagagcgtcgagtatgtccggacatcggccaatatgacaatggaccggtgctatgaactcttaaagaactatggggactatctggaacccggggaagatccgggggaaaagtaaaaaacatcttgccaaccgaacaagaaacgattatagtataagttatgagaatctgcgccaaagaccggaccaccggctttatgggcagatcccgaaaaaataatattatagaaactgtacaaatgtgtcattttaaacacaggcgtctgaattttggacagccggaaaaggaggcgtttttatgtccgcatttttcgcatcatttgtttcaacagccgtcaaagctgtgattctggccgcagttgccctggcgggaatcgttctgggtaagaaattcagagataaaaaaagtacacaacagtaaccaggaggcagtaccatgcagaaatatggtgtaaacgaactgaggagaatgttccttgaattcttcgagagcaagggacatcttgcgatgaagagtttctccctcgttccgcacaacgataacagcttacttttgatcaactccggtatggcaccgttaaagccgtacttcacaggacaggagatcccgccgagacgcagagtcaccacatgtcagaaatgtatccgtaccggcgatatcgagaatatcggtaagacagcccgccacggcacattctttgagatgctgggcaacttctccttcggcgattacttcaagacagaagcgatccactgggcatgggagttcctgacagagtgcgtgggaatcccggctgaccgtctctacccgtctgtttatcttgatgacgatgaggccttccgtatctggaatgaggagatcggtatcccgaaagagcggatctatcgtttcggcaaggaagacaacttctgggagcatggcgcaggtccgtgcggtccgtgttctgagatctactatgaccgcggagagaagtatggaacaggtccggaggacgttatgggcggcgaaggagaccgtttcatggaagtatggaacgttgtattctcccagttcaacaatgacggacacggaaattacaccgatctgatccagaagaacatcgatactggtatgggacttgagagactggctgttgtctgccaggatgttgcatcccttttcgacgtagatacaaaccgcgctctgatggacgaggtaggcactctggctcactgcagatacgaggaggacgacaagaaggacgtttctctccgtatcatcgctgaccacgtaaagagctgcacatttatggcatctgatgggatcatgccgtccaacgagggcagaggctatgtattccgcagacttttaagaagagctgcacgtcacggacgtatcctcggaatcgaaggaaacttcatgacaaagctcgcccaggttgtgatcgatctctccaaggacggttatccggaactggaagagaagaaagatatgatcctccgcgtcatcgaccaggaggaggagcgcttcgcaaacacgatcgacaaaggacttgagatccttgctgaccttgaaaaagacatggaagcaaagggaacaaaagtccttgcaggtgaggatgcgttcaaactttacgatacttacggattcccgatcgatctgacaaaggagatccttgacgataagggactcactgtcgatgaggaaggtttccacaaggcaatgcaggttcagagagagactgcgagaagtgccagaaagactacaaactacatgggacgcgacgatatctaccagaaactcgacgcatccttaacatccgcttttgtcggatatgataagctcgaagctgagtccagactgacagctcttgtaagacttgcttccgatgaagagggcgaggatcagatcacagacgcagtgacagacggcgaaaaggcatgtgttatcacatccgagactccgttctacggaaccatgggcggccaggtcggtgaccgcggcgtgatcgagagcgcaaacggcaagttcgaggtagaagatacgatccaccttcagggcggaaagatcggccatatcggacacatggtaagcggtatgttccagacaggcgagacggtaactctgaaggtagatgaggagaaccgcgccctgatcggaagaaaccacagtgcgacccaccttctccataaagctctgagaaccgttctcggaactcatgttgagcaggctggctccctcgtgacaagagacagacttcgtttcgacttcactcatttctccgcgatgactccggctgagatcaaggaagtggaagcgatcgtaaataaagagatccgtgcggcacttccggtcgttacagacgttatgggtctggaggacgcgaagaagacaggcgcgatggcgctcttcggcgagaagtacggcgataaggtccgtgtcgtaagaatgggagacttctccacagagctctgcggcggaacccatgtaaagaatacttctgagatcagctgcttcaagatcctctctgaggctggcgttgcagcaggtgtgagacgtatcgaggcactgacctccgacggtctgatccatcattatgagaatgtggagcaggagcttcatgcggcagcagctgcagcaaaatccactccggcagacttacagacaaagatcgagtccatgatggaggagatcaaggcacttcactctgagaatgagaagttaaagagcaaacttgccaaagaggcaatgggcgatgttatggatcaggttcaggatgtgaagggcgtaaaagttctcgcagtccgcgcagacggcgttgatatgaatggcctgagaaacttgggcgaccagttaaaggagaagcttggcgagggcgttgttgtgatcgcatctgttctcgacggcaaggtaaacctgatggctgctgtgaccgatgaggcccagaagaagggcgctcatgcaggaaacctcatcaaggcgatcgcaggccttgtaggcggcggcggcggtggacgtccgaacatggcgcaggccggcggaaagaaaccggagggcgttgcggacgcactcgcaaaggttgcggaagtcgtttctgagcaggtaaaatagttaaaatcgtaatataatcaaaaaaatttaaaaaaatgtatttttccggtaaaaacgggttgacgaatgtgtaatttatgatataatcataccagtgctaaaaaatacccaaacagttgtattatgcacaattacacaactggagggaggttaggtgtgagctatgtcaaacgtaatcgttaaagataacgaaagcctggacagcgctttacgcagattcaaaagaaactgcgcaaaggcaggtattcagcaggagattcgtaaaagagagcattatgaaaagccgagcgtaagacgtaaaaagaagtctgaagcggcaagaaagcgcaagtacaactaataagcgtacaggggctgttcctttggggacggctccttttctttttgcgcgaaatacaggataagaaaaagctgttgcgggataaagacgggcgtattatactaaaaaagagcggacagggtcggctcccggaaccggagacgacaggtctgcgaaaataaatgttgtctgtgagccaaagattcagcccacagacatggtgacgtaaaatacattgcatcagaggaaggaaacaaacatggaaaagaaaattgagagtctgatcagagaacataagatcatcgcgatcttaagaggggtaccgtccgataaggttgtcgatgttgcgaaggcattatatgacggtggtatccggcttctggagatcacattcaaccagaaatctgagacaaagctcatcgatacaccgaatgcgatccgcgcggtccgtgaggcgctcggcgacaagatggtgatcggagcgggtactgtgatgtctgtggaggaagttcatgctgcaaaagaggctggtgcgtcatttacccttgctccgaacgtggatgagtctgtgatcagggagacagtagcctgcgggctggagtcgatcccgggtgcgatgactccgtcggagatcgccgatgcttatcgttacggcgcatctgtcgtaaaacttttcccggccggaaaccttggcctttcctactgcaaagctgtcatggcaccgatcaaccatattccgatgatcgcggttggcggtgtggatgacaagaaccttccggatttcttaaaagcaggtttcatcggtcttgggatcggctccagcctgacaaataagaagatgatcgaagaaggcagatatgacgagctgaaggcccttgccgagacttatgtgaaggcagctgtaactattcagtaggtctgcgcatttactgcgctgaccgtaagaaaacatcggcttgaaggcaaaaatcccatcggcgaagccgatctggaatggatttttgcgcgtaactgtgaaggtactgaacagttacaggctgctgaaaaataagaaacggggagaaccagtcaaaaatgaaaaattatacgatcacgatcgatacaggtacgaccaacactcgtgtattcctgtttaatgaaaaaaatgaggtggcggcatccgcgaagtctgagatcggtgtccgcatcaccgcgatcgatggaaataataaccggttaaaaacggcgatcaggggctgccttgaagaagttctgaaacaggcggggatcacctatgatgaggtgaagaaagtcgttgcctccggaatgatcacctccaacgtgggtcttgtggagatcccgcatgtgattgctccggcatctgccgaagaccttgcagaggctgcaaagagcgtgctgatcgaggacgtatgcccgcttccgatcctctttattccgggggtaaagaaccgtgacggaaagctggatcttgcgacttttgagtccatggatatgatgcgcggtgaggaagtggaaacggttgcggtcgttgagagccttccgaaaggacaggcgtaccttctcgtccttccaggttcccacacaaagtttgtctctgtggactgtgccggaaagatcacgggctgtctcacgacgatcagcggagagctcctctctgtgatcacaaacgacaccttgatcgcggatgcagtgggtcattccttcgcctccgaggagacttatgcgaaagagtatgttctcgccggatatgagactgccaaaaaggccggaatcggccgcgcatgcttttccgcgaggatcttaaacacgttcgcagagccggataagacgaagatcgcaagctatgtattgggtgctgttttgcagaacgatatggaggcagtcaagaacagcggcgcattgaaatgcgacgcggatacgacggttgtgatctatggaaagaacccgttgagagaagcactcatggatctcttcacagaggaacatttcttccgccatgtgacggaattcgtcccggaggattctgttccgacatccgcaaagggagcactgcatattgcatccctggcggaaaaatttatataaaatttagaaaacttagacataatttacatctgttttatcaatctatcacacagtttaacgcgttctaagcgccggacaggttgacggtgagggccagtttttctaaaatagatatgtataaaaaatctctgaaaattataaaaaaaatagaaagagattcgaaaaatattgtggctgaacggctgcaaaatatctaaaaaggagagacttgttatgaaaaagcaagtattaagtctggccctcgccgcagcaatggcggcatccctcaccgcatgcagcggtaattccagcacaacagagacaacggcagctgccggagagacgaaagctgctgaaaatgcagcgacagaaagcaaagaagcggacgcttccggcgtggatgtatccggctggaagaataagaccgttacctgtatcgttccttacgatgcgggcggcggcactgatacagtcatgcgtgcgttagctgacgcagcaaaaggttcctttaagaatatttccgtagagaaccgttccggcggcggcggagcgaccggtatgcttgcaggagcgaacgctgcggcagacgggaccacggttacgatgatcacggtagagctcgcaaccctcgaagcgatgggaacaaatgcgggtcttacatattccatgttcaagccgatcatgatggtaaacagcgcatgctccgcgatcaccgtgaatgcgaaggatgaccgtttcaacacgatcgaggacttcatcaactacgcaaaagagaacgaggtttccatgggcaactccggaaacggcgcgatctggcatctcgcagcagctgggcttgcaaaagagacaggtgcaaaattcaaacatgtcgcttacgacggagcagcaggtgcgattacagaccttctcggtgagcatatcgacgcggtagcagtttcctatgcggaggttgcaaactatgtggaatccggcgacttaaaagtccttgcagtcatgaatgacaagcgccttgacgcgatcccggatgttccgacatgcaaagaagcaggctacgatgttgttctcggtacatggagaggtctcggagtaccggcagataccccggacgaagtagtagagcagctctatcagatcttctcccaggcagcagagtccgatgcattcgttgatttcatgaataagtccaacaatgtgatcgatatcatggacggcccgagcttcgaggagagaatcgtttccgaccttgatacctacaaagcgctcgtaacagacctcggattaaagattcagtaaatatcagaagggagccgcagctcatcctgcggttcccgtatgtcagaaaaacgatattacgaagaatcgaggttcctgtatgagaaaaggaaatattattgcgggcattgtctgcgcggcagttgccctctatgtcatcgtgacctgtctcggctatccgagagcagcggcttacggtacaggagttccggggccgggactctggccggggatcattgcggcattgcttctgatctgctctgtcggactgatcatcggaaccctgatgatgaaaaaagaagatcttccggaacttccgatgtggacgccgggaacaaaacgtgtatacatttccatggtgatccttcttgtatacatgctggtgttatctacagtcggctttatcattccgtccgtgatcatgctgtttgcattctgccagtggttccacaggggagcgatttggaaaaatgcggtgatctccatcgcagtgatccttgtgatctactttgtattcaaaaatttcctgaatgtgccgatcgatttcggtatgttcagtatataggagggctgaaatatgagtttctttcttgaagttgtacagtcagcgttcagcccgatggtcttattctacatgtttgcgggcgttgcggcaggtatctgcatcggagcattgccgggactgactgccaccatgggcgttgcgcttcttcttccgcttacattcggtatggacgccacatccggtatcttaatgctgcttggaatctatgtcggcgcgatctacggaggatccatctccgcgatccttttacatacacctggtacaccggcctccgcggcgactgccatcgatggataccagttttccaaacgcggtgaggcaggacgtgccctcggtatcgcgacactttccagctacatcggcggcgttgtgagctgtctctgcttatggcttatcagcccgcagctcgcaaaacttgcgttaaaattcagttctgcagagttctttttactcgcagtattcggtctctgcattatcgccaatatctccggtgaaaacatggcaaagggtctgatctgcggattcctcggaattttaacagctaccgtcggcatcgacagtgtgacaagctatatccgtttcactgacaacgcaaaccttctttccggcatccagtatatcccggtcatgatcggactcttcgcaatgagccaggcgtttgagacgatcgaggacatctacagcacggatgagatcgatgcgacagtcacaagacttcttccgacgaaagaggatgtgaagaccatgttccgggttgccccggtgacaggacttatcggaaccattatcggtatcatccctggtgcaggtgctgatatcggatccttcgtcggatacaacacagcccgcggaatgtccaaacatccggaactgttcggcaaaggaagcccggaggccgttgctgcttccgagggcggaaacaacggtgttaccggcggtgcgatgatcccgatgctgacactcggtgttcctggtgatgctgtagcagccatcatgatcggagcgctgacgatccagggcctgactccgggaccgatgctctttaagacaaacaaggtccttgtatacacgatcttccttggaatgttcgttgccaacacgatcatggtactccttggattctcctgcatccgccttttcacaaaggtactcagcgttccgaagacgatccttactccgatcatcttcatcctctgcgtagtcggaagctatgcgatgagaagcaacttctacgatgtaggaacgatgctgatcgcaggtgtcatcggctggctcatgggtaaagtaaagatcccgacaagcccggcgatccttggcctgatccttggaccgatggcggagaagaacttccgtaccgcactcttaaagtccagcggtaatgtcggcgtattctttaataccccgatctgctggttcttcctggcactgatcgcatttactctcatcggtgcagtgcgcagccagataaagccaaagaagaaagcagaatgacagctgaaaaaaatattgcataaaaattgaccatgttctgcccggatccggaattcatttccagcgggcagaacatttttttgtttaaaacttacaaaaatcatgaaaaacaaaggaaaaacgaaactatcttttgtaaatagcgccagaaaggcgttgacaatttgttcacaaacggctaaaatatcttttgtaaaaaattcataaagaatcctaaaaaatcgttaagaaagtattaggaaagaaaaggagtagttttatgagaaaaagagtagtatcgctcgcaatggcagcagctatggctctctccctgacagcttgcggaagcagctccagcaaaacagagacaactgcagcagcgacagaggcagcaaaaacagagacaactgcagcagctgagggggcagcaacagaggcagcagcttctggcgttgacacatccgcatggaaggataaaacagttacatgtatcgttccttacgatgcaggcggcggtaccgatacagttatgcgtgctttagcagacgcagctaagggatctttcaaaaatatttccgtagagaaccgttccggcggcggcggagcaacaggtatgctcgctggtgcaaacgcaaaagctgatggtacaacagttaccatgatcactgtagagcttgcaacactggaagctatgggaacaaacgctggtcttacatattccatgttcaaaccgatcatgatggtaaacagcgcatgtgcagcgatcacagtaaacgcaaaagatgaccgtttcaacacgatcgaagacttcatcaactacgcaaaagagaacgaggtttccatgggtaactccggtaacggcgctatctggcacctcgcagcagctggtcttgcaaaagagacaggcgctcagttcaaacacgttgcttatgatggagcagcaggtgcgatcacagaccttctcggcgagcacatcgatgcagtagcagtttcctacgctgaggttgctaactacgttgagtccggcgacttaaaggttctcgcagttatgaacgacaaacgtcttgattccattccggacgttccgacatgccaggaagctggttacaatgtagttcttggtacatggagaggtcttggcgttccgaaggatactccggacgaggttgttgaccagctctatgagatcttctctcaggcagcagagtctgacgcattcgttgacttcatgaacaagtccaacaatgtgatcgacgttcttgacggcgctacattcgaggagcgtatcaaatctgaccttgagacatacacagctctggttacagatcttggtctgaaagtacagtaatatcaaaccggctcaaaggggagtggggaaccactcccttgttttgtccggagcaacaaaccgctgccggacagttgttttagaatggagtttcaatatgagaaaaggaaatattattgcaggtctgatctgcgcggcagtcgctgtctatgtgatcgttacctgtctcggatatccgagagcagaagtttacggcacaggtgttccgggcccgggactctggccggggatcatcgcggcgcttcttctgatctgttccgttggtctgatcgttgtgacactgatgatgaaaaaagaccagttcccggagcttccgatgtggacaccgggtacaaaacgtgtatacatttccatggcgatcctgcttgtatacatgctggtattatccacacttggatttatcattccgtccgttatcatgttattcggctttatccagtggttccataagggagcgatctggaaaaatgcactgatctccgtgatcgtgatcctggcaatctactttgttttcaagagcttcctgaatgtgccgatcgacttcggtatgttcagcatttaaagaaaggggtagcagaatgagtttctttttagaagtatttcagagcgcgttcagccccatggtactgttctacatgatcgcaggcgtagcagccggaatctgtatcggagcactgccgggacttactgcaacgatgggtgtagcccttcttctgccgcttacattcggtatggatgccacagcaggtatcctgatgttacttggaatttacgtgggagcaatctacggcggatctatttccgcgatccttttacatacacctggtacaccggcctccgctgcaaccgctattgatggatatcagttttccaaacgcggtgaggcaggacgtgcactcggtatcgcaacactttccagttatgtgggcggtgttgtcagcgttctctgcttatggctcatcagtccgcagcttgcaaaacttgcattaaagttcagctccgctgagttcttcttacttgcggtattcggactctgtatcattgccaacatctccggcgagaatatggcaaaaggtctgatctgcggatttttaggaatcttaacagctactgtcggtatcgacagcgtaacaagctacatccgtttcacagataacgctaaccttctctccggtatccagtacatcccggttatgatcggactcttcgcaatgagccaggcgttcgagacgatcgaggatatctacagcacggatgagattgatgcgagtgtaacgagacttcttccgacaaaggacgatgtaaagacgatccttcgtgttgctccggtaacaggtctgatcggaaccatgatcggtatcatccctggtgcaggtgctgatatcggatccttcgttggatacaacacagcccgcggaatgtccaaacatccggagttattcggtaaaggaagcccggaggccgttgctgcttccgagggcggaaacaacggtgttaccggcggtgcaatgatcccgatgctgacactcggtgttcctggtgatgccgtagcagcgatcatgatcggagcactgacgatccagggcctgactccgggaccgatgctcttcaagacaaacaaggttcttgtatacacgatcttccttggaatgttcgttgccaacacgatcatggtactccttggattctcctgcatccgccttttcacaaaggtattgagcgttccgaagacgatcttaactccgatcatcttcatcctctgcgtagtcggaagttatgcgatgagaagcaacttctacgatgtaggaacgatgctgatcgcaggtgtcatcggctggctcatgggtaaagtaaaaatcccgacaagcccggcgatcctcggcctgatcttagggccgatggctgagaagaatttccgtactgcactgttaaagtccagtggtaacccggtcgtattctttaacaccccgatctgttggttcttcctggccctgatcgcgttcaccctgtttggcgcgatccgcggacagttaaagaagaaaacaaattaaaaactgtggatttttaagccgcatctgctttctggttctaagctggaaaacagatgcggctttttgattattgtataattgttttcagaaaacatgcgagttcgtgaatatatggtggaataaaatcacattgccgaaacacgagggagatgggggctgagatcggcggatttccgatcaggtaataattgagatccggggagatatcatgagataggtaccttcgcattgtaaaactgcagcccatgtggtgctgggtcatttggtgagcagtttccaggctgccttctgacagaaggttagaaggcgttaagttccagcggcgaaatgctttttgttccagataatagatagtctcagaggggaactgcgtgatgaatgggatatcttgaaaatcagagagctcaacatactgataaggagaaatttcgcatttgtaaactggaaaacgccaatttgtattcttaggaacgacaaggagaagataatctttcgttacagttaaagattgaaaaatatctttattcagatgaggagaaactttactcataaaaacgatatccaactgatcattttccagcttttttgtgagatcctcaagaacactcttagaaaaacgcagagaaacgccagggtacattttcgaaaaatggtccatgatcggcgggatcaggaaaggagcctggatccagggaagaccgatgcgtaaagtacagttttcagagtggaggagagaatccagttgaatatggaaatgctcctcaagatctaagatcttttttgccgtgcttaaatagagttccccggcttttgtgggcaccatgcgccggccatttctagtaaataaaggtgcttccagttctacttcaagatttgacagaaagatactgagagcaggctgggtcatggacaatttttttgccgcagcagagagtgagccggattctgcaatcgttgtaacatagaccagttcttttgaatacatatcagattccccctttaattgcttttagtatagcatataaaaaacacatgcgacaaataaaatataaagaaaatttatagatgtacacaaagtataaaaatgtgaaagttgtttgtgaaactcatgtgatttatgataattgtatcacaaatgcataggaggaacgcatatgaagaacgaacaaaagaaacgggaacttccaaatacgatcgtaatcatattactgatcattttagcagcctgtattatgacctggatcataccggctggagagtatgtgagggtaaaaaacgaggcgggaacttctgtaattgatccgaatcagttttcttttgtggcgcgtacgccggtgaatcccctgacgataccgaaccacattgccaaaggttttaaggatggtgtggctctgtttctgtgtattgtattttctggcggagcatttcgctttgtgaatgtcagtggggcgctgcagtcggcaattgcaaaggtcgtaaagaaatattccaatacgatatgggtcctgattccgttacttaccagtattttcacattgatttgcacagtgaagggagtaaacacatttataccgtttgccccaattcttgtggtgatcgcccaggcgatgggacttgatgcaatcgtcggtgtcggaatcattcttctcggcggcgcagtaggcttcagtaccggaccattaaatggatcaacaacaaccgtggcgcaggaactggcaggacttccattgtactcaggaatcggctaccggatggtatgccttgtggtatttgcggttgtgacgaatatctaccttgttcggtatgcgatgaagatcaagaaaaatccggaattgagcccaatgtacggatatactgcaggcactcagaaatctgaagaaaagtccctagatgattttggacctatgacaaagacaaaaagccttattttgattattatggcggcctgcctgttagttatggtcggtggttccctaacttttggatggggaatgatggatatggcggctatttatatctggatggcagtgctcatggcgatcacacttagaatgtctccgaatcaggcagtaaacgagtttattgcgggaatgaagacaatgctcatggcggccagtattgtgtgtgttgcgaaagctgtctcctcgattctcacagcgggaacgatcattgatacgattatttacggactgagctttattctgaaagcagttccgacgatccttcagggaccggcgatgtacatgatcaatatcgttgtaaatatttttattacatctggaagcggacaggccgcagtagtaattccgatcgttgcaccgctcgcggatatgatcggaattacaagacagactgctgtactggcattcaacttcggggatggtttctgcaactatattcttccgacatcatcagcactgatgggaattttaagtatgggaaatgtaccatatgatcggtggatgaaatttatgtggaaattattcctgatctggatggtggtgggatctgttctgatgatcattgcacagatgatccattttggaccgatgtaagagaggaaaaagaatgaaggaacaattatttgcatatctggatacacgaagccaggaaatgaatgagatggcagatgcgatctttacgcatccagagacggctcacaatgaatattttgccagcagtttgctgtgtgatttcctgacaaaagagggatttcaggtggagcgggggctcggacggcaggaaacagcatttcgggcggaacagacgcttggaaatggcaatgggccgtcgattggacttctgtgcgagtatgatgcgctagagggactgggacatgcctgcggacatcatatgcagggcccaggaatctgcggaacagccgtggctctgaaaaaaattctggataataagtgcaatggaaaaatcattgtatatggaacaccggcggaagagagcggcggaggaaagatcatcttactggaggacggttatctgaaggatatcgatgtggctttaatgctccatggttctccgacaacatgtgtggatgtcaaatcgatggcagcggcatccatgacagtgacattccacggaaaatcagcacatgctgctttgaaaccggaggcaggaagaagcgcgtttgatgcattgcttttatcattcaatggattggaattcctacgggaacatgttcgggaagattcgagaatccattataccatgcaggaacttccgggaccggccaacattgttccggcgaaggctgtaggagcgttcagtgtccgctcttacaattctgtatatcttcatgatgaactcctgcctcgcttctgtgacgtgatgaggggagctgcaatcatgacggggacgagttatgagataaagacggaacgaatccttgagggaaaagttccggcatacagtctgaatgagatcgtgatggaaaatgcaaggctggttggtgccccgcggataagagcccccagggaaaaaacaggatcttcagattttggaaatgttatgtatgaagtcccgggctgttgtatccgaatagcgtttgtgccggagggaacttcgtcccactcgcagatgtttcttgacatgggattgacggaagaggcacatcaggcaatcttatatgctgccaaaatcctggccggaacggcgtgggatcttttgagtgacaatgagcacatggaaacggtgaaaaatgaatttcgtgaaaataaagcacggttaaaaaacatgtaacctacagaacctgccactggcagcatctttcggatgcatggcaacataaaaagacacggactggcagtttgttggtccgtgtctttttatgacagcagcaatgtggaggaataggagacaaaaatggaaaagaatatgagcgttacgattgcaggagacgtgctgtgcgatattgtaagtggttttctgcagggaatcagggttcactgctatatcgacggaatcgacgcagcgcctggaggagcgacaggtttgtcgatcctgctgaatcgaataaccggtctgccaatcggaatgttgacgatctggatcaatcttccactgatggcggcatcctggattctgttaggacgatcaagaacagtaaaacagtcaagacagttttgatctgcaatgcgatcatagatctggcagtgacaccatatttgccggtatatacagggaaccggtttatggcatgcattattggaggtgtcttggttgggatagggatggcaatcgtttttatgagtggatctacaacgggaggaagtgacataggagcaaagctgatacaaaaatattttcctcatatccagacagggacggcgctgatggtacttgatcttattattatcgggacatcgattctaatgttcagaaatgtagagtcggggttatatgggatgatctccatggtggttacaagctatgtgatcgatatgacgttatacggcttgaaccggagtacgatgatgacggtcgtcactccattttctgataaaatcgcagatgtactcatggaatatctggatcgtggctgcactttgttggaatgtaggggagcatattcaaagaaggcgagcggcgttaccctgtgtgttgtggacagaaaacagatgtataaagcgaaaaaactgatctatcagatcgatccgaaagcgttcttgatcgtcagtgaggcacgggaagtatatgggaaggtttttggcatctgatcaggaatgactatgcatacatgaagagcggcagtcataaaatttaacaaggcatgatacggcggagcatagcatgagagggcagaaaaacgatgatgttacccggacggactctgccgggatgtttgcggatgcgatgaagggggagacgcttttgacactcatcgggacgcgggcggtacatattgaaaattacaggagtattcttgtatacacggatacggagatccggatccagtgcaggcattatattctctttgtttcgggaaagaagttaaagatctgctattatgataaggatgagatgaaaatatccggccgcctggaggtgatccggtttgaatagattaaaagatatgcgggagggaagcgtgaaagtccggatcgaggggagagggatggagcgcttttttaatattgcggcccagagagggatcacgattacagagatagagacaaaggaaacaaagaaagcgcgaaaagcaggttcggtcgggaaaaaagaagacagagtagagaaaatccatgcggcagaatacagccatcgacagtatacacaaaaagatgagtgtattgagagaaatgaatatgaaaaagataatgcggaaatggaaaaaacggtatatttttggacgtctccgcgcaacttcaaacgcttgaagccgatcgcccggaaaacggatgtccgtcttcgaatcacagaaaaacatggttttccattctggcttctcctgggacgccgcagaattctctgggtcggcggactggcagcgttctttcttttgctctatagttcgtccttccatgtgtgggacatctccttcgacggaaatcgccgctttacggacgagacgctgctgcattttatgaatgaggtcccggtgcggtgcggaatgagaaaaagtcaaattttctgcgcggacctggaaaaccggatccggaacgcgttcccggagatcagctgggtgtccgcggagctgaccggcacgagactcacgatccatttgcgggagaacgacgggatcttaaaggcggagacggaaccggaaacgccctgtgagctcacagccgggacagacggcaccgtgacaaggatcatcgtccggaacggaaaagccagagtgaaggtcggagacacggtgaaagccggggatgttctggtatcgggggaactcccgctctacgatgactcggagacacttgtgaagacaaataaggtccatgcggacgctgaagtttacgccaggactgtcaaaacagtcacatggaagatcccggatacggaagagatccgtgcaaggacaggaaagaggcgccgaggtatcttttttaaacttctggacctggaattctgctttctgatgccggatctcaaaaaagaaagcacatgggaactgtttatggaagaattccagctgaaactttcgaaaaatttttaccttccggtctacgtcgggatcctcaccgccagggaatatgtcccctatgaaaaagtcctcacaaaaacggaagtatcagacgctgcggaccgttatttgaacgaatatatgcaaaatcttacggaaaaaggtatacaaatccttggtagtgatgttaaaatagagagaagtggatctcactggaagatccatggaacactgacggtggtggaggacatcacgaaaagctcccccatcccggaagatcaggaggagattcagacattagatgagcatcattgagacaatcatagacattccggcagaacatgaacggaaagtctgcggacagtttgacagttatctgaaaaaaattgagcggacacttcacgtatccatggtggcgcgtgacggagagatcaaggtcatcggaccggatcacgcagtaaagcgcgcaaagagcgtgttttcgacactgctggagctctcgaagcgcggcgaggagatcggggaacagaatgtggactacgctctggcgctctcctttgacgataaggatacggaaatgctttccctggaccgcgatatcatctgccataccataaacggaaaaccggtaaaaccgaagacattgggacagaaacagtatatcgacctgattaggaaaaagatgatcgtgttcggcgtcggccctgcgggaaccggaaagacatacctcggcatgtccatggcgatccaggccttcaaaaacggggaggttggcaggatcatcctgacgcgcccggcgatcgaggcgggagagaagcttggctttcttccgggcgacctgcagagtaagatcgacccgtatctgcgcccgctctacgacgctctttaccagatcatgggtgcggacagctacctccacaattcggagaaaggcctgatcgaagtggcgcctctcgcgtacatgcgcggacgaaccctggacaacgcgttcatcatcctggatgaggcccagaacacgacccaggcccagatgaagatgttcctgacgagaatcggtttcggttccaaggtcatcatcaccggcgaccagtcccagaaagacctgcctgccggtcaggtgtcggggcttgatgtggcgcttaaagtattaaagaatatcgacgatatcgggatctgccgtttctcaaacgaggacgtggtcagacatccgcttgttcagaagatcgtaaaagcatatgatgaatatgaaggccgtgagaaaccggagagaagatctcgcggggaacatcagaaggacggccgggaaggacgggaacagagatgacagtgacagtggagtacgaagcggaagaaaagctggatctcccgtacgaggagatcataaaaaatgtgatcgaggaatccctggattacgtggaatgcccgtatgacgcggaggtgaatgtcctcctgacggacaacgccgggatccaccagatcaatcttgacatgcgcgggatcgacaacccgaccgatgtgctgtcgttcccgatgtgtgattttgagacgccgggggacttttcccacctcgaggacacaccggaggaatattttgacccggatacaggggaattactcatgggggatatcgtaatttccgttgacaaggtaaaggagcaggctgagaagtacggtcactcccagacgagggagctggcattcttagtcgcgcacagtatgcttcatctgtccggctacgaccatatggaggacgaagagcggatccagatggaggatatgcagagagaaattctggaacggaggggttacaggagatgagaaaacggggcagagcatttattatcagtattgggatcatgatggcggcagcagcgctttccggctgtggaaagaaggcggaggaagcggctgtgacaacggaggcgtcggtggagacgccggaagagacgaagacgatcgtccttgagacagaaccgacgacggaggcggaaacggaaccgcagggtccggaggagcgcaaagaagtcgacggaaagatccagagttacctgaccggtgagatggtggatgtggcgaaagccaacagacgcccggtcgcggtcatgatgagcaatgataaggcatctctgccccagtacgggatcaaccgggcggatgtagtctacgaggcgccggtggaaggcgatatgaaccggtttatgtcgatctttgaggactacgacgatcttgagaggatcggctccgtcagaagctgccgtacttactatacatacttcgcaagagagtatgacgcgatctatgcccactatgggcagagtaccttcgcggttccgtaccttaaaaatgtggacaatatcaacggaattgacagtacaggcggaaacgcatattaccgcacgaaggacaaaaaggcaccgcacaacgcgtatacgagcggggcaaagttaaacaagacgatcggccagctcggttaccggacctcctacagcgatacctacacaggacatttccagttcgcgggagggacaggcacttatgttccggcggaatccgacgcgaaggatgcgtataagatgtatccgtcctatacgatgaacaatccctggtttgagtacaatgagagtgatggaaaatattaccgcttccagtacggcggaaaacacaacggcgacagcggacagatcgctgtcagaaatgtcatcttccagtacgtggagtggggacattatgccagcaccgattacctcaacatcaacgtccacaaaggcggagcgggttatgtctttacaggcggaaagtgcgttccggtctcctggaaaaaggatggggacttcggaccgacccgctattatgactctgaaggaaaggaagttatgcttaacaaaggaaagacctggatctgcattgtaggagcagacaggttcgataaagctgaaatttatggaaagtaacagacagaaaaagaagaaggaatccaatttcgtcgtccagggaagtatcctggcggtggcgtccatcgtggtgaggatcatcggtatcgcgtaccgcatcccgatgatcaacatcatcggtgatgagggaatggggtattacggaactgcgtttaatgtatacaatattgcgctgctcctgtcctcctacagcctgccgctcgccgtgtcgaagatggtttccgcgagacttgcaggaaaacaataccggaacgccgcgaggatcctgcgcgcggcactctgctatgcaacgatcgttggtgcatttgcggccgcagtgatctggttcggcgctgatttctttgcgagagacgtattctttatgccttatgcggcatttgcattaaagacattagcaccgacggtctggatcatggcgtatctcggtgtgttccgcggatatttccagggacagggaaccatggtgccaacggccttttcccaggtctttgaacagatcgtaaatgccatcatcagcgtggctgcaggaagctttctctttaacgaggcgttaaagacagaagtattaaagaaccagacaggaaccggctattccaacgcctggggagctgccggaggaacgatcggtacaggtgcgggcgccttcacggcgttgatctttctgcttttcctctttgcgatcagcagaaacgtccgcagacgtcagatccgcagggatcagacggaatttgtggagagctataaggagatcacgagagtcctgttcttcacggtcgttccggttatcctgagttccgcgatctacaacttaaacagcgtgctggataacgggatcctcgcatacaactttaagactctcggacagggagatgaatttgcctccatctggggagtgtatacaggaaaataccatttgctgatcaatgtgccgatggcgatttccaatgccctttcgtcctccctgatcccgtccgtatccagggcagtggcgatgggagacaaaaagcttgtgagagagcgcgtggcatctgcgatccgtttctcctgctttgtggcgatcccgtccactgtgggccttacggtacttgcgggaccggtaaataacctgctgttctccggagataataccctggcgatccggatgacgatctacggttctcttgcggtcgtattttactccgtctctacggtgacgaacgcgatccttcagggaatcgacaaaatgcgtcttccgatctttcacgcggtgatctcccttgtcctccatctgatcgcacttgagatcatggcgctgggattccatatgggaatctacagcatggtatttgcgaatatcctgttcgcggtgttcatgtgcctgatgaatgcgagatccatccggaatcttctcggttaccggcaggagatgaaaaagaccgttgtgatcccggtgatcgcttctgcagtgatgggactcttcacgtttggctcctatcagcttgtgcatctcgcggtaaagagcaatgcgctttctacgatgtttgcgatgatggtcgcagtgatcgtttacggtgtgctcctgatcaagcttggcgccctgtctgcggcggaacttaagaccatgccgggcggaacgaaacttctcagggtgttcagaaagcttcatttaatgtaaaatttttatttaacgggaagttccatcggaatttcctgttaaataaaaatatatgtttaaaaaagaaaaagaaagcagatactttcataaaaggaggaatattcctatgaaaaagtatgtatcctgctttcttttctttttctttctgacatccgccagcctgatcacgctgttccttatgactgcgggggaggaagctcggggaacagaggaggtacagatgcagcagtctgtggaagagccggtcttcgcgaaggagacggaggagatccatgtggtcttaaaccaggaacaggtggaacatgagacgatggcggaggacgaagaacgatattttcttgttgccgaggaaggatatctgattgtatacgataagggaaaggagaccacggatctctttacccacatgccgctcgcagaatttccggaggaagaacaggaacggctgatgaccgggatctggtttccgacaatggcagaaatattcagttatctggaatcttacagcagttgatacttgaaattttgcgttcaggtcgatatactaatataaattgtaaccgttcggcgggatgatccccggatgatctgtgatcgggtcccatgcgcggatcatcgcacagataaacggttgccgtaaatcaggtacaggggagagatagaatggcagagagtttcagaggacggaaagggatcatcatcggcggcggtgcatcaggacttatggccgcgatcactgcggcaaaacagggtgcggctgtgacggtcctggagcacacggcccgaccgggaaaaaagatcctgtcaacgggaaacggcaagtgcaacctgacaaacctctatatggatccgtcctgctacaggagtgatcagagcggatttgaaacggctgccatccggaattttccaccgtccgccgcgacagcgttcttccgggaacttggtgtcctgacgatggaccgcggcggctatgtatatccgatgtccggccaggcgcagacggtcctcgatgcactgctccggggagcggaccgtgcgggagtccggatcattacggaatgtgaagtccggaatgcgaaaagacagaaagaccgtttttcggtcgggacagaccgtgggatctatacaggtgatttcctgatcttagcgtgcggttccatggcggcgaagggaacaggatccgatggaagcggctatgagctcgcgagacagtttggacaccggatcatcaagccgctcccggcgcttgtccagctgaaatgcgaaggaaatcttctcccgaaagcctccggagtccggacggactgccttgtggagatccggaccggggacggaaagacagcggcaaaagaccggggagaactccagatcacggactacgggatctcgggcatcccggtattccaggtgagcaggtatgcggcgaagcttttggatcggaagaagaaggtgtctgcagtcctgaactttctgccggatctggatgaagaagaagtccgggatcttttgaaggagcagagatcctgcctttcgggggaaactgccgagacatttttaaacggtatttttaataagaaactcgcgtcggtgctcttaaaagcggcaaagatccggcccgaaagacaggcgggactcttgacgaaagaggagctggacagtctggtttctgtgatccgggagtttgtgatcccggtgaaggagacaaatccttttgaacaggcccagatctgtgcaggcggtgtcgatacaacagagatagaagcggaaactatgcagtcaaaacgcgttcccggactttacatggtcggggagcttctggatgtcgatgggatctgcggcggatacaacctgcagtgggcatggtcatccggatatgcagccggatcgcatgcagccgcaggggtcgtcccgggatacagaaaaactgtccggggacaggaaaaacaggtgaaattctccggatcggaaggaaacagagcccggggaagacaggaaaggaaaaaacatacatatgatccggatcaatcagctcacacttcccgtggatcacgcggaagaggcgataaagaaaaaggcggcaaagctcttaaaaatcgatgaatcggcgatcggggagatccggatcgtccaccgctccatcgacgcgagaaagaagccgaatctgctgttcagttatattgtggatgtgacacttgcaggcggaaaaaaagaggcagcagtcatcaaaaaggcggcaaaccagaatgtccgtgcggaagattcacgcccgtatgtctacccggaacatggaacgcaggagatgagaaagcgcccggtgatcatcggggcaggtcctgccgggatgttcgcggcgctggcactcgccgaaaacggctatgccccgatcctttttgaacagggagatgccgttgaggagagaacgaaaaaagtggaggatttctggaaaaacggggatccggcgctcgatatccgctcgaacgtccagttcggtgagggcggagccggaacattctccgacggaaagttaaatacacttgtaaaagatacttcgggaaggaacggaaaagtcctctccacctttgtggagatgggggcggatccgtcgatcctttatgaccatgcacctcacatcgggaccgatgtgctgagagatgtggtcagaaatttgagaaacaggatcatcgccggaggcggggaggtccatttccgctcggaagtcacggagatcctggaggaaaaaggcagagtttccggagtaaagctcgcggatgggacggtggtcgagacagagaaggtcattctctctgtgggacacagtgccagagatctttttgagaaacttgacagaatgaaggtctttatggagccgaagccgtttgcggtgggactcaggatccagcatccacaggcgcagatcaaccggaaccagtacgggctggaggacgccggaaaactcggcgccgcgccgtataaagtgaccgcgaagacaaccagcggccgcggcgtctactcgttctgcatgtgtccgggaggaatggtggtgaatgcctcatcggaaaaagggcgactggcggtcaacggaatgagcaattttaagcgggacagcggcatcgcaaacagtgccctgatcgtggcggtcactccggccgatttcccgacagccggtcctttgggcggcatcgcattccagagaactctggaagagcgtgcattcgcgcttggcggaggaaagatccccgtccagctttacggcgatttcgccgcaaaccgaccgacggtggccctgggagatgtgaaacctgtgttctgcgggggatattccttcgcgaacctgcgggaactgatgccagaggccttaaacggagcgtttcttgaagggatggagcagttcggaagacggatcagaggattcgaccgggcggacgctgtccttgcaggaatcgagagccgtacgtcatcaccgctcaggatctgccgcgatgagagccttcagagcagtttaaaggggctttatccatgcggcgagggagccgggtacgccggagggatcacatcggcggccatggacggcctgaaggttgcggaagagatcatcaagcggtatgcagcggtaggttaaactgtaaaagccggcagtgcaccggagaaaaaggcggcactgcctgattccgttggaaaggggactttcatatgacagagagagaattattaaaagataaaaagaggatcgtgatcaagatcggatcttcctcattgacacatgcggagactggagacctgaaccttgcaaagatcgagaaactggtccgcgtcatcagcgatatgagaggaatgggaaaagaagtgatccttgtctcctccggtgcgatcgcgacggggcgccagacgctcggcggaaagaagccggagacggttgccgagaaacaggcttacgcggcggtcggtcaggcacgcctcatgatggtatatcagaaactcttttccgagtacaaccagacggcggcacagatcctgatcacaaaggcgacgatcctggacgatacttcccgcgcaaacgcgaaaaatacgttcaatgaacttctaaaactcggaacggtaccgatcgtaaacgagaacgataccgtatctacatatgagatcaaattcggtgataatgaccgcctttccgccatcgttgcggctcttgtcgagggagatctgttattccttctctccgacatcgacgggctctacacggatgacccgaagaaaaatccggatgcaaaatttatcagccaggtggatgacctgactgatgagtttatggcgatgggcaaagggaccaccggaagcgacgtcggaaccggaggaatggcgacaaaactccacgcggcaaagatcgcgacagagagcggtgccgacatggtgatcgcgaacgcagacgatgtggaagtcatgtggcgcatcttaaagggtgaggagatcggaacactctttaaagcaaataagagcagcgaatttgcgctgctggattatatccagagtattcacgcgtaaaaaaggtatcccggcatattcgggtgccttgcgcagtcgcttgcgtcgatcatcatcttcgcgtgagtgtgcatcagatggcaggaagctgcattccggaagcggggaaaccgcagatcccggaaacaaacagagaggacagaaaattacatgaaacaggaacagatcgacagaatcaatgaactttaccataaatcccagtccgtaggacttacagatgaggagaaagaggagcaggcggcgctcagaaagcagtatgtcgctgacatcaaggcaagtctcagaggccatctgaacaacatttcgatcgttgagaaggacggctccgtgacagacctcggaaagaaatacggaaatgtgggaaacacagaaagctgagctcagaaaagacatacggagccgtctgaaatcgatgccggaagaagaaaagaggatccttgacagggagatcgcggaacgcgtcctgggtcttccggagattgcagaaacgaaagccgtgtatggatatgcgtccctgagctgggaggcgggaaccggggagattctggaggaactccgggcacaaaaatacatcatctgtcttccgaaagttaccggggagacgatagagttttttgtgacggagtcggagcaggatctctcggaaggttcatttcatatcatggaaccaaagaacggatgccgaaaagcggatgagaccagatcagaaatcctccggacggcgccgatcctggtcccgggaatgggatttgtggaaaccggtgcccgtctgggaaaaggcggcggattctatgaccggtatctggaacagcatgccggtcatatgacgatcgcgctggcctatgagttccagatcctcggggagatcccggtgggaccgtatgataagaatgtagatttgatcgtgacagaaaagcgtgtgatccggtgcaaagaccgggatgtcggaacacggatcagggaggaacagccatgttaacagaaatcggacagaaagcaaaggaaacttcctatgttctcggaaaaatggggacaaatttaaagaatgcaggacttctggcagctgctcaggagatcctggatgaggagaacgagatcttaaaggcaaatgcggcggacgttgagagagcgaaggagagaggaatggctcagggacttgtggatcgcctggaactgaaccataaacgcatcgaaggcatcgtggaaggcatgcgccaggttgtcggactggacgatccggtgggtgaggtcatctccatgaaaaaacgcccgaacggactgctgatcggacagaaacgtgtcccgttaggcgtcatcgggatcatctatgaggcgagaccgaatgtgacggcggatgcgttcgctctctgctttaaagcaggaaatgctgtgatcctccgcggcgggagcgatgcactggaatccaacaaggcgatcgtcgcagcgatccggaatgggctgaagaaggaaaatatcccggaggatgcgatcgccctgatcgaagatacgagccatgagacggcgcgcgagttcatgcggatgaacggatatctcgatgtcctgatcccgcgaggcggggccggactgatccgcacggtcgtggagaacagcacagtgccggtgatcgagaccggaaccggaaactgccatatctatgtggatgagagtgcagatctcgatatggcgctcgacatcatcttcaacgcgaagacccagaggatcggcgtctgcaatgcctgcgaatccacactggtgcaccggaagatcgcaaaggaattcctgccgctcatgaaaaagcgtctggatgagaagaacgtggagatccgcgcagatgaggacgcctgctcgatcgtaccggaatttacggcggcgacggaggaagactgggggaaagagtacctggactatatcctttcctgcaagatcgtggattccgtggacgaggcgatcgcccacatcaaccactacaataccggtcactccgaggcgatcatcacgaaggattacgagaatgcccagaaattcctgaatgaggtggatgcggcagctgtctacgtcaatgcgtccacaagattcaccgacggcttcgaattcggattcggagctgagatcgggatcagtacccagaaactccacgcgagaggtccgatgggacttcctgcgctgacgtccacgaagtacatcatctacggagacgggcagatccggaagtaaggtgaaacaacaaggttgcattttcggagaatcttggttataatcattcaggattgaatttagaaatttggagaaacataagaatgacagataaaaatatcatcgcaggggctccgacggaggaaccggcgagacagcagtactttatggaacaggtgaaaaagcttgtggaggcggagagcgcgaaaaaaggacgcccgctcacctgttttatcaatacattcgggtgccagatgaatgccagagactccgaaaagctccttgggatcttaaaagaagcgggatatgtggagggagccgatgagaactcggatttcgttctttacaatacatgtaccgtgcgtgagaacgcgaacttaaaggtgtatggccgtcttggatatctgagcggcgtgaagagaaaaaatccggatatgatgatcgcgctctgcggctgcatgatgcaggagccggaggttgtcgcaaagatcaaaaagagttaccgccatgttgacctgatcttcggaacccacaacattttcaaacttgcggagctgctctacgagcgcttcatggaaaagaagatggtggtggatgtctgggaaggaaccaatgagatcgtggaggaactcccggtcgagagaaaatatccgttcaagtccggcgtcaatatcatgttcggctgcaataacttctgcagttactgcatcgtgccgtatgtgcgcggacgcgagaggagcagagagccggaggacattatcaaagagatcgaagagcttgtggctgacggtgttgtggaagtgatgcttctcggacagaacgtcaactcctacggaaagaatctggaacgtccgatcacctttgcggagctcttaagaagagtcgagaagatcgaaggactggagcgcatccgcttcatgacttcccacccgaaggatctctccgacgagctgatcgagacgatgcgggattcgaagaagatctgcagccatttacatctgccgctccagtccggcagcagtgagatcttaaagcgcatgaaccggaaatattcgaaggaacagtacctcgcactggtggagaaactgcgcgcggcgatcccggatatctccctgactacggatatcatcgtgggattcccgggggagactgaggaagacttcgaggagacgatggacgtggtgcgcaaggtccgctacgacagcgccttcaccttcatctactccaagcgcaccggaactccggcggcggccatgccgaaccaggttccggaggatgtcgtaaagaaccgttttgaccgcctgttaaaggaagtccaggacattgcggcagaggtcgtaaagcgccatgagggaacggtacaaaaagtccttgtggaggagattgatacccacgaggccggctttgtgacaggaagactttccaacaacacagtcgtacatttcgccggggacgcgtccctgatcggaaagatcgtggatgtctctttagacgaggcaaagggattctactatatgggttcccttgttaaataataaggatgaaaaacatgtgacgcccggagccgagtgcttcgggcgctgtgggcatgttatggaataggagaaaagacgtgggacagatttcaccaatgatgacacattatctcgagacaaaaaagcagtatccggactgtatccttttttaccggctgggtgatttctacgagatgttttttgaggatgcgaagacggtttcgagagagctggagctgacactgacgggaaaggactgcggtctggaagaacgggctccgatgtgcggagtcccgttccatgcggtggaaggctatctcacaagactcgtccagaaaggttataaggttgcgatcgcggagcagatggaggatccgaagctcgcgaaaggtcttgtaaagcgcgaagttatccgcgttgtgacgccgggaacgatcacgagctcccaggctctggacgagacaaagaacaactacctgatggcagttgtgtataccggaaacaattacgggattgcgacggttgacatcacgaccggcgatttttttgtcacggaggtgacgagcgagcgggcgcttctcgatgagatcaacaagttcacgccgtcggagcttgtgtgcaatgaggcactcttcatgtccggacttgatatggatgagttaaaagagcggtatcattttgccgtgacggcactggagaaccggtttttctcggatgatgactgcaggaagatcttaaaagagcatttccatgtgatgagtctcgagggacttggactcggagattatgagaacggaatgatcgcatccggtgcggtccttcagtatctctatgagacgcagaagaatgacctgtcccatctgacgaagatcacaccgtacacaacggggcagttcatgatgatcgatacctccacaagacgaaatctggagcttgtggagactctgcgtgaaaaacagaagagaggctcccttctctgggtcctcgataagacaaagacggccatgggggcgagacttctccgctcctttatcgaacagccgctgatcgacaagacggagatcgagcgccggcagcaggcgatcgaagagctgaacatgaactatatctccagggaagagatccgggagtacctgaattccgtctatgacctggagcgcctgatggggcggatcagctataagacggcaaacccgagggaccttctttcctttaagaattccctggaaatgctgccgtatatcaaagatattctcggggagttttcctgtgagcttttaaagaaaatgaacgaggatctggatccgctgcgggatctctatgagctgatcgaccgctccatcgtcgatgagccgccgatctcgctccgtgagggaaacatcatcaaggacggatacagcgaggaagccgacaagtaccggaaggcaaagacggaaggaaaggcatggctggcggatcttgagaccgaggagaaggaaaagaccggcatcaagaacttaaagatcaaatacaacaaggtgttcggatactattttgaggtaacaaactctttcaaggacctggtcccggattattttatccgcaaacagactctgacaaatgcggagcgctacacgacagaccggttaaaagagctggaagacatcatcatgggcgcggaggaccgcctgtacactctggagtacgatctgttctgcgatgtgcgcgataagatcgctgcggaggtcctgcggatccagagcactgcgaaagcgatcgcgggcattgatgtctttacctccctgtccacagtgtctatgcggaataactacgtgaagccgaaaatcaatgaaaaaggactgatcaacatcaaaaacggccgccatccggtcgtcgagaagatgatcaaagacagcctgttcgtcgcgaacgacacatatctggataacggaaagaaccggatcgccgtcatcacgggaccgaacatggcgggcaaatccacttacatgagacagacggcgctgatcgtcctcatggcgcagatcggaagctttgttccggctgacgaggcgaacatcgggatctgtgacaggatcttcacgagagtcggcgcctccgatgacctggcatccggacagagtacctttatggtcgagatgacggaggttgcaaatattttaagaaatgccacgaagaatagtctcctcgtcctcgatgagattggccgcggcacgagtacctttgacggtctctcgatcgcctgggcagtcatcgaacacatcagcaacccgaagatcctcggcgcgaagacgctgtttgcgacccattatcatgagctcacggagcttgaggggaccatcagcggtgtcaacaactactgcatcgccgtcaaggagcagggggacgatatcgtattcctcagaaagatcgtaaagggcggggcagataagagctacggaatccaggtcgcgaaactcgcgggtgtaccggagccggtgatcgcccgcgcgaaggagcttgttgaggagctcgcgagcgccgacatcacagcccaggcaaaagagattgcccagatgagcgcgtccccgcagcataaggcggtggcgaagccggacgaggtggatctcaaccagatgtcgatctttgataccgtgaaggacgatgacattataaaagaactcggggatctggagctttccagcatgaccccgatcgatgcgttaaataccctgtaccggctgcagacgaagctgaaaaaccgctggcagtagcagggattgaaaaagaaagagagggagagagactatgccgattcaggttctggatcagagtacgatcaaccagatcgccgcgggcgaggtcgtggagcggccggcctccgtggtgaaggagttaatggaaaacgccatcgacgccggttccacggcgatcactgtggagatccgccagggcggcatcgggtttatcaggatcacggataacggctgcgggatcaaaaaggaagaactgccgttggcttttctgcgccactcgacaagcaagatccggacggcagaagatcttcttaccgtgtcttccctgggattccgcggtgaggcgctttccagtatcgcggcagtctcccaggtggaactgatcacaaaaacctccggaagtctcaccggatcgagataccggatcgaaggcggtgaggagaaaggtctcgaggagatcggcgcaccggaggggaccacgtttatctccagaaacctctttttcaatacgccggcaaggcggaaatttttaaagacggaggccacggagggcgctcatgtggcggatctcgtggaaaagatcgccctgtcccacccggagatctcgatccggctcatcgtgaacaaccagagccgtctccacacctcgggaaaccacaacctgaaggacatcatctacacggtctacgggcgggagatcgcggcaaaccttcttccgatcgaggtgtcgaccgggatcgtgaagatctcgggctttatcggaaagccggtgatcgcccggggaaaccggaattttgagaattattttatcaacgggcgctatatcaggagcggactcgtctccaaagcgatcgaggatgggtacaagagctatatgatgcagcataaatacccgttcacgctgctgcacctcacggtggagccggagtatatcgatgtgaacgttcatccttcgaagatggagcttcgattcaaagacggcgagaatatgtaccgagtgatctcgcaggcggttctcgacgcgctttccgggaaagagctgatcccgaatgtgagtcttatgtcggaaaaggaagagcgcgagcttgcaaaggaagaggctgccgtggcacggaatccggtgccggggagcggaatgaatccggtggcgaaaaacgcccatggaccggagccgtttgaacaccgccgcatggaagcgatgggcatccgcgaagaacgcccgacctacggggagaagaagcaggagagcaaatggatcctgcctccgaagccgctcacgagggaactgaaaccggagccggcggccggacaatcgaccggacagacggcagagcatatcatggcgggtcttcctggaatggatccggcagaaagaaaagtgggagcgcttcctccgggagccggaatttccggtgccgtgacaaagagtgctgactctgcggacagaaaagatagtcaggaagtacggtctgaacaggaccagccgggaatcacaccccgggcggaaaaaacaaaagacctccagccgacccagatggagatgttcgacaaccgtctcctctcggaatctgcgagaaagcgccaccgcctgatcgggcaggtctttgagacttactggctcgtggaatatgacggcagcctctatatcatcgatcagcatgctgcccacgagaaagtgctctttgagaagaattttgcgtcattaaagacgagagagtacacttcccagctcataagcccgccgatcatcctgacactttcccttcaggaggcggacctcttaaagcgccacatgaaggtgtttacggacatcgggttcgagatcgaaccgttcggcggaaatgagtacgcggtgcgcgcagtgccggacaacctgttctccctggcaaagaaagatctcctgatggaactcatcgatggcctttccgacgacagcatggggaagaatgtggagtccgtctacgaccggatcgccaccatgtcctgcaaagctgcggtaaagggaaacaacgagctgtccttcgcggaggcggatcagctcatcgatgaactgttaaaactggagaatccatataactgcccgcacgggagaccgacgatcgttgcgatcagcaaatatgagatggaaaagaaattcaagaggatcgtatgatgaaaaagcctttgatcataatcaccgggccgacagcgtccggaaagaccgccctctccgtggaactcgcgaaaaagatcggcggggagatcatcagcgccgactccatgcaggtgtaccgccacatggatatcggatccgcgaaggtgacgaaggaggagatggacggtgtccgccaccacctgatcgacgttttggacccgtgggacgaatttaacgttgtcgtattccagaaactcgcgaaagaggctatggaggagatctacgcggccgggcatatcccgatcatcgccggagggactggattttatatccaggcgctggtgaatgacatcgacttcacggaaaacgacggggatacgggataccgggaggagctggagcgcctggcggcagagaaaggagcttccgctctccacgacatgttaaaggaagtggatccggaatcagcggaggcgatccatgagaataatgtaaagcgtgtgatccgcgccctggagttttataaaaagaccgggacaaagatttcctcccacaacgaggcggagcgcaaaaaggaatcgccctacaattttgcctactatgtgctcaacatggaccgcggccgcctgtatgagaggatcgacctgcgggtggacctcatgatgaagaacgggctgctggcggaagtggaaaaactgaaagagatgggctgcacgagggagatggtatccatgcaggggctgggatacaaggagatcctggatgccctggaagggataatttccctggatgaggccgtctacatcatcaagcgcgacacgagacatttcgcgaagcgccagcttacctggtttaagagggaaaaagaagtgacctgggtggaccaggggaactttgattttgacagagaaaagatcctcgcgtggatgttaaaagatctgcaggacagaggaattgtgataaagtaaaaggagaagacatggaacttacaaagatgtacggagagcttggaatctctgagaaagttttaaattacggaagagagatcgaaaagagtctgcatgaccgctttgaggcgatcgataaaacagcggagtacaatcagctgaaggtcatcaaagccatgcaggaggcgagagtcagcgatattcattttgccggaacgaccggttacggttacaatgaccttggccgcgatacgctggaagaggtttatgcgaaggcattccacggggaggacgctcttgttcgcccgcagctgatctccggaacccacgcactcacgatcgccctttccggaaatctccgcccgggcgatgagatcctctccccggtcggaaagccgtatgatacgctggaggaagtcatcgggatccgtgattccgtcggctccttaaaggaattcggcatcacctacagccaggtagatcttcttccgaatggagatttcgacttcgagaacatcagaaaagcgatcaacgagcgcacaaagctcatcgagatccagcgctccaagggatatgcgacgagaccgaccttatccgtaaagcgcatcggcgaactgatctcctttatcaagtccatcaagccggatgtgatctgcatggtcgataactgctacggggagtttgtcgaggagctggagccgacggatgtaggagcggacatgatcgtcggttccctcatcaagaatccgggcggcggacttgccccgatcggcggctatatcgtcggacggaaggactgtgtggagagagcggcataccgtctgacagctccgggactcggaaaagaggtcggcgccagccttggcgtcagccagtctctctatcagggactgttcctctccccgaccgttgttgcgggagcactgaaaggtgcgatctttgctgcaaatgtgtatgagaagcttggattcggcgtcgttccgaacggaacggagagccgtcacgacatcatccaggcgatcaccttcggcacaccggaaggcgtgatcaaattctgtgagggcatccaggcggcagcgccggtggacagctttgtgactccggaaccgtgggcgatgccgggatacgattccgacgtcatcatggcagcaggcgccttcgttcagggatcctccatcgagctttccgccgatggtccgatcaagccgccgtatgcggtatacttccagggaggacttacctggtaccacgcaaaactcggtattttgatgtccctgcagaaattagtcgatgctggtatcgtgacattgtaaatgtgaactttttcttaactcattgtttttgcgccggaaatatgctaaacttctgtgcataaagtgccgggactgctatgcggtcccggcgatcgggaggaatcaacagtatgaaaagtaaaagttcctgggtcctgcttctccttctgctttccgggatcgttcttggaggctttatcggagagatgacagcgagagtgccgggactttcctggttaaatttcggggaatcgttcggactgaacgatccgctcgtcctaaacctcgggatccttgtgatcacgttcggactcagcatccggatcacgatggcgagcatcatcggcgtgatcgttgcgatcctgatctaccgtttcctgtaggaagatgtgttttccgggaaacttctgtcagccggggaatgtacggatgacaaaaaggggatatctgccgcaccgtgtacctggagagaccggaaaggcgggatgtcagtatggaaaagaaatgtggaaagacgatgaaggggctgccggtctcggagcgcccttatgagaaggtgctggagaaaggcccggcgtcgctttctgatgcggaactcctctccgtgatcctgcgatccgggacaaagaatatcccggtgcgggagatggcggaggagattctgaattccggaaatccaccggggctggcgggactcctccatggcgccgtggaggattataaagagatccgcggggtcggggaagtgaaagcgatccagctcgcgtgcgtcggagaactttcggcgaggatctggaaaacggcggcatcagaaaagacggtcgtttttgatgcgccgtcaaaggtggctgcattctatatggaggaaatgcgccatctggaacaggagaatctgaaacttctgcttttgaatacaaagaacattctgttaaaggatacaacagtctcgatcggaacggtgaatgcctcctgcgcgacgccgcgggagatctttatcgaggcgctgcggtccagggcctgcgggatcattctgcttcacaaccatccaagcggggatccgacgccgagcagggaggactgcttctttacagaacgtgtcatggaagcaggaaagctcatgggagtcccgcttctggaccatatcattatcggagataattcctatgtgagcctgagagaacggggaatttttgaaacatgaaaaacaatacgaaatattttctatttggactgtcgcttctctgtatctgtatgatcggtattacgacgatcaggggaagcatcttaaatccgctgcggaccgcggtgggatatgtgctggtgccgatccagtccggtgtgaacagggtcggcggcggactctacaatgaactgagcagcgtcggaaaactgaagacggctctggcagagaatgagaccttaaagacgagagtggatgagctgacggaggaaaatacgagactccgctcggaacagttcgagctggagcgcctcagaagtctctatgaactggatcaggaatatatgcagtaccataagatcggtgcccgtatcatcgcaaaagactcgagttcctggttttccgtattccggatcgacaaaggatccgatgacgggatcaaagaggatatgaacgtcatcgccggaggcggtcttgtcggtatcgtcacggatgtgggagcgaactatgcgacagtccgctcgatcatcgatgactccagccgtgtgagcgccatggcgcagcagtccggggattcctgtatcgtcgcgggagatcttcagctgtttaaagacggccggttaaagctttcctatatggaaaaggacgatgatatcaaggatggcgacatgatcgtcacttccaatatcagcggaaaattcctgccggggatcctcgtggggtatgcgacggacatcacggtggattacaacgacaacctgacgaaatcgggatacctgatccctgccgcgagattcgacagacttcaggaggtcctggtgatcacagacttaaaggatgcggggccggagatcaatgaatagcaatatgaagcggatcatcgcgagttttctgctggtgatcctggcatttatcgtgcagacctgtattttcccgctgctgccgttcctggcggtatatccgaatctcatggtgatccttgtcttttccttcgggtttatccggggaagtgcctgggggatgggatacggactgatcgcgggacttttgatggacctgtcgtccggaggtccgctcggatttcacacgctgatctttatctggatgggctatgtaaacggaatctgcacgaagtattattatgaggactatattacgctgccgctggtgctttcagcgctgaacgaagtgttttataatttctatctttatgtattcggcttcctggtgcggggaagattacatttcggctattatttcatcaacattatcctgccggagacgatcttcaccgtggtgacaacactgatcctgtaccggctgttcctctatatcagccgcagactggaagagatggaaaaaaggagagacacaacgattgtttaacgatttttctgaaatcctgaaagagtttatgaaaaagctgctgtcgtcaagacttgtgatcctggcggtggcatttgtggggctgtacgtgatccttggcatgcgcctgttcaatcttcagatcatggaaggagagcagtaccaggaaaactatatggcaaagacggaaaaaaagatcagtcttgccggtacccgcggaaatatttatgacagaaacgggaatcttcttgcatataataaactgtcgtacaatgtgacgcttcaggataacggagattacaaaagatccaacgacagaaaccggatgctcctggagcttgtccggatcttaaaccgtcacggcgagaacgtggaaggagatttttccgtgggttatgactcctccgggaatatgatcttcacgaccaccagcgaggcggcgagaaaacgctttttgagtgactattacggattaaaaaagacggatgaactggatgacgcggatggaaaatatccgtccgatgtgacggccagggaagtctttgacgccagggtaaaatattacggtctggaccagctgaaggatgacaatgacaacccgatcgaacttaccgatgaggaagctctcgggatcatcaatatccgctatacgatgggacttaccgcgtaccggaaatatgagtccaccacgatcgcctctgacgtcagcaaggagacgatgacggatgttctcgaaaactccgcgaacttaaaaggcgtcggcatcgaggaatcaacgatccgtgtatacaatgacagcgtttattttgcaccgctcatcggatacatcggaaaagtctgggatgatgagctcgaaaaactccgggagacgaatccggactatgagctgacggaccttgtcggaaagaccgggatcgaggcgtccatggagacggagcttcagggaaagaaaggttcccagacgatgtatgtggacagtatggggcggatccttgaggttgtcgagagaacggagccggaggccggacatgatatctatctgacactggaccgcgatctccagatcggtgtgtaccaccttctggagcagcagcttgccggtatcatcacggacaagctcgtgaaccgtgatcttgatgacaacgattacaagaaggcggcaaatatcccgatccctgtgaaggatgtctactaccagctgatcaacaacaatgtcctggaccttgcagcgttttccgcgccggaggcgtcccagacagagaaaaacatctatgcgaagtacagccagtcgagagaacagatcctcgcacagatccggagcgagctcacggatggatccgcgagaaagatggcagacctgccggaagacatgtctgcctacatgcagtatatctatacgctgctttccgaccgtgggatcatacagacagacaagatcgaccaggagtctgacacatacaacgcatggaagaacgattccatcagcctcagggattacctgtacgacgggatcgcggagagctggatcgacacgacaaagctgaagatcgagtccagatactctgatgcggacagtatttaccagacgatcgtggaatatgtgatggatgacctgcagaacgatgcggcgttcacgaagaagatcttccgctaccttgtcaataacggcaccgtgtccggaaaggaactctgcctcgccctctatgaccagaatatcctggcttacgacgagaatgaagtccggatgctggaggcgggcggagatgagtacgcattccagtttatcagaaacaagatctccgatatcgagatcacacctgcccagcttgccctggacccgtgttctgccagtgccgtgatcacggacgtcaacaccggtgaggtgcgggcactcgtgacctacccgagctacgacaacaacaagttctccggaaccgtggatgcggagtattacaacaagttaaataacgatcagtccctgccgctctttaacaatgccacacaggcacagaaggcgcctggatcgaccttcaagccgatcatcgcggtggcggctcttgaggaaggcgtgatcgggctgaatgatacggtgaactgtaccggtatctacaaggagatcacaccggcgctgcgctgctggatctatccgggacagcatggacctctcgatgtggtccacggcatccagaactcctgcaacgtgttcttctctgagatgggacaccgcctctccatggatgaaaacggaaactattcaccggaactcggtatcgagaagatccgaaagtatgcgtctatgttcggactcgatgagacatccggaatcgagattgctgagagagagccgcagatgacgacggagaaaccggaggcatcttcgatcggacagggtaaaaactcttactccaatatccagctttccagatatatcacggcagttgccaataagggaacggtattcaagctgagtctgctcgacaagatgacggattcccagggaaatctcttaaaagatttcacaccggaagtacgttcgaccatcgacgtcaaagattccacatggaacgctgtccacaccggaatgcgccgtgtaatctcggatggttctgcgagaaagatcttcagtgacctggaagtcgatatcgcaggtaagacgggtacggccgaggagatcaaaaatggacaccgcgtcaaccacgcgttcttcgtttcctttgctccatgccagaatccggagatcgcggtgacggtgaatatcccatacggatattcttcctccaacgcggcggcggcggcaaaaaatatctatcgctattactacggatatacagatctgaactacattttaaataacagtgcgttaaattcttcaaatgtagagatcggagactaagaattgcagcccggcaaaattgccgggctgtaaggcgttgacggaccggcggtctgccggcaggtgacacaaagggggatttcatgatgaaagatgctgtcgtaatcaagggaaataaagcgggaatgacggtttatctggagaaagatcttgattttgaggaagttctccaggcgatcgcaaaaaaattcaaggcgacggcaaaattctggggatcagcccagatgacgctgaccctggagggacgggacctgactccggaggaagagtaccgtgttgtgcagacgatcacggaaaattccgatatcgaggtcctgtgtcttctcgacacggacggaaaccggacgagaaaatgtgagaaagcactcaatgagagactaatggagctgtcttccctcacaggtcagttttataaagggaatctccgggacggggacgagctggaatcagaggccagcatcgtggtgatcggtgatgtggaaaaaggagcaaaagtcagcgcaaaagggaacatcatcattttaggagcgctccgtggggcggcccatgcggggatctgcggaaatgaggatgcggtgatcgttgcttttgagatggcaccgatatcggtccgtatcgcgggactttccctgaaaaaagcggagaaaggacgccatcttgggcgcggtccgatgatgatcctctctgagaacggaaaagttgtcgaagaaccgatcaaaaagagctttctgagtgcgctgaattttatataaaagaggtccgtatcagtttccttttataaagcttttataaaatctattttttactggaattttttgcttttttcatgtaaaatatattttgtggtaccaggggcaaagatcagaaaacgggtgcaggtctgcccgcaggaaaatttttgagcttttgccaatccggtatcaatctctgaaaacagaggagatgcgagtacattcataacttaatacaggaggatattcttatgagtgaagtcattgttgttacatccggaaaagggggtgttggcaagacgacgacctcagcgaatgtcggtacaggacttgccatgctcggggagaaagtgatcctgatcgatacagatatcggtctcaggaatctcgacgtggtgatgggactggagaaccgcatcgtctacaaccttgtggacgtcgtggaggggaattgccgtctgaagcaggcactgataaaggacaaaagatatccgaacctgtttttacttccgtccgcccagaccagggacaagtcctccgtgactcccggtcagatgcgaaagctggtggatgatctgagagaagagtgtgattatgtactgttagactgtcctgcggggatcgagcagggatttaaaaacgccattgccggagcggaccgtgcttttgtcgtcacgactcccgaggtatcggcgatccgtgacgcagaccggatcatcggcctgctggaggcggaagaaatctcaaagatggatctcatcgtgaaccggatccggatggatatggtccggcgcggagatatgatgtcgatggaggatgtaacggatatccttggaatcccgatcctcggtgcgatcccggatgatgaggagatcgtgatctccacgaaccagggggaacctctggtgggaatgaattcctttgccggacaggcttatcttaacatctgtaagcggatacttggtcaggaggtgccgcttatggggcttgagaaaaacaaaggattcttccatatgtttagcggcctcttaaagagggcataaatgaaaaagagactgttccatatcctgacagggagaaattccggaagtatcgcgaaaaaacggcttgaatttctgctgatcgcggaccgggccggatgtacgccggaaatcctggagatgttaaaaaacgacatgataaaagtcatatcaagatatatgatgatcgatccggaacaactggaggtcaaggtgatccacatggatcagagaaaggcgggagaaaagctcccggtcctgtatgccagtgttccggttcgggaactgctggttaaggggacattttaatacatgctttcagaatacaattttaaaaacttcaatttccgtctgttgttctacgccctagcgttaaatgtgatcgggcttcttgtgatcaacagtgcggtaaacggagacagaagctatatcaaccgccagttgatcggcctttttggcggactggtgatcatgatcttcctggctctgatggattaccacaaactgatgcgctgtaccggcgtgatctatcttgcctgtgtggcgatcctgctggcgatcattgtcgcaggacagtttggaggagccggaacgggtgcgagacgctggatcacacttcctgtgatcggacgcttccagccgtcggaatttgttaagatcggtctgatcattttcttctcctggtttctgcagcgaaatcaggagaagatcaacaatccccgcacattgatcatcgtcggggcttttgctgcggttccgctgcttctcattatgaaacagccggacctgtccacgagtatcgttatcgtgttcattattgtatgcctgatctttgtcgcaggactcagctataagtggatcatcggcgcggctgctgtcgggatcccagggctggcactcacggtatttcttgctgagcggggcgctgttccgttcctgacaggatatcaggtaaaccgaatcctcgccttcatcaatccgggaaaattcgcagacttgaatgtccagcaggataactcaaagatggcgatcggatcgggaatgctgtatggaaaaggtctgctcaacgagacggccatttccgtaaaaaacggaaatttcttatctgaggaacacaccgattttatttttgccgtgatcggtgaggagatggggtttgtgggctgcatgcttgtgctggtcctctaccttctcttcgtatttgaatgcctgcgaatggcagggagaacgagagatctgaccggaaagctcctctgtacggggatggctgctctcgttggattccaggcatttacaaacattgcggttgccaccgggattttcccgaataccggacttccgcttccatttatcagttatggtgtaagttctctggtaagtctttatatcggcatcggcgttcttttaaacgtcggactgcagcaaaataaactggaattctaggaggtattcttatgaatgttggactgatcgcgcatgattccaaaaagaaactgatgcagaacttctgtatcgcgtataaagggatcttaagtaaacataacctctatgcgaccggaacgaccggaaaactcattgaggaagtcacaaatttaaacatccataaattcctgccgggtcatcttggcggggagcagcagatgggagctcagatcgagaacaatgatatcgatcttgtgatcttcctgagagacccgctgtcaccgaagtcccacgagccggatgtcaacaaggcggtgagactctgcgatatccacaacgtcccgcttgcgacaaaccttgcgacagcagagcttctgatcaaggctctggatcgcggagatcttgagtggcgtgagatgtataagtaatgagtaagaagaaaagatggatcccggggatcgtggggttctgcctgatccttggcacgactggctgcgccggacttgcagatacgggaaatacctacgccctggatcagaggatcgagacgttcgcatcttcaggcagcggaagaacggcggacggctttgcggcagacctggcggtggtaacggatgggaccgacggagacggaacactcacagcgcagtctgccggggtatttccgctcgatgggggaaatgccgtatttgcgcaggatgtttttgaacgcagaaatcctgccagcacgacgaaggtcatgacggcgcttgtcgccctgaaatatggaaatcttgaagatatggtgacggttcctcaggagtcggtaatcacggagagcggttcctccatggcgggggttgttcccggagataagctgacactggagcagcttctttatggtcttttgatcccgtcgggaaacgacgcggcaaacgcaatcgcagttcatatgggcggatcgatcgaaggatttgttgaaatgatgaacgaggaagcagcccggatcggtgccacagggacgcattttgcaaatgcaaatggcttgacgaacgaggaccactatatgaccgcctacgacctttatttgatgttccatgaggcgttaaagtatgagaagttccgggatattatcggaacgaagacatacacggcgtcctataaaggggcggacggatcggataaaaccgcatcctggagtgtcagcaactactacatgctcggaaagaaggagatgccggagggactctccgtattcggaggaaagaccggaaccacccaggcggcgggctactgcctgatcatgggggagaaggacgcggacgggaaagagtacgcatctgtcgtgatgcatgcggacagccgcgatgccctctattcggatatgtcgacgatcatggagaagatcgaccggtagcagaaaacaggaggaagaatacgtgaatgaacaggacatgaaagttttcgggggatccgaaggttttcatgtcctgtttttactcccgggcaaccgtaaagaactgtcgacagcagattctgccggtgttggaagtacattctgcttttgtatgaaattatttcgaaatttagaaataatggttgcaaattttcagcaaatagtctataatgaatttacaaacaagagattttttatacaaaatatataaaatccaaggaggagtgcattatggttcagatcatcgcaggacggaagggaaaaggaaaaactaaatatttacttgacatggctaacacagctgtgaaagaggcaaaaggttcaatcgtttaccttgataaaagttcgaaacatatgtacgagcttaacaacaagatccgcttaatcaacgtagctgagttctccgtaagtacggctgaaggctttatcggtttcatctgcggaattatttcccaggatcacgatctcgaggctatgtatctcgacagtttcttaaaacttgccggtcttgagggagaagatatcacagcaactctcgcagagctggatcagatcagtacaaagtatcatgtaaactttgtattaagtgtatccatggatggtgaagaacttccggaatctgcaaaagatatggtgctggtagcattataaaacaatcgctccttcctataagtaagagtacataaacacctgcctgatggcgggtgtttatgttttataagccggaaattctacgctgcgaaaaaaataaataaaatgtcaagcaaaaacacttgacaaccatcaccgtttatagtatgatatcgcaggtgacctgatatggaaaaaattgtagcacagggtcttctgtatgatttctatggagagctcctgacggagcaccagcggcgtgtatatgaagatgtggtatttaatgacatgtccctcagcgagatcgccgaagaacagggaatcagcagacagggcgtgcatgacctggtgaagcgctgtgacaagattctttccggatacgagggaaaactgaaacttgtcgagaaattcaaccagacaaagaaaatggtagaagagattaaggaactggctggccaatataaaaaggacggcgaccgatccttgatcgacaggatcgaagcgatttccgaagagatcgggaagctgtaagccagagggagagttttcatggcatttgaaagtttagccgataaattacagaatgtctttaaaaacttaagaggcaaaggaagactgtcagaggcggatgtaaaagctgccctgaaggaagtcaagatggctctcctggaagccgacgtaagttttaaagttgttaaacagtttatcagttctgtacaggagagagcgatcggacaggatgtcttagagagcctgactccgggacagatggtaataaaaattgtaaacgaggaactcgtaaaactgatgggttccgagaccacagagattgccttaaagccgcagaatgagatcacggtcatcatgatgatcggtcttcagggcgcaggtaaaacaacgactacggcaaaacttgccggaaagttcaaggcaaaaggcagaaagccgcttcttgcggcctgcgacgtctaccgaccagctgcgatcaagcagttacaggtaaacggtgagaaagtcggagttccggtcttcacaatgggagataaccagaatccggtgaatatcgcaaaagccgctgtggaacatgccagaaaagaaggcatgaatcttgtattcctcgatacggcaggacgtcttcagatcgatgagtccatgatggatgagctcgtcaacatcaaagaagcagtcgatgtcgaccagacaatcctcgttgtcgacgcgatgaccggtcaggatgcagtcaatgttgccggaagctttaatgacaagatcggcgtcgatggcgtgatcttaacaaagcttgatggtgatacacgaggcggtgcggcgttatcgatccgtgccgtgacgggaaaaccgatcctctacgtcggtatgggcgagaagctctctgacctggaacagttttatccggaccgtatggcttcgagaatccttggaatgggagatatcctttccctgatcgagaaagccgaatttgaggtgagcgaagagaaggcgaaagagatgagccagaaacttcgcaaagcagaatttgattttaacgatttccttgatcagatgcgtcagatcaaaaagatgggcggaatgaacagcatcctgaacatgatgccgggaatggcccagatgaagggaaatgttgaaatagacgagaaatccatggataaagtggaggcgatcattctctcaatgacgaaggaagagcgggtgaacccgtcactcctgaatccgtcgagaaaacagaggatcgcgaagggcgccggagtagatattgccgaggtgaaccggatcgtcaaacagtttgaacagtcgaaaaagctcatgaagcagcttcctggaatgatgggaggcggaaaacggaaagggcttggcggactgggcggtatgcttggaaagatgaaattaccattctaagtaccgcattatgataagaaggcaaatgcgattcccgcatggctgatacacaaagaaaccaaggaggtgaaattgtcatggcagttaagatgagattaagaagaatgggtcagaagaaggctcctttctatagaattatcgttgcagattcccgctccccgagagacggtcgcttcatcgaagaggttggttactacgatccgaacacagagccgagcaccatcaaattcgacgaggaagcagctaagaagtggttaggaacaggcgctcagccgactgagactgttgctaaactcttaaaggcagccggtatccagtaatcgaggtggattcaatgaaggaattggtagaagttatcgccaaagcgctggttgataatccagatgaagtcgttgttacggaatctgaaaaagaagaagagatcgtcatcgagctcaaggttgccccgaccgatatgggaaaggtgatcggaaagcagggaaggatcgcgaaagccatccgctccgttgtgaaggcggcttcttccaagatggataagaaagtgattgttgaaattcagtaatcgtgagggactgtggacaggatttttcccggctgcagtcccctttctgttatcagagacggtttctgcgggcaggtatcagccgcgctgtgtttgatagaatgacaggagctgactgcccgggttccctcgcagttacgataggagacaaatatggaaaaatatcttcgtgtaggcgtcattacctccccgcacggcgtgcgcggcgaggtgaaggtctatccgaccaccgatgacgcgatgcgctttaaaaaattagatcatgtgatcctggacctcggaagaggagaaagccgggagttaaagatccgtcaggtaaaattcttcaaaaacatggtcatcctgaaattcgacggggttgacactatgaacgaggtggaaggatggcgccagaaggaccttctgatcacaagagaccaggcagtgcctcttcaggaggacgaattctttatcaccgacctcatcggacttactgttgtcacggacgaaggggatacgctcggaacgctgacggatgtgatggagaccggagcaaacgatgtctactgtgtaaagacaccggagggaaaggaacttcttctcccggcgatccacgactgcattctcgatgtggatcttgataaggaagagatgcttgtccatgttcttccgggacttctggatctgtaaggggaggccgcgatgaattttcatgtacttaccctattcccggagatgatcatgaacggtctggagaccagcattctcggccgcgcggcagcgaaggggatcgtatcgtttgaggcggtgaatatccgcgattatacgctggagcgccacggaaaggtggacgactatccttacggcggcggcgccgggatggtcatgcaggcggagccgatctaccgcgcttatgaggcacttgtcgagaagatcggaaagaaaccgcgtgtgatctacatgactccccagggaaagactttcaatcagaatattgcggaagatctcgcgaaggaggaggatctggtgttcctctgcggtcactatgagggggtcgatgagcgcgttctggagatgatcgcgacggattacctctccgcaggagattatgtcctcacaggaggagagcttccggcgatgatgatgatcgactgtatttcaagacttgtcccgggagtgctgaacaacaatgtgtctgcggagttcgagacattccacgataaccttctggagtatccgcagtacacgcgcccggaagtgttcatgggcaaaaaagtgccggatatccttctttccgggcatcacgcaaatgtcgagaaatggcgcagggagcagtcgatcatccgcacactgaagaaccgcccggaacttttggaggacgctgtcctttcgaaaaaggagcagaagttcctggatgaattgctgagacagcaggagaccgaaaaaccgtgaccaaaaaattgcacgatatatgagaaaaccgcttgcattttggcttgcggtatgataaaatacaaaactgtggtatccgaaagacgggagaaccctgtcaatacggagacttaaatcataagagatgttccgctgccgcaggaaaagaagatgcgggtaagaacatcgaatactttaaggaggttcatatcaatgaacgacattatcaagaatatcgaagctgcacagttaaaagagtctgtaccgagcttcaacgtaggtgacactgtaagagtatccgctaagatcaaagagggaaaccgtgaaagaatccagatcttcgagggaactgttatcaagagacagaacggcggcgttagagagactttcacagtaagaaagaactccaacggtatcggcgttgagaagacatggccgcttcattctccgtctgttgagaacgttgaggttgtaagaaaaggtaaagttcgccgcgcgaaactttactacttaagaacaagagtaggtaaagctgcaaaggttaaagaattagtaaaataattcataacaactgtacagagagtcagtagatcaaaggggcaatgaaaattgtccctttgtttttactaaaacagcaggaattccccttgcataaagtacagatgttctgtcatggattcaggaggtcccttcatggaattttttgagaaaaaggaaccgaacagacttcaccggatcacggaatgggcggtcgactgcgcagtcatgattgctcttgcgtgctatctcgtgttttgttttgggagcagggttgagatgaatggaagttccatgaaacccgtgctggagtccggagatgtggtgctgataaaccggctcgcatatgatgtcgggaaaccggtccggtttgatgttgtcgtctttgaacgggaaggacagcagccggggatcaagaggatcatcggacttcccggtgagacggtccagatcaaaaatggatccgtctatatcaatggggaactcttagaagcggaaaacggacttgccgaggcgacgatcgccggggcagccgagtatccggtcgagctcggggatgatgaatattttctcctgggtgacaaccgggaatcaagtgaagacagccggttttccggcattggaaatataaaacgggaaaatctcatcggacgcgtctggctgcggtttcagccattttccagacttggtttcgtccggtagcaggaaaggacggagacgattactatgaatatacagtggtatccaggccatatgacaaaggcgaaacgcgccatgaaagaggacgtgaaacttgtagacctcgtgatcgagcttgtggatgcgagagcgccgcttgccagccgcaatccggatattgacagcctcgcagccggaaaaggccgtgtgatccttttaaataaggcggatcttgcttctgagaaggcaaatgccgcatggatctcctattttgagggacagggcttccaggtcatgaagatcgatgcaagagcgaaagcgacgttaaaacagctgaatgccctgatccaggaggcatgtaaggagaagatcgagcgcgacagaaggcgcggtatcttaaaccgcccggtgcgtgcgatggtggtcgggatcccgaacgttggaaaatccacgttcatcaacagctttgccggaaaagcagctgcgaagacgggaaacaaacctggcgtcacaaagggaaatcagtggatccgtttaaataagcaggtggagcttctcgacactccgggtatcttatggccgaaatttgaggaccagaaagttggtcttttactggcgtttttaggctccatcaacgatgagatcctggagaaagatgaactggcttccgaacttgcgggatatcttaaggagatcactcctggtctcttaaaagagcgttacgggatcgaggaggaaggaaagaagccgtatgagctccttgatgagattgcaacggcgcgtgcatgcctgacaaagggaggcgtgaatgatctgacaaaggcggcgagacttcttcttgatgaattccgcggcggaaagctcggaaggatcacgctggagatgccggcggaataaagtgtggaacatgaatacgcagggataaggagtaaagagatatggcaagacgtgtgctgaccggagaaaaactggaaaaggagctggaacgcctctccctcatgcgggagttcgagagacagtatgaggactgtgcgtttatctgcgggatcgatgaggcgggccgcggacctcttgcagggccggttgcggccggtgcggcgatcctgccgaaggactgccagatcctttatttaaacgactcgaaaaagctctctgagagccggagagaggaactgttcctggagatcaaggagaaagcgatcgcctggtcggtggggatcgtgggtcctgagcggatcgatgagatcaacatcctgcaggcgacttatgaggcgatgcgccaggcgatcgcgaaacttgacccggcgccccagatccttttaaacgatgcggtgacgatcccgcaggttgcgatcccgcaggtgccgatcatcaagggcgatgcgaagagcgtttccatcgcggcggcgagcatcctcgcaaaggtcaccagggaccacatgatggaagagtatgataaggagtacccggagtatgggttcgcaaagcataagggatacggaactgccgcacatatcgcagcgctgaaagagttcggaccgaccccgatccacagacggacatttattacgaagtttgtgtgataagcagccatttttcgaagaaaaatgagcggattatgaatgtttttgagcattgcgggagcacgaagtgcggagcaatgcggtatcagagaaacaaagctgagcgagtcatcgatgggggatttttgtgacaagaaataatcgggcagtgggcagcatctatgaggaaaagatcgctgcctttttaaaacagaacggatttgtgatcctggagcggaattaccgctgtaaacagggcgagatcgatattattgcgaaagatggaagctatttcgtgtttatcgaggtgaaataccgtgccagtggttcagctgggttttcgctggaagcgatcgaccacagaaaggctcttcggatccgcaatgcggcagtctattatctgtattcccaccagcttccggaggagacaccgtgccggtttgatgcggcggggatcgatggggatgagatcacatatatcagggatgcattttaaggttcaggccgaatgtacgtgggactcgcaaaaatccattatgcttttgatcgtgtatccggaacaagcatgcgtactttccgcatggctgagaacggcgcatatcggtgaatgaaaaaattctgcatgagatatctcggaaaggggaaaattatggatcagtggatcagaaaaacagatgcggcggatcatatgaaggaagtgacaaataacggtgtcacctatctgacattcccggcacttgatgcaaccgggatcgtcactcacgcgttttccacgcggatgggaggtgtcagcgaaggctggtattcgaccatgaatttctctttcacacgcggtgacaaccgggaacatgtgctggaaaattacagcaggatggcggcggcgctcggcgtaaagcgggaaaagatggtcttaacctggcagacgcacacgacaaatatccgcgttgtatcggaagatgatcttggaaagggagttgtgaaggaacgggattaccgggatattgacggtctcctgaccaatatgccgggtgtgacgctcgtgacgttttttgcagactgtgtgccgttatattttgtggatccgaagcatcgtgcgatcggactcgcccattccggctggagaggaaccgtgaaccgtatgggagaaaagatggtggcggccatgaagcgggaatacggaagccggccggaggaccttgtctgctgtgtgggaccgagtatctgcagtgactgctacgaggttggagaggatgttgcggacaagttttatgacgcgttttctaaggaagactgcagggcgatcgttctgccgtcgaagacgggcatgatcggaaagaggcagctggatctctgggaggcgaaccggcggatccttctggaggccggagtcccggaaaaaaatatttccgtcaccgatatctgcacgagatgcaatccggataagttgttttcccaccgggcgatgggagagaagcgagggaatctctgcgcgtttcttgcgcttaaggagaattaggcgtgtgagaatgcgggggttcgcaaaaaatgacatttgacgaaaaaccttccagtgtattatttttcaggacgatcatactaggaacgtaccatcaaacatgcccgatgcgagagcaggaaaggcattacactaaaaggaggcgtatcttatgtctaacacaagcagttcttcttctaaccgtgtagtagttccggaagcaaaggaagcgatggacaaattcaaaatggagatcgcggatgagctcggagtgccgcttacaaacggctacaacggcaatctgacttcttaccagaacggcagcgtcggcggctatatggttaagaagatgatcgaggagcaggagaagaagatggcgggcaaataagggttagagcctgagcatctgagggagaggccttcgcgaggagagacagaattttattgattctggttgcctcgcggaggcttttttctgtgtgaggtgattggcgagagtacgcggtgagtttccgcctgggagcgcccggggatgcggggatggttcctctaagaggacgccagatccccggatcaaggcgctcccaggcggaagctcaccgctgtgggatggtggggcgaaaagagtgggggtgtgacagcggggaggaagtttatcgctggtttatgcaatgtctgaaaaaggctcagaaaacacttgtataatagaaaaaatacgattataatggggcggagaataaaaattgcagtggtattttatgagttagaggttgagatatgagagtaatcgcaggcagcgcgagacggctgcttttaaagacggtcgagggaatggagacgaggccgactacggacaggatcaaggagactctgtttaatatgcttcagaatgatctttacggggcgagatttctggatctttttgcgggaagcggggcgatcgggatcgaggcgctgagccgcggggcgaaggaagcggtctttgtggacaagggagacggacagatttcctgtatccgggataatctgaagacgacccatctggaagagagggctcgtgtgatgtccgcggatgtgacagaggcgatccggaagcttgaccgggaaggaaaggcgtttgattttatctttatggatccgccgtaccggatggatcttccgaagaaggtgctggaagcgctgagggacacttctcttgcggatgaggagacgctgatcatcgtcgaggaagctctcgatactgatttttcctgggccggagcgctcgggtatgagattgagaagagtaaggaatataagacgaataagcatgtattcctgagaaaaaattaagaatcatctgttcaggggactgaaaaagggaagacagatccggcggtcagagactgaaggctgaagccgggtcaaaatacaaaaacggaacgatataaaacgaggagaaaaaccgcgggttttcgcggtgtgagacagaaattatgaaaaaagcaatttatccgggaagttttgacccggttacactgggacatatcgacgtgatcagacgtgcgtcaaagctgtttgatcatctgatcatcggcgttcttaataatcgtgcgaaaacgccattgttttccgtggaagaacgtgttaagatgttaaaagaggtcacaaaagacattccgaacgtggaggtaaaaagttttgcgggtcttaccgttgacttcgcgaaagaatgcggcgcgaacgccgttgtccgcggactccgcgcgatcactgactttgaatatgagctccagatcgcccagttaaaccgcgtgatggatacgagtatcgatacagtattcctgacgacaagtctcgagtacgcgtatttaagttccagtaccgtgaaagaggtagcggcttacggcggcgatatttcaaattttgtaacgccttatgtggcggatgaagtacataagagactgcgtgagagacagggcagtcaggcgtaagggaaaggaaaaggaaacaacatgagcagaattgaacagttaatcaatgaaattgaggaatacatcgacagctgtaaatttcagccgttatctacatcaaagatcatcgtaaataaagaggaactggacgagcttttagtcgagctccgtttaagaatcccggatgagatcaagcagtatcagaagatcatcagcaatcaggacgcgatcctttccgatgctcacagcaaagcggatgcgatgctcgcagaggcaactgctcagacaaacgagcttgtaaatgaacacgagatcatgcagagagcctatgcccaggcaaatgagatcatcgagcaggcgcaggcgcaggctcagacgatcgttgacaatgcggtcgctgatgcgaacagtgtccgtcagggttcgatccagtataccgatgatatgttaaagagtctccagacgatcatgaaccacacgatggagggcgctcagggccgcttcgacgcattcatgaattccatgaagtccagctacgatatcgtctcctccaacagaaaggagctttcctccgggatcatcactgagaaagaggagagcgctgagccggaaaaacaggattccactgaggcttgattgcggaaacgctgtcgacggcgtaccggcctgaccgtaccggatctgcgagaggatgcgggagtggtattttatgagaaccgatatttaaaaaaagtgaaatcccagaatgccggtgagaactgccataaatgcagcagtcagggcggaatgggcaattttccagagaagatactgccggatggagagtccggcagttttttttattcgcttattgtttaacgggaaatttccatgcaccggaaaaccttcttctttatctgccggaaagttctgatgggacttcccactttggatcaccgcgtctgtctgcgacagggcggaaaagcctccgaaggaaaagatggcagctgcggcgacggcggaaaccggatacggaagggagccatgaaccgtacggatccctgtggtgatctccagactgccgcagagaaacagccggaccggggcagggatccgggaaatgttccggacaacgaggatcaggatggagtaaaagataagatatccgccgatttttacgagaatctccgcggaattcatgatcgcggcgtcgagtgtgattgcgggtctggtcagcctgctgacagatggggtgtcaggattcatgatcgcggcgttgagagcgatcgcggaatgcttcgtctgtgcctttgcggtgatgctggccggaaaggaggtccggacgtgttctctccggtagatcaggctggccgggaccgcgagaaggagcagaggtgcgtagatagaaaagacaaaatatgacaacgggacctgggaagcaaacatgggacagacgaaacctgcgagaaacatgggacttggatgattgcagagtgcaaagagaaatttcgcctccccggagctgatccgcccttccgcgtaaagatcggcacatgtctttgctcccatggggcagccgcagagaagaccggtgaggagaacataccagccgtccgccgacagtccggcaaagcggaagattaccgggaacggacgcatgagtgcctggaccccgccggaggcggagagaacggaagacagtaccataaacggaaaaagcgccgggacgacggaggaataccacaaaagaagtccggacgcagccccttttgttacgagatccgcgtgaaagatcataaagatcaggcagagcaagatcagaaaagctcgttttatcataaacactcctttttacagaattttttcaggattcatggccgcatccggatcttacgaaaaaaagcactgcccgcgtactgtaacctgctcgccgatgctgcagaactctttctattattttcattgtactttccccggaattttgatatgataaatatagtgcgctttcctgtttaaaatgcatttccgggataaagtctgaaacctggaaagtctgcgggtgcggctgtggaaatgtcggagagtgcgtgatcggaaggagagaaatatttggaaaaagcaatccggctggacaaatatctggctgatatgggaaaaggtacgagaacggagctcaaggagatgatccggaaaggacggatcaaggtgaacggcgaggtcgtgaaaaaaccggagacaaagatccggaagggcgaagatacgatcctgctcgacaatgcgccggtggagtacgtggaactggaatattatcttttgaataaaccgcagggcgtgatctcggcgacggaggaccgccgcagggagacggtcgtggacctgatcgatgaaaagcagaggaaagatctcttcccggtgggacgtcttgatatcgatacggaaggtctgctcctcatcacaaacgatggggcgcttgcccaccgccttcttgccccgggtcaccatgtagataaggtctacgaggcgagatgtgagggacttgtcccggatgaagcggtacagaagttccgtgacgggatggaactctcggacggactttcctgcatgccggcggaactcgagatcctggagaggaaggccggggatccggagacagggacggaggcggagagtctggtgagcctgactcttcacgagggaaaattccatcaggtaaagcgtatgatggaggaagtcggttgtccggttgtccacctgaaacgcctgtccatgggaccattgaagctggatgcgacattaaaacccggtgagtaccggaaactgacggataaagaacgggagttgttggaaaacttatgataaaaaattttttggatcacaaaaaagcgatgctttttgacctcgacgggaccctggtggattccatgtggatgtgggaagccatcgatatcgaattccttggagcgtatggttacgagtgcccggaggatcttcagagagccattgaaggaatgagcttttcggagacggccgtgtattttaaggaacggtttaagcttccgttaagcctagacgagatcaaggcaatctgggttcagatgtcgatcgacaagtaccgctatgaggtcccgctgaagccgggtgtgccggagtttttaaaatactgcagagagaacaggatccgcacggggatcgggaccagcaacggaagcgagattgtggacgcggtcctgacttccttaaacgtgaaggaatatttcgacgtggtggtgacggcctgcgaggtggctcacggaaaaccggagccggatatttacctggaagtggcgaagcgccttggcgtaaagccggaggagtgcctcgtatttgaggatatcccggccgggatcatggcgggcaaagcggcaggaatgccggtgatcgccgtggaggatgatttctcaaaagacctgatggacgagaaacgagcactcgcggacgcggtgatcgcggattacagagaacttttataaagctgcaaatatttcagtgaaaacagtgactttcctaagctggaaattcgctggagatgcagaaagaaatacaaaaaacataataacggcgggggatgaaagtttgggttctccgtctacggcagcccacggtaagtttggaacaaatatgtcagactggcggtggctggaaacaatatatgaaggacatagaatatgatacatgattttctcccggtatgccgggcagatatggaaaaaagaggctgggatcagtgcgatttcgtctatgtgtgcggggacgcctatgtggatcatccgtcgttcggatcggcgatcatcagccgtgtgctggaatcctacggatataaagtcgggatcatcgcccagccggactggaaggataaggagagcatccagatcctcggaagaccgagactcggcttcctcgtgagcgccggaaacatggactcgatggtaaaccattattccgtctcgaaaagaaggcgcgataaagattcctacacgccgggcggtgtgatgggaaaacggccggattacgcggcggttgtctactgcaacctgattcgctcggtctacaaagacatcccgatcgtgatcggtgggatcgaggcgagcttacgtcgtctcgcacactacgattactggtcaaacaaagtaaaacactcgatcctcgtggactctcaggcggatctgatctcctacggaatgggggaaaagtcgatcgttgagatcgcggacgccttaaattccgggcttgatgtgaaggacatcacattcatcgacggaaccgtctataaaacggacagtctggattccgtctacgatgcggtgatcctgccgtcctatgatgagatcaaaacggataaaagacggtatgcggagagcttcgggatccagtataagaatacggatgcgttctccggaaaacgcttggtggagccgtaccgcgacaatttatatgtggtccagaacccaccggcaaaaccgctctccgtccaggatatggatgatgtctacgcgctcccgtatatgagaaaatggcatccgtcctacgacgcggcgggcgggatcccggcgttctccgaggtgaaattcagcctcatcagcaaccgcggctgtttcggcggctgcagcttctgtgcgttgaccttccaccagggcaggatcatccaggttcggagccatgagtctatcatcgaggaggccaaatatctgacaaacgagccggatttcaaaggctatatccatgatgtcggcggtccgacggcgaacttccgcttcccggcctgcaagaaacagctgaaatacggagcatgtccgggaaaacagtgtctgttcccgaagccatgcgagaacctgatcgcggatcacacggattatatcgcactcctcaggaaactccgggcgcttccgaaggtcaagaaggtctttatccgttccggaatccgtttcgattatgtgctcgcagataaaaagaaggatttcctccgggaactctgcatgtaccatgtcagcggacagctgaaggtcgcgccggagcatgtctccgaccaggtcctccgccttctcggaaagccggaaaatgcggtctacgagaagttcgcgcaggaatataaaaagatgaatgagaagctcgggttaaagcagtaccttgtcccgtatctcatgtcctcccacccgggttccacgctgaaagaggcagtggagcttgcggaacacctgagagacctcggctacatgccggagcaggtacaggacttctacccgacaccttcgacgatatcgacctgtatgtactacacgggactcgatccgcggacgatggagccggtctatgtgccgacgaacccgcatgagaaggcaatgcagcgtgccctgatccagtaccggaatccggacaactacgatcttgtgaaagaggcgctgatcaaagccggacgagaggacctcatcggatttgaccagaagtgtctgatcaagccccggaagatggcgaaagacatggcgggcggaggccattccggtcattcgggaaaagcggcttccggcagaggtggttccgcccggagagatggcgaaagacatggcggaaataacgtccgcgctgcgtcacggtccgagaagagcagaaatgacagccgcttcgcatcgcaggccggaaaaaccagaaatgacagccgtcagaccgtatcaggcagggcgaaagggatggcaggccagaccggcggcaggaagccgaaaccaagaccgcagcagggaagaaacaggaaataaagaacggtccgggatcatatcagaacagataccggtcaacatttcattcagaaaggcagatcacatgagcggaaagaaaattgcgatcgtgaccggcgcgtcatcgggaatgggacgggagatggtgtatcttctcgcggatcatttcgcagcgctggaggagatctgggtagtcgcgaggagaaaagagagactcgaggagcttgtcggaaaggttccggtccgtcttcggatcctgccgcttgatctcacgagtgaggaggacctcggcgcactctccgtccttttaaagagagagcagccgaacgtcaagatcctggtaaacggcgcaggatacggaaagaccggggcggtcggaacgatccggcgggacctctcggtcggaatggtgcgcttaaacgatgaggcgctggttgccgtgacggagatggtgcttccgtatatctcaaagaacagcaggatcatccagtttgcctccgcggcggcgtttatgccccagccgggctttgctgtctacgcggcatcaaaatcctttgtgttaagctacagccgggcgctggccgtggagctgaagaagaaaaatatctatgtgacggcagtatgtccggggccggtggagacggaattcttcgggatcgccctggacgggggaaaactcgctccgatcaagaagctcacgatggcggagccgaaaaaggtagtaaaaaaggcactcatggacagcatgaaaggcaaacggatctcagtgtacggaccgtggatgaaggcgttttacgttctctgccaaatcgttccccacgagatcttaatggggtttatcaactggtaactgccggaccgcacaccgcatgcgggctggtcttacgcatcacatgcagcaatagaaaaagggactgcggacatctgagcagttcccggaaaagaggaaaaagatttgaaattacgactggaaaaaggaacctatggatacaggactgcctacaaaaagcgtcagcttttcttcgttgtcctgttcatcctggcgatcgtggcacagcttatcttaagaaattttgtcacggagcagatctataagaatctcatcacgatcagtgcgatcctcacggtactcccaatggcgaatctggcatccccgcttgtcgtcgcatcgaggatcccggaggtcccggaggatctccacaaggcgtgtctcccgtacgaggacaaattcccgatcttatatgatctggtcatcacctccaacgatctgatcatgccggtcgatgcggcggtcgttcatccgacaggagtgtatctctactgcacgaacccgaaagtggaccggaagaaagcggagatatttttaaacgagatgttagtcggctggaagctggacggaaacgcgaaggtcatgaacgaggagaaaaagttcctacggaggctttctgagcttaagaccgtcacagaggaagaggatgacggaagcgctccgcatgttttaaagttattaaagagtctttccatgtaggggaataaaaaaatgagagagatcgtgattgagaagaacgaggtgggacagcgcctggataagttccttgcgaagtacatgaatgaggcgtcgaagagctttttctataagatgatgcgcaagaagaacatcacgctgaacgggaaaaagtgtgagggaaatgaaaaactcgccgaaggcgatgtcgtgaagctgtttctcgcggaggacaccattgaaaaattttccagtgttcaggtgcaggaggtaaagaaagtagatcttgatattctctatgaggatgatgagatcattctggtcaataaaccggcgggtatgctgtcgcaaaaggctaaggagaccgatgaatctctggtggagtatctgatcgattatcttttggggagcggcaagctcacggagagcgggctccgcgcgttccgcccttcggtctgcaaccgtctggaccggaataccagcggtatcgtggctgcaggaaagtctttgtcgggtcttcagatgctttccggcgtgtttaaagaccgctcgatccataagtattatcagtgtcttgtatccggcgagatccgggacgtgaagacggtggacggctggcttttaaaggatgagaagaagaatcaggtgcggatcctcacggaggcggaggcaaagcgatttggaggaagagacggagacgaggagccgaaacggatccggacaaaatatgagccgatcgcgacggacggaaggtttacgctgctcaaggtgacacttctgaccggacgttcccatcagatccgcgcccatttagcgtctcttggacatccgatcgtgggagattccaagtacggcggagtttcgaaggtgaacccctcagggcggaccgtgaagtatcagcttttacattcttaccgtctggagtttccgaagcttgcggaaccgtttgcctatctttccgggagggtgtttgaggcgccgatgccgggatatttttgttcggtactgaaagagaccgggatcaggctgccataaaagctggcagcaccggacggacatgcggcatgaggttggttgacataaaaaacttatgttaatcacccgaaaatatttgcattgatgataaggaacagctatgggaacatggaaaaccaggggccttcgtggttccacgttggaagatctgatcaaccggaccaatgacagctaccgggaaaagaagctggcactgatccagaagatcccgaccccgatcacgcccatcgagatcgacaaaaagagccgccatatcacattggcgtactttgatatgaaaagtacagtcgactatatcggcgcggttcaggggattccggtatgctttgatgcgaaggaatgtgcggtgagtacgtttccactccagaatatccacccgcaccagatcgcatttatgaaggaatttgaagctcagggcggagttgccttcattattctctccttcacagcggagaacgagatctattatgttccttttgatgtggtgaaccgtttctgggaacggatggaagagggcggaagaaaaagctttacctatgatgaggtggtgccggaagcgtacaggatccggagccaccgggacatgtatgtccattacctggaagggatccagcaggatcttgaccggaaggaagaaaaaggaggagacagcgaatgattgaaatggttatatggctcgttgtaatcgcggcgttcgtgttccaggcgttaaaaaagaacgggacactggacgaactctttgcgggtgcaaagaagcggaaagaaaatcaggcagagcgcgtggtgtacgaacagccggaggaaggttccgggaagaaggagaagaagaaggggccgggaatccgggtcccgaagcacacaggtcttgcggtgactgcggttgtgatcgtcctcgcggcggcagtgctttcctttgacagcttctatactctttctgaggaggagatggcggtggtcaccacgttcggaaaaccggcagtggaggaggcatcaggtcttcactttaaaattccggtgatccagcgcgtgactaaggtttccaaagccatcacgggtatgcagatcggctacacgacggacccggcccgggcggacggcgcctccatagacaatccggtatccatcgagaacgagagcctgatgatcacaaaggatttcaatctgacaaacgtggatttctatgtggaatacatggtcacagatccggttcaggcggtgcgccacagaagtgtgtacgagtctatcatcaagaacctggctcagagctatatccgcgataccgtcggcgtttataatgttgatgatgtgatcaccaccggaaagacccagattcaggagcggatcaaagagcagctcacaaaccgtctcgtcgaggaaaatatcggatatggaatctacaacgtgtcgattcaggatacggaaatgccgagagatgatgtggcgaatgcgttcaaggcggttgaggatgcgaaacagggcatggagacggcgatcaactccgcaaagaaatatcagtctgagaacattccggaggcgaaggcaaaggccgataagcttttgcaggatgctgaggcatacaaggaacagcggatcaacgaggcaaacggtcaggtggcgcgtttcgaggacacatacgcggagtatgtgaagtacccgctgatcacaaaaaagcgtatgttctatgaaaccatggaggaagtccttccggacctcaaggtcatcattaccggagggaatgggacgcagacgctgctgccgttagaaccattttcagaggcagcttccggcagcgcagcacagacgggaggaggaaactaaatgaaaaagacaggaaaaagaatcatagggatcgttgttctccttctgatcgttgttctgcttcagggaagtatggtgagcacatacaatgatgagtataagcttgttctccagtttggaaaagtggtccgggtggtcgagacaccgggtctcagctttaagatcccgtttcttcagacaacacagtcgattcctaattatgagatgatctatgaccttattccgagtgaggtaaatacaagggataaaaaggtgatggtaacggattcctttgcattgtggagtgttacagatccgctggcatacctgtccagactcggagcaaacaaagcaaatgcggaaagccgaatttccgtcgttgtatataatgctgtaaaaaatgtcatttcctccacggatcaggcagatgtgatctccggccgtgacggaaagctggcagagatgatcacagaaaagatcggttcttctctggacagctacggaatcaaggtaaaaaaggtggagacgaagcttttagacctcccggattccaacaaggaggctgtttaccagcgtatgatctccgaacgccagaatatcgctgccggatatatcgcagacggtgagtaccagtccaatgtcatcaagaacagcacggataaagaagtctccatcatcatttccgaggcccaggcccaggcggagaagatacgggcggaaggcgaggcagagtatatgaggatcctttccggcgcgtacaatgacgagggaaaggccgattactataattatatccgcagtctggatgcgttaaaggcgagtctcaagggagataataagacgatcattctggatgaaaattcagagcttgcgaagatcctcaggggaaactattaaggaacggccaggataaaaccgcaacagcggaaaaatcctgtgaagcagtgatgctgtggacccggaacgatccggacgaagcaggctgctgcgggacataaccgcggtcagtaaaaaaggctgtggatgtctgataaataatgatacggtaaaggagaagggttatgtcaaaagtagttgattatttcctcaagtatgtagcattcgatacgcagtccgcagaggatgcgggaacagttccgagtacgcaaaaacagttcgctctggcgaagcttctgtccgaacagttaaagaatatcggggtgaaggatgtctccatgagtgagcacggttacgtgtacggaacgattccggcaaacggggattataactgccagactgtcggcttccttgcgcatatggacacttcaccggattgtccggatgagaatgtccgtccgcagctcgtcaaacactatgacggaaaggatatcattttaaataaggcgctcggagtgaagatgacaacaaagatgttcccattcttaaaaaactatgtggggcaggatctgatcaccaccgacggaacgacactgttaggtgcagatgacaaggcgggaattgccgagatcatgaccatggcggagacactcctgacacacccggagatcccgcacggaaccatcaagatcgctttcacaccggacgaggaagtcggacacggtgttgacttctttgatgttcccggctggggcgcagatgtggcttacaccgttgacggcggcgcctggggcgagatggagtatgagaccttcaacgcggcatctatgaaagttatgatccatggaagcaacattcatccgggcagcgcaaagaacaagatgaaaaactcgatcctgatcggtatggagttccagtcgatgctgccggagaacgagaagccgcagtacacggaaaaatatgagggattcttccatctgaacaacatcggcggaaatgtcgagaatacaactctccactatatcgtccgtgatcatgatatgactcggtttgaggagagaaaagtgctcggaaagaagatcggcgagttcctgaacgcgaagtacggtgagggaaccgtcgaggtggagatcgcagatacctactacaatatggctgagaagatccgtccgcatatgtacctgatggatgtggctgctgaggcatttaaggagcttggcatcgagactccggagatcaatccggtccgcggaggcacggatggatcgagactttcctacatgggacttccatgtccgaacctctgtaccggcggacataactatcatggaaagtatgagttcatctgcattcagtccatggagaagaccgtggagctgcttcttaagatcgcagaaaagtttacgaaggttgagaagcaggcataaaatctggatcaggatatggctgtttagaaaatgcgggagacgctggatgtcgcttcccgcttttctttttggatgtatgaatgcaatttagaacatgcctttatattgaaggggcagagcattcatgatataatcatgcgcagaaaggcggtacagattatgataaaaatgattcaaagacgtctggacgcgatcctgcattggaatatttcctttgtgggcggtttcctcggcggttatgcaatcctttcccatgccggagtcttcggctctgcacagacaggaaacctgatggagatggcttcgaacgtccgatttatggaatgggaggaattgggactccgtctgctggcgatggtgatcttcgcctgcggtgtgatcgcctcctatatgctgacaaactatacaaatttacatatgcggaagctggcgatctgggtggatgcggccggtctcggacttacggccctgctgccggattggttctcgccgattgcgggtgtttacccgatctttttttgctcggcattccagtggggtgtatattccggcgcagatggtttcaacagcgcgacggtcttcatcacaaacaacttcaaacaatccgtcctcggctggacgcagtatgcgttgacgaaagataaagaatttaagagaaaagcggtgctctacagcaacacggtacttatgttcttcctcggtgctctcctcggtgtcactggtgtagctgccttcggcaacgccctcggcgcctgtgtaggttttattccccttgctgtcgcccggatctttatcagcatcggtgaacttccggtagaagatgagactccggaggagacagaggaagaggcagaagagatgctggaagaggcgaagattttggagaaggaagagaagaagaaaatttaaaaattggatatttgatgaacgggaatgggcagttgattcagggatgggtcggctgcctgttttgtataacagggaatgccgagaaatttaccgaaatgtttgaaaatagaagaactgttgtattttttgcatttttttcacttttcacatttattctactggtttttgggacagagggtatgtataatgaagctgtaacaaaacatttccacagatctgtgccggaaaatgcacatctgcggatcgatttgatttgaggcaaacaaaggggaacaatacatgaagaatagaaacagaggatttacccttgcagagctgttgatcgtggttgcaattgtcggtgttcttgtggcaatttctgttccgattttcaacagacatctggaaagcagtcgggaggcggtggatctttccaatgtccgctctgcatattcggaagttatggccgctgtggtatctgaggatgacgaacatgcggtcaaggtcgttccgttaaaacaaaaaattgaaaaatggcagtcgaaggatccggttacgaccgccggtatcacacattctaacaatgagggagatacggctaattggatcggttatccggttgcaggaggagaatgtgaggtttcctaccaggccggtgtcggtgtgatcttaaactggaaaggaagcacggtgaagcctgaggctccatacccattcaatgtcaactgtgatctgcagaagccgttgcttgacagcaagatattagagaggccggagttgatcagacattttaattttgaaattgattccagatgcaacaccggttcccagctcgttgcggcaattatgactgaagtgaaaaaagatccggataatctgatgaattacggaacctgggcttatcttggaaagggaggaaccaagcaaaaggaagaaaagcggtatttattctggacgtcggtcgatacgaacgctgttggtgcgggaaaagagattccggtgatcatcagcaccggggatggaagatattatgtttctgagacaacaacagctacgaggcgatcgggaagcaacagctatgtggcgatcgcagatcatttgacaccggacggttatgtggcgtgtacggagaatggaacaaagtatcaagacctgaaagaggcgtatgatgcctataccaagctggttacgaccggagcctatcaggattataaggatacgctccctaaaaagtaaaatcaggatcgtttcggaaagccatctgatctaatggcgcataaactgatccgtctgctgtagttcttacgcggactcccgcagcagccggatcagctcctccatcgccggaagggtctgttttcctttcagcgtaacgatggagtagctggtggtgtcatctggattaccgatccggaagcagcggacaggctttggatagtggaaatttttcatgtactggtagaagttgaaagcgatgccatagccttctgctgcgagctgacaggcagattcaagattttcaaggagaaagacctgtcccggttcggcgtggtcatgagcaatggcaaggtctgtgtagtgtctggaggactgatccggcttttgcaggataaaacgttccccgttaaattgtttgagatcgatcctcggacatggatctttccggcttttctttgccgcgccggtgcacagtgggtgcccggcggagacaacagcgaccatatagtcctcatagagaggacggtattccagcagcggatggctggaggattcattgacgatggcaaaatcaagctctccggcaagcagatgccggatcatctgctcagtagattcctcgtatgggaccagcttcacgtccggatagcgggcggaaaaaacaggcagtgccttcgcaagaagataaagtgttcttctgggatggattccgaaacggatcgttcccgaagagccacccatgtatttttgaagctcattttcataatgggcttctatttttatcatttcttttgcatgttccaaatagatctttccggcctcggttgggacaaactgtttcccgatccggtcaaaaaattttgtcccggtgcgttcttcaagatttcctaaaaatatgctgagtgcaggcggagagatgtgcagggcttgcgccgcatccttaatgcccctgtgtttttcaatttcaagcatatagagctgttcccgcatatccatggcctttcgctggtcctttccctgaataaatatttgcaatttcgcataaaaataaacaatattaaataaaacaataaaaatattaaacttgctttaatt

SEQ ID NO: 2158 - DNA, 145 bp, Unknown
  gut microbiota DNA sequence
gccctggaggcttttggggaagacgtcttaaaagcatttcagcttaggcgtattgaccctgacaaagtcgtcttaacacctaagctgatccgctataaccactaacccatgaagaaatctgctgtcagactggaagtaaactttt

SEQ ID NO: 2159 - DNA, 284 bp, Unknown
  gut microbiota DNA sequence
gctgacttgaaaaagtaaattccagtgcaaaagtaaattccaccgctcttttaaaagttgcttataatctagtgatttttaagaagaaaagcggaatctatgctataatacaagtaatctatggcgaaattttctgtttttctgtatggcaaacaagctgctggaggtcggtgtgcacgactaaattccaccagccacatttgaaaaatgtgaaaagtttacttccagtctgacagcagatttcttcatgggttagtggttatagcggatcagcttaggtgtta

SEQ ID NO: 2160 - DNA, 145 bp, Unknown
  gut microbiota DNA sequence
aaaagtttacttccagtctgacagcagatttcttcatgggttagtggttatagcggatcagcttaggtgttaggacgactttgtcagggtcaatacgcctaagctgaaatgcttttaagacgtcttccccaaaagcctccagggc

SEQ ID NO: 2161 - DNA, 663 bp, Unknown
  gut microbiota DNA sequence
gaagaagtcctgacttgtgcgatcaatatcggggagcagctcctcgtgagcggggcggagatcagccgtgtggaggatacgatccggaggatctgcaatgcctacgggatccggcagagccatattttctcgatcgcgtcgtgtatcatcgtgacgctggagacgaaggagcggaagtggatcacgcagacgcgaagaattttaagttacgggacggatatgtggaagctggaccggctgaatgacctttcgaggcggatctgcgcgacgcagccgtcgtttgcggtgatcgatcaggaatatgaaaagatcttaaagggaccgacatattccccggcggtgcagtgcgggatctatgcaatgacagccggggcgtttgccattttctttggaggaaatctgtgggatggatttgcgtccctgtttgtcggggcgctgatccgcgtgaccttatatgcgctctccgcgatcaagctgaaggcgatcttctccaatatcctctgctctctgatctcaggtatggcatgtattcttgtctgctatctcgggatcggacagcatgtcgagatgatcatgatcgggaatatcatgctcctgatcccgggagtcctgatgacgaactcattccgggatttcatcagcggggacatgatcagcggactt

SEQ ID NO: 2162 - DNA, 5691 bp, Unknown
  gut microbiota DNA sequence
tgagtcaggatgttctttcagtcatcgcatcgtttttcgggtcgctcggatttgcgatcatctacaacatccgcgggcgcagagtctggatcccggcgatcggcggggcagttttctgggcggtgtatcttgtatttttgcattttgtgaataatgaatatctgggatttttcgttgtagcgatcctgatcacgatctactcggagatctgggcgaggatcttaaagacaccggcgacgacggtcctgatgccgacggtcatcccgctgatcccgggaggttccctgtactatgcgatggacgcggctctccggcgtgacatgccgcagtttatcgtaaagggtcaggcggcgatcggacttgcgatcgcgcttgcggcggggatcatgatcgtgacgtcgttaaggcggccgatcgaggcgctggtgcacatagtagctaagaaaaaacattgacgaacaaatgttcgaaataaataatgaattcatgggaaagcagaatacataaaaggcggcctgccctccataaaaggaggggcttccccctccggacgaaagaaaggagggcgatgccaatgtatgttacatattcggacttgatccagataggtatcttcattgtagctctcgtaggattgtgttacacgatcttcggaaaaagaaaatagccgccactaccccaatagtgacggctgttatactataacagattacttgtaaagggtaggccgtgtgtatctgactttcccttttttgtatctatagtctatcatattcccaaatcgaattcaagcactatttcccttcggtcgtcaccgacaaccccggcgttactgcttacgctttgcgtaaacagtaacgggattttgccgatgctttgcatcctaaatcggcaaaatctgcatcccggacattatattacggtattttcggtgccgaaaatacctacttggaatagctggctggaatcatttttccatctgcagctttcttaaacatttcttccatcgtatgccacccaaggaccgcgcatttgacacgcgccggcatgtgggacacatcctggaggatggaggcttcttcgagtggctcgaggtcatcgcctttgacatttcctttgatcatctcgaggaagaggtttgcgaggcggagtgcctcgtcttttttctttccgatgatcaggtccagcatcatatctgcggaagcctgggagatggcgcagccatccccgacgaacgccccgtcaacgatctcatcgttttcaacttttaatttcagccagatatcatcgccgcagctcgggtttacgccctcaaggacgagatttgcatccggcagatcatgcttgtgggtcggatgaaggttgtgctcgattaaaatttcattataaaatgtattactcatatcccatttttctccttaatccgccaagacttgtgaggaacgcccggatctcatcctcagtattgtagaatgcgagactcacacgggtcgtagaggcggtcccaaggtactgtaagagcggctgcgcgcagtgatgaccggcgcggacgcagatattatcggcatttaagatctcagcgacatcatgcggatgaaccccgtcaacggcgaaggagaggatcccgtgatgattgtccggatcggaacttccgagaacacggatccccgggatctttgtcatgccctcataagcgatccttgtgagcttgttttcctgttcctcgatcgcatcaaaaccgatcgtgttcatgtagcggatcgcctcggcaagtgcataagcgccgccggcattgacggttcccgcctcaaatttatgcggaacttctgcccagacagcaccttctcttgtgacggattcgatcatctcgccgccggtgagaaatggcgggagctgctctaacagctctttctttccgtagagagcgccgatccccatcggagccagcatcttatgtccggagaaggagagaaaatcgactccgaggtcctggacatcgactttgatgtgcggaacgctctgtgcgccgtcgccgaccaggatcacaccgtggcggtggcagatctcagcgaaggtctttaagtcattcttgcatccgagcacgttggaaatctgggtgatcgccgcgatctttgtgtgcggggtgatcatgttctcgaggcgctctgccgggatcgtgccgtccatgtcgcattccaggtatttcacggtcgcaccgtaacgctttgcggcctgctgccatggaagaatgttgctgtgatgttccatgatgctgacgatgatctcgtcacccggttttaacaggtactcggagagtgtgtaagcggcgagattcaagctctcagtcgcatttctcgtgaaaatgatctcttccggacaggatgcgtggagaaaatcagcgaccgtttttcttgcttcttcataacattccgttgcttcttcgctcagctcatagagaccgcggaacgggtttgcattgtatttctcataaaaccgcttttcagcatccaggacagctgcgggcttctgggaagttgccgcattgtccaggtaaatgatgtcacggtttttgagaagcgggaaatcttcccggatcttagatacgtccattggtggcctcactttctaaataagaggcaacatctgcctttgtcttttcatcaggtaccagacggagaacggcgtcgatccgtgccttcgccatcatcttgtagatctttggaagctccatgccgcggctttccagatagaagaccatgtcatcgtcgagctttccgatcgttgcaccgtggtttccttcgacatcttcctccgcgcagaggatcagcggaatcgtctggtttacaacgtcatcgtcgagaagaagaacgtcctctttctcgtttccgacagcgcctgccgcgcctttcttaaaatcgatcgttccgcggaagagtttcttcgaattttcatgaagcacgccgtcggtcttgatctcgctgacggatttctttccttcgtggagagcgacgtagttcatatcaaggactgcatcgtttccgaccgtgtaggcgatgtccgcggtgaacgtactctttttgccgacgagatctgccttacagccgttgtatacatgaccaccggagaggaagaggtggatcacggagaattttgctccgtcagcaaccttcgcaccgatgtcgtttaagacggtttttgcattgtcattgcggatgatctggacgagagtcacttcggcgtctttttcgaggatcagttttgtctggacgccggagagagcagtgtggtctgcacccgaagcaccgtcggcctcagccgccacatccatgatgacggtcatcttacttccttcttttgcgaagattccgaacgtatttaagctatgctcggaagcgccgtatgtgaagccgatgcgcaccggtgtctctgcgaggtctccatccgtcgagagcaggacggcaccggctgcggactctctgacgagaacatccatatccggtcccattccgcctgcgatctcccggaactgatccggaaggccggcagggcagtttgtttttgagatccccgccgggatctcagcttttatttcatgcgctccggagacagaaatcccggagaccgcagtctcattcattttcagccagttccatgtcttagaagggagctggttgatcttcatgttctccatcatccaatacttcctttcatttccagatggatcagattgttcatctccaccgcgtattcaagcggaagctccttcgagacattgtcggcgaagccgctgacgatcagggctctcgcgtcctcctcggagataccgcgggacatcagatagaagacggcgtcatcactgatgcgtccgatctttgcctcatgtccgacatcggcgtcctttgtgcggatatccattgccgggatcgtgtcggaacgggagatatcgtcgagcatcagggactggcaggagacagcggatttgctgcccgttgcctttgcggatacgacaacggagcttcggaaggtgctgatcccgccgtccttggagatcgatctcgtatttacataggaagaagtcttcggagcgttgtggaccaccttacatccggtatcaaggttctgtcccttaccggcgaatgtgatcccggtgaattcggatcttgcgccctcaccgtttaacacgctcatcgggtagaggtaagaaacatgggaaccgaaggaaccggatacccactcgatgactccgccttcctcgaccttcgcacgctttgtgtttaaattgtacatatttttcgaccagttctcgatcgtggagtagcggagctttgcgttctttccgacgtaaagctcaacgcatccggcgtgaagattggccacgttgtacttcggagcggaacatccttcgatgaaatgtaaggacgcgccctcatcgacgatgatcagggtgtgctcaaattgtccggcacccgccgcgtttaaacggaagtaggactgcagcgggatctcgacggaaactcccttcggaacatagacgaaggaaccgccggaccagacagcgccgtgcagagcggcaaatttgtggtcatgaggcgtcacgagcttcatgaagtgttcttttaccatatcggcgtattcgccggtcagggcgctctccatatctgtgtagatgacgccctgctccgcaacttccttgcggacgttgtggtagacgagctcggagtcatactgggcaccgacgcctgcgagagaggtgcgctccgcctgcgggatcccgagcttttcaaaggtatccttgatctcctccgggacctcggaccagtcccctttcatctttgtgttggcacggacgtaggtcgcgatgttgtccatgtttaagccttcgatggacgggccccagtccggaaccttcatttcattatatacttttaaggaatttaaccggaaatcatgcatccactccgggtcatgtttctcctcggagatcttttccacaatgtcctcggtgagaccgtttttaatacggtaagcgtccttctcgtcattgcggaagtcgtacatgttgcggtcaacgtcctcaacatacgtcttttccttcattcgttgttctctcccttctcgtttgcggaagcgataaactgctcgaagccgttctcattgatctcatcgacgagagaaccatcgccctcggcaaccaggcggccgtctacgagaacatgggtcttgtccacgtggagagactccaggatccttgtgctgtgggtgatgatgaggagtgcgccgtccttgctcttctggtactcctcgattcccttggaaacggtgcggaccgcatcgacatcgagaccggagtctgtctcatcgaggatcgctaaggatggatttaagaggagaagctgcaggatctccgctttctttttctcaccgccggagaagccgacgttcagatcacggaagccgtaggatggatccatgtcgagaacctccatggctttctggagttctttattgaaatcccagatgcggacattctttccggttcttgcggagagggcgctgcggatgaagttggagagggagattcccggaacttcaagcggattctggaaggagaggaacatgccgagctttgcacgcttgtcagcggcttctttcgtgatgttctcgcctccgaagaagatctcaccgtctgtc

SEQ ID NO: 2163 - DNA, 156 bp, Unknown
  gut microbiota DNA sequence
atgttggttctctggataccggtaacaccggtttcgagagaatcaggatcaccgaattcagcgcctctgtcggtgagtatatattcaaacagagtcaggaaatcgaaggtaccaaaacgcttttctaaacggtccaaaacgagtcgtacagatcct

SEQ ID NO: 2164 - DNA, 69890 bp, Unknown
  gut microbiota DNA sequence
gctttaaaattctgtaacaagttttttacttttttcgtttcgcttcttaattaattttgccggcgttctatggtaaagtggttttagtatattttcgaaaggagatctcgcttatcaaacaatatgatcttgccgtgattggcgctggaccagtcggcctcttcgcggcctacttcgcccgcctgcatggcttaaagacggttatccttgaatccttgaacgagcctggcggacagccggaaatgctctaccccttcaagaagatcctggacatccctgtcttcaatgaaatcaccgcggctgacttaaccaagcgcctcttagccaacttaaccgaccaggacctggtcactggccacaaggtcagccagctggagaaaactgacgaatttgtgatcgatggcgaataccaggtccgcagcattatcgtcgcaactggcaacggggcctttaaggccaaaaagttccccctcaaggcgaccccggaagctgaagaccacatccactactttttcaaaaatcctgacctctttgctggccagaagatcggcatctttggcggcggagacacggccttagactgggcccaggaactttcccaaatcgctgacgtcaccctcgttcaccggcgcgaccagttccggggcatggaaagcagcgtggaaaacttgaaggctgaccaaaaggtgaccttgaagaccccctacctgccaaagagcatgcaggtcgaaaagggccagctggaaatttccttgaaaaaggttggcggagatgaagtcactcaagaaacttttgaccagatcctggtcgcctacggcttccgggccgacaaccgcttcgtcagcaagtggggggttgacctggaccagggcttgatcgccgttgaccggttcatgcagaccagcgtgcctggcatctatgccattggcgactcctgcggctacccgggccgggtgccagttatcgggattggttttggggaagcccagatcgcggtcaacgcaattatgcaggacctcttcccggaaaagagcctgaccatccactcaaccagtatctaacggaaaaaagaaaaataagaaatgaggttaacacatgccactgattgactttatcctgcacatcgatgaccacttggtgaccatcgtcaacaactttggggcaggaacctattggatcatttttgccatcatctttatcgaaaccggtttggtcatcttccccttcctgccaggtgactccttgatcttcgcggcagccgccatggccgccaacccgaaatacgttttaaatgtctggctgctctacatcgttgctgccgctgccgccattatcggtgacagcatcaactatgaaatcggcaagtggtcagtcacttccggggccaagcacagctggttcaacaagctgatcaatgaaaacaaccggctggcagcggagaagttctttgaaagacatggctccatcaccatcgtgatcggccgtttcatccccttcatccggaccttcgtgcctttcatttccgggggcagcaagatgcactaccagaccttcgttatttacaacatcctgggtggactgctctggacggccctctttaccagcatcggctacttcttcggtaacttcccagtcgtcaaggaccacttctccttgatcgtgatcggcatcatcctggtttcagtcgtgcctatcctggtcgtggccttgaagaaaaagctcaccatgcggcgcgagcagcaattcaatgattaaaacaaagcaaaaaataaggacctgccggtccttatttttttggtctaaattctgtttaagtactttccagtttactttttcagcaaatagcgggccaggtagagctcgtaaatcgctccgccaaccgcaaagcaggaggcaaagaagccttccgtcagcacgttgatgaccgggtcagtcgccgggtcaaagagccagttgtcattgcggaaaaagaaagtatgaaagacccggaagaaactgtcaaagtcggtcaaggcaaaaggcatgaccacaattggcagcagcatcaagagcaaggcctgggtctgggtcaatttaagcggcttcttgtaattgcggaaatagctgctgagagccaggcagagcaggaaaaccagctcggccagaataaaaagatttttggcatcggcaaagtgagcagccgctgaagccgaagtcggcatgttgctcatctgcagcttggtctgcccaggccaaaccaggtaaagcaggagctggttatagttgctcatgacctggcccacggtcaagttaaccgtttggtaagtcttctccagcaaggtaaaaagcaaaagcaagggccagctgactacgatcgcgccaacgacagcgctggagaccgcgaaaaagaaatggaaaaggggctggcccagcttgcttaggaattttttcataggctaaattcatccaaatcgttcactaaataagtcggcggagtgagaccggccaggtctgccttttgcgtcaccccagtcaaggtcaagagggtgtcgactccgctgttgattccggccataatgtcagttgggtaattgtccccgacaatcaaggcctcttccgccttgaagccagccaagtccagggcgcggttgacaataatggcttccggcttgccgataaaaaggggcttttgcccggacgcgacttccagagccgcgcaaattgaaccgttgcctggccgcagctccttgcccaccggcaggttctggtcggaattggtgccgataaagaccgctccccggtgaatgcagcgggtggcaaccatgagcttgtggtaggtcaagtccgtgtccatccccacgatcacgtagtcaggattttcctcgtcataatagaattccggccggtccaggatctccttccacaggccaatttggccaatgatgtagacgccgattggccctttcgcctctttttccaaaatatagctggccgtggccatgctgggcgtgtagatcttggaaacgtcggtcttgactccgtgcccggccagtttgtcagctaccatctggggcgtccgggtcgtgttgttggtcaaaaataagtaatcaagacctgcctcatccaggcgcttgacaaagcggacgccggattcaatggtctccttgcccctgtaaatggtcccgtccaaatcaatcaaaaataagcggtaatctttcacggcttcttctttctaatcacaaaggcctggtggcggcggttcttcttgcagctttcagcatagctgcccttcttgggccggccgtccttgacctttctttcgctaaaagccgccttgttcttcggccgctttctggctggccgccggcgctgggtcggccagggcttacggctgggctggagggattccaggataaagtaaggcgcgccagggttgcagtattcagtcaagtagtcaacaatcgtcgactttttccggtcaatggatgtcttgacatagtcattgtaaaagcccctaaggcggaggtggtcgctggatacatccccgaccagataatcatactggtccaggtatggatcgtacttttgcttcaaaacttcccggtctaaagcatcccgctggttgaccaaaaggcggtattctcgctgattgatcacgaccttttcgccggcaaccaccacctctgccagggggtggaggggcttagcttcagctgcctctgttttctgctcttttttgcccttatcttttttcagctctttctgctctttcctcaataaattcaccttcttttttcacaggatacttgcggcctaagtagtcgcctacgacttcccttaaaaactgcgggaagaggaattcattttcaccgacaatggccaaagtcgggaaaaacgggatcaggacatagtggtccaaaacggcgatccggtattcttccgccgggtccagcaattgccccttgacgaaaacgttcctggtcattgggtcatacttgatccccctgtagtagacctggccaaaaatcttccctctaaagctcatccccaccagaggataatgttccaaaaagtgccggttcttttccacttccatgaccagccgccacaagtcccggcctaaaagggtagtccggacgacatgcatcgggtgcggcagggcatgctggaggtcaaactggttgatgaggccgctcttaaatggtgtcaaaaagaggccggtgctcagcatggccaggtcggtaccggcaaagtcagcgatcgcttccagggagacgtcgatcgcggccagcttgtcatccttgaacttctctggcaagtccgccacctgccggctctgcagcatcttctgcccctcttcatataaggcggcaatttctgcttcatcgcccgcctggcttggcaaatcagctaccggcacggtagttggtttaatcgaaatgatcttgtggtcatcgccaatttccaggctgatgtcgccgacataattgccccacttgtccgtctgggtgatccaggtgcggccttccttgacccctttttccaaaagggtgtggctgtgtccgcccacgatcaggtcgatttccgggtagtgcttggccagccactggtccattctgaggcccacgtgagtcagcaaaatcaagcagtcatactggccggcaatttccggtaggacccggtccatagtttcgcccagcatcttgatatgccagtggttgggaccgtatgtcattggataagcggccgtcagacccaccaaggccaggcgggtgccctttttggtcttgatgatcttgtagtcattggcccaggccggccagctttcgtcttcttctctgagatttgacaagaggaccgggaagttggcatggtcaaaaagccgttccaaaacggcatgcgggttggaaatcccctcattgttgccgatcgtgatggcgtcatagtgaaagtcattcatcaagcggatgttggcctggccctctgtagcatcagacaagggatgggaccgatccatgaagtcgccggcgtcaaaagtcaaaacctggtcggcagccgccgtttcttgcacctgcttcaaatagcgcctgatttttggaaaatgctcaaagtgtgagtgcaagtcgttggtatgcagaatccgcaaagtttccattgtctgtcttcctcctagccgatcttgttggctttcaaaaccatttcgtaagcatccctgaccgggcctttaggcttgtcccattccacccattgcgggttctcccagtcttcttcgttcatcaaagtatgcagctggtaggccttgttaatgtactgctcgtaagtttccagcgccttggtgcgcgggatgttgatgaccagaatccgcacgctcttgattaaaccgttgttgaccgccagttccgcgaagccgttttggtcgatgttggaaatttcatagtactgactgccgtcgtttctggtaatctcttcgatcaagtcgaattgctcgtataagtgatccatttgtaccccccattatcttataaaaagattgtaacacaaagttcagccgcctttgcccgggcgaaactaaaagagcccgccgcttggcaggctctttcgaaaaatcttacttgttcaaggtactttgcttcttgatcagttcatatggcaaaacgatgtgcttgtcttccaggccttcatcgttcatcagcttggtcagcattctcatggccacggcacccaagtcgtagagcggctgcttgatcgtggtcaaggctggccggacaactgaggcgatctgggtcgcgctggccgtaatgatttcgaagtcttccggcaccttagccccgcggtccagagctgagttgaggaggccgactgaggaaacatccttggtgatgatggccccgttgatccccttcttggccagttccgggtaaaggttgtagccgtcggagtagtccttgatgttgtcaaaaatctcgcagccttccagttcattgtcagccacgaacttctcaaaggccggaatccggtggttccggttgatcggagcttccttgtcgcccacgatcaaggccagcttcttcttgccgtcgttcaaaagcaggttcaaagcttccgtgtcggccttcttgtagtcgatgttggctgaagggaattctaggttgtcggaaacagtcccggccaaaacgactggcgtgtcggtccgcttgaaggcttccgctgcttcttcagacagcttgttggacatgtaaataaccccgtcaacctgcttgttgagcaagccttgaatgacggcgtcttccttcatcaaacggttttccacgctggagatgatgatattgtacttgtacaaaacagcaatgtcgtcgatcccctttgacaattcggcaaagtacaagttggtcaggtccggcacgatcaagccgaccgttgtggtccgctttgaggccagaccctgcgctaccgcgtttggttggtagtgcagacgcttgataacttccatgacccggtcacgggtttccttgcggacattgttgttgccattgactacccgggaaaccgtggccatagaaaccttggcttcccgagcaacatcgtaaatggttacatcttgcttattcataataacagccccacctatctaaatactaattactgatttaatgataccatgagaacacttttggtgcaatcgcttacagccattttttcaacttttttcagtttttttagtgctatactgaggttaatttcattagtaaggagaattttgccatgaatttagacaaattacaaaactggctgcaggaaaacgggatggacgtagcctacgtttccagcccgactaccatcaactatttcacgagtttcattactgatcctgaagaaagaatctttaagcttttcgccttcaaggacgctgaacccttcctcttctgcccggccttgaactatgaagaagccaaggcatcagcttgggacggggacgtggtcggctacctggacagcgaagacccatggagcaagatcgctgaagaaatcaagcagcggaccaaggactaccaaaactgggctgtcgaaaagaacggcttgacggttgcccactaccaggccctgcacgctcaattcccagactccgacttctccaaggacttgtctgacttcatcgcccacatccgcctcttcaagacggaaagcgaactggtcaagctgcgcaaggccggggaagaagctgactttgccttccagatcggttttgaggccctaagaaacggggttaccgaacgggccgtagtcagccagattgaataccaattgaagctgcaaaagggcgtgatgcagaccagctttgacaccatcgtccaggccggcaagaacgcggccaacccacaccaaggcccaagtatgaacacggtgcagccaaacgaactggtactttttgacttagggaccatgcacgaaggctacgcttctgactccagccggacggtcgcttacggggaaccaactgacaagatgcgggaaatctacgaagtcaaccggactgcccagcaagcagccatcgacgcggccaagccaggcatgacggccagcgaacttgacggggtagcccgcaagatcatcactgacgccggctatggtgaatacttcattcaccgcctgggccacggaatcgggatggaagtccatgaattcccgtccatcgctaacggcaacgacgtcgttttggaagaaggcatgtgcttctccattgaaccagggatctacatcccaggctttgccggcgtccggatcgaagactgcggggtcctcaccaaggatggcttcaagccattcacccacaccagcaaggaattgaaggttctgccggttaaggaataaaaccgaaaacagaaaaaggcttctagaagtatctctcttttagaagcctttttttcgtatacaattatgccttacgaaggtcatgaatcaaatagtagacgccaattaaagtcaacagcaagaagacattctgaaaatcatgatagccttccttcatgacaaaaatggcaaaaaacgcggcaggcaggatagtcaagattattccccgatattttctcagcttcaaaacaaaaggattatctgattttctaaaggaaaaatacattaccattagataaatcagaaaaagaaccatgtttgttttcgtcatgtgatttatcctcaacttctaccgtgaaaaaaattactattcctgatctggactagtcggcgtgcttggttcttccgacttctcttccccttcttcgctcttttcagcattgtccaggtcgctggcgtcttgttcgccggcgccgttagctgaatcgtcgattacgatgtcgtcgaagtccttcaattcagaatcatcttcaatgttctttgggaaagaagccagttggtttttcaagatttctgtcccgttgtcgtacttttccttcaagtcttcaacgtttggattgctcttgatcttgtccttgacttctttaagcttgtcgtctgagatcaggctggcagctgcaaccccagcagcagccccaaagacggcccctaataaaaagctaccaaatttgctcatggttgtgttctccttttcttaatcctaacccttccgccggaaatgtctggcaaaagccgacgtaattacggaagtgatcattcccgtccgggtaaagtgggcattggaaaccttgttgatcatcttcttggatgattcgttgatgtctgagacgctttggcccaggtcagcggcggcctgaacgaccggctgcaaagtttccatcttgccattgacgtcttgcaaaagcgcgtcggtcttttccaagagtccgccggtctgcttcatcaagtcatccatgtcttcagttagcttggccatagattcattggtcaattggactgtcttctcagcctctttcaaagtcttcgaaacattaagcaacacgggaatcgtgaacaggaccagtaccaaaaaggcaatggccgcgatcaaaccggctaaagcgccaaatgaaattgtcatagcttacttcccctttcctttctaaaaagtctagcatgaaaacgatttagacacaatcaaaagattttccgaagtttttacccgcttttctgttatcctttaagcatagctgaaaggagcattttttcaatgaaaaatcttgatttcaaaattgccggcatctctgtcgacgtcgacaagctttttaccagcggcgtgaccatcctctggaagctgctgatttcgaccctggtcttctacctggtcagccattttggtcggaaaattatcaagcgctacctggacaagcacaacgacaagcttgtccactccaaaaggtcccagaccatctcagccttggtgaacagcctcttccactacaccatggtcttcttctatgtctactccatcttaaccatcctgggcatccccgtcggcaccttgattgccagtgccgggatcttctctttggccatcggccttggggcccagggcttcatgagcgacctggtcaacggcttctttatcctcagtgaaggccagtacgatgtcggcgacaatgtcgagatcgggactgaagccgggaccgtgacccagctgggcctcagaaccacccagatcgtcaccactgacggcaccttgatcttcatccccaaccggcagatttccatcgtcagaaacctgacccacggcgggattggccttaacttggacctgaacctggatgcaaataccgacttaaagcagctggccagcctgcttgaccaggctgatgaagatctgcttgcctggcatgacaaactggtcagcggaccaacccagatcggggtcgtcggccagcaggggcagacaatcacctaccgggtccacttccaagtcaagccgggctttgaaggcaaaatccgccaggcctactggcagacctacctgcaatacttacgggtcaaccaggtcaaatttggccaggaaccggttatcatcaacaacagtaaaaaagcttgatctaaaaatgctgagccgcggcccagcatttttctttgatcttagttgaattgagcgagccaagctggcagttcttcgatcaaagccttgactgccttgccccggtgggagacttcgttcttttcttcagtggtcatttcggcgaaagtcttgcccttgcttggtacgtagaagagcgggtcgtagccgaagccgtccttgccgcgcggaactgccagaacttcaccttcgcaggtgccagttacaaccaagtccttgtcttcgtggcctggcatggtcaaaacaagggtagtgacaaacttggcttggcgctcgtcttgcggaaccccgcccaaggctgccaaaagcttagcgttgtttctggcatcgttgtgggcctcaccgccgtaacgggctgagtgtacgccaggagcgccgttcagtttagcaacctgcaagcctgagtcgtcagccagagttggcagcttgctatagtctgccaaagcgtgtgccttcagcttagcattagcttcaaaagtcgtccccttttcgttaacgtatggcgggttgtccaaatctgcatttgatttaagctcaatgtccagaccagcctgcttgaaagcttcttgcacttccttaaccttgttttgattatctgtagcaaacaatagtacttgagtcatatggtactcctatcatttcaaaatataaaaaatctctctactgaaattttaccacttattcaagccttttcgaacttacaaatagagtaatttctgctattttcaccgctttttcagccggcaggaacttttttctttttttcggcgatttcctagcctttttctaaaacttgttaaataatttcaccatcctgtaatatttaaggtagaataaaaacagagaataaggatgaggattatgtcagaacacaacgaccacgtatactttgttaatcaactataccgcgacttcttgttgccaaccattttaggcggggacacgccggcgattctctactgggccggcaagcggatcacccgcaaatatgccttgagtgaatttgaagacttaagcgaattcttcaagatggctgaattcggcaatttaaccattgtcaaggagcgccgctcctcagtcatcttctccttgagcgggcagccaatcagcgaccgcctggccgccggcagccgggaattctccctggaaagcggaatgatcgccgaagcggttgaacagaaccggggccggtcagctgaagccgaaatcgccatcgacgacaagaaagagaccgttcagatcaccgccttcttctaacaagcaaattcagcaagataaagaaaatacaaacgaaaaagaccagagccaatggctctggtcttttaacatgcttatttcttagtcagcgtactggtcaagaatttcgttcagcttttcctttggagtgtagccagtcaagcggtcaaccacttgcccgtccttcttgatcaagagggttgggatggccatgatgccaaagttcttggccgtttccgggttgtcgtcaacgtccatcttggtgaagtgcacgtcttgtctttcttcagccaaagcttcgatgactggtgactgcatccggcaaggaccgcaccaggttgcccaaaagtcaaccagaactaagccatccttggtttcttcttcaaaagttgcgtcagtaattgcatctaccatgtaaatacctcaaattcgttaatctgaaaaacattattatctacttactgctttaagtttactagacttacttactttttgcaagtagattgcctactttaaggtcacgatcgtggccccggtcccgccttcattggctggcgcgtagctgtaggtcttgacatgcttgttgcgcttgagatactgctggaccccctgccggatggccccggtcccgatcccgtggatgatcgtgaccgtgctaaggccggacaaaaggatggtgtcaaagtaccggtccaaattgaccatggcctcttcatagcgctgccctctaagatccagggaactgcgggcccggctggaccgggaggcagaagtggcccgtctttgggcctgctgcttctgcccggtggccagcttgtcgatgtccctgtcggtcaccttgagcttgatccggcccaaggaaacctcatagtcatgctcacccagctgcttggtcaccgtcccggtctgcccgtaagacaggaccttgaccttgtcacccacctggacgtggtggcgtttcttttccttttgcaggaccttgtttttggccaggttggcctcctgcttggccagctggttgaattcgcccttggcgtccatcagctggttggtcttgatctgcatcccttccttgcgggcttcttccagctcggcgatgatcttgtcggccttcttgcgcttcttggccacgatttcattggcccggtccaaggcaaagtccagctgcttttggacccgctggttgtagatatccagggcatcctgcagcttcttttccagctgcttggcccggtccaggctggtctgcagcttctgcttgttttccgtggccagtttggtctgcttgtttaattcgtcgatcatgtggttgatgtcagaatcatcgctgctcatcagcttctcagccccgaccaccacgtcttcccgcatgcccagccggcgggcaatggcaaaggcattactgtgaccagggatccccatctgcaggcggtaggtcggcgacagggtcttgatgtcaaattccatggaggcgttggtggtccgctctctgttatagccatagagcttgagttccgggtagtgggtcgtgacgatgatcttggcccccttctttctgaagaagtccaaaattgagatggccaggctggccccttcttccgggtcggtcccggccccgatttcgtcgatcaggaccaggctttggtcgctgacccgcttcatgatcgccacgatatcgttgatatgggatgaaaaagtactcagcgactgctcgattgactgttcgtccccaatatcagcaaaaatctggtcaaaaaccgccacgctggagccctcattagccggaataaagagaccggactgggccatcagctggagcaagcctgccgtcttcaaagtgatcgttttaccaccagtgttgggcccggtgatcaaaatcgtgtcaaagtcctggcctaaaacaatgtcattggccacgaccttgtctggatcaatcaaggggtgacgggcccccagaagcttaaaggactggtcagcagacaaagtcggctggctggcccgcatctgcttggccagcttggccttggcctggaggaagtccaattcgcttaaagccgcggccacccgcttgatagcctccatttcttctctggcgtccagagacagttcatgcagaacccggtggatttcctgccgctcttcagccagcaagttttgcaggcggttgtttaaaggcaggatggcagccggttcaacaaacaaggtctggccagaggcactttggtcgtggaccaccccgccgaacttgtagcggtattcctgcttgaccgggataacgtagcggtcgtcccggatggtcacgatctgctcagacaggtactggccgttcttgcccctggtgtaggcggtcatcttttccttgatttccgcttccgtggccaggcggccgtggcgcaggcgggccaggtcagctgaagcggtatccaggacttccccgtcataagtcagcgaagtccgcaggcgccggtaaaggtcatccggcaattccaagtcctccagcaaagtttcaatcgccgccaggtccaaggtctcattttcttccgcgtcttctacaaagcggctgctttcctgggccagggtgaaaatcagcaggatattgcctaattccagggcgttcaagtcggccttgaccttcaaacgcttgaggctgggcgcaacatcttgaaagtcggtcaaaggcagctggcccttgatccggtccaagtcaaccagggccttggtttcgcttaaggcccggctgaccgtctcccggtcgctggcgggctggaggttcaaggccttgctcttggccggagccgttaccgcttgttcagccaggcggctgctaatttcctggtattccagaatgtctaaaattttatgattcatcatctcagtaattttatctaaaaaattttcctaacaaaaaaagcgggctaagcacccgcttctttcttattctgcagaatcgtcaccgctcaaacggtcatcttcaaggaaggtgttgagcaccccttgaaccatgtcccattcagcgtcagaagtgatttcgtgcaggtcgctgctggttacgtcgccatcttcatcggcgtcgtagctgaaagcctggacttcaatttcgtcgtcatcttctacagctgccgggtaaagcaggatgtaggacttgtcattgtcgtcagaatggaaagtaaacaatacttcaaataattcttcgttgccgtcttcatcgatcaaggtcaattgtctgtcttgatcttcggcgctaacttcaaaagccatagttattcctttcgctgtaaatccaaatagttctgcaaaatcaacacagctgccatttggtcaacgacctccttgcgctgccggcgatcatgcattcccgcctcttcaaccaaaatcctctctgaggccacggtcgtcaagcgttcatcgtcatagtagactggtaagccgaacttctgctccaggcgctcgcccatggccttgctccggctgaccgaccgaccggccgttccgtccatgttcttaggcaggcccagaacaaagccgtccgcttcatattcgcggaccagcttctttaaagaccgcatgccgaaattgtgccggtcttcatcaatcgggatcgtcatcacggcctgggcggtgatgcccaagggatcactgacggccaccccgatggtcttggagccgacgtccaaacccagcaggcgcattacttgtccttgcccaggtagctcttgaccagttcttcgatgatttcatcgcgttcgtgcttcaagatcaggtttcgggcgtcgttgtggcgtgggatgtacgctgggtcgcctgaaagcaggtaacccacgatttggttgatcgggctgtagcccttttcttccagggccttgtatacgtcttccagagtgtcgcggatgttctttcccttattctggttaaaatcaaagtgcatcgtcttatcaagcgaactcattgttattccccctcttttgtctattctacttaaaaattttccttaactcaattattttagcttaattagtccagctggctgactgcagcatcgatggcatcctgcaggccttctggcttcttgccgccggcttgggccatgtttggccggccgccgccgccaccgccaaagatagcagccacgctcttgatcaagtcgccggccttcagccccttgtccagggccttttggcccaggctgatcagcatgttggccttgtcttcagacttagcgcccaggatcaagacgtcagacttgccttcgctcttccattggtcagcgatttcccgcaagtcgttcatccccttgacgtcagcgatcgtggcgataaccgtcaagtcaccaaccgtcttgacctggtcaaagattttgccggccttggaagcgttgatttgggcttcgtaagcggcgttttgcttttcagcgcttctgagttcttcttgcaggctggcaatcttgctttggatgccgtcagccttagtggccttaacttgagcctggatctggtccaggatgtctgagcggctagctaagtattcgtaagccagcttggaagttacggcttcaattcttctgaccccggcaccgatggcttgttcagaaataatcttgaagacaccgatttgggaggtgttgtcacagtgagtacccccgcagaattcgatggagaagtcatccatttgcacgactctgaccttgtcagtgtacttgccgtcaaacagagccaaggcgcccatcttcttaccggtttccggatcagtttccgtggtcttgacttggattgcttcccagatcttttcgttgacgatcttttcaacgttcttcaattctcttggcgtgattgggtcaagggaagtgaagtcgaatctcaagtagtctggttcaacaactgacccggcctggtgggtgtgttcacccaaaacttgccgcaaggcagcgtgcaagaggtgggtagcagagtgggagtggcggaggccttcccggcgcgcccggtcaatcttcagcttgtaggtctgcccctttacaagtggcaggaccacgtcgacaaagtgcaggttctggtcgttaggcgcgtgctgaacgtcaactacccgggcaactaagttgccttcctggtcgtagatgtcaccgtggtcagccacctggccgccccgttcagcgtaaaatggcgtcttgtcgaagatcaaggttgccttttcaccgtcagccttgtccaccagcttgtcgtcaacgatgatgtcaaccagctggctttcttcttcatagaccccgtattcaaagacgctcttgtccttgattttcatcaaggtttcgtcttgtgaacccatggattgcaggttgccccgggccttgcgggcgcgttccttctgcgcttccatttcggcgtcaaagccatccttgtcaaccttcaagcccttgtcttcagcagcttcaaccgtcaattcgtatgggaagccgtaagtgtcgaacatcttgaaggcgtccttgccggagatggtcttgtcttcgctgttttcggccttgtcgatcaagtcgtccagcaaagtcaagccggcttccaaagttgcaccgaagcggtcttcttcgttcttaacgaccttgctgatgaattcagcctggtcgctgacttctgggtagtggctcttcatgatgtcgccgactactggcaccagcttgtaaagaaaggcgccgtcgatgcccagcttgcggccgttcaaggctgcccgccgcaaaagccggcgcaaaacgtagccgcggccagtgttgcctggcagggccccgtcaccaatggcaaaggagatagcccggatgtggtcagcgataatcttgaaggaaatgtcgtcagccttgtttgcgccgtacttcttgcccgcgctcatttcttcagtagcgtggatgattggcaggaagaggtcggtttcaaagttggtcggggcatcctgcaggatagacaggacacgttccagacccatcccggtatcgatgttcttgtgtggctgttcaacgtagctgccgtctggcaggtggttgaattctgagaagacgatgttccagatttccaggtaacgggcgttttccccgcctgggtagttttccgggtcgtcttctggcacgtcattgttttcctggccacggtcgtagaagatttctgagtcaggaccacatgggccttcaccgatgtcccagaagttgtcttccaattgcacgatgtggctttccggcaggccgacgacttcatgccagatccggtgagcttcagtatccttagggtaaacagttacgtaaagcttgtccttgtccaggtccagccagtcaggactggtcaaaaattcccaggcccaaggaatcgcttcttccttgaagtagtcaccaactgagaagttgcccagcatttcaaacaaggtttggtggcgggcagtcttaccgacgttttcaatgtcgttggttctgattgacttttgtgagctggtaatccggcggttctttggcacgactgagccgtcgaagtacttcttcatggttgccaccccggagttgatccagagcaaagtcgggtcatcctttggaatcaggctggctgactgcatgaccatgtggccgtgttcagcaaaaaagtcgaggaacatttgccgaaattctgaactgtttaactttttcatcaaaatctcctaaaaatacaaaaaacaagcatgtttgccttcttcaaggacgctctagacgcggtaccaccttgattgcaacaatgcttgttacctcttgattatcttaaattaatcactttaaggagcatttcctgcctggtgataaacccttcccagctgccggttctctctttgaatcgcctggacagaaaacatatcttaagcgtccctaattttactacttagagaaaaaatgtcaacgtttttgctcgcacttgcgcttacggaggcgcttttggtggcgcatttcgtggcgggcttcaatcttccgcttcttgcggttgtcttcttgaatcgcctgcttgatcttcttcttgtagccaggcttgcgcttggacttgaccttcttgaccacgcccttcatgtgggggtcaagctggcggtttgcagccgtccggttgtcccggcggcggtagtgagtccgcggagcgagtgccccgtccttgatttcaacgaagtcaaagtgaacgcccatgtgctccaaggcccccacccggttcatctcttcttccctgaccaaagttacggcgtggcccggcaggccgttccggccagtccggccgatccggtggataatgaattccaggtccttgggaatctcatagttgatcaccaggctgacgccaggcaggtcgatcccccgggcagccaggtcgctggcgacgacatactggtactggccggcccggacttcccgcagggtccgctttctttcccgttcggtaatgccgccgtggatcttggccaccttaagcccttgcttagtcaggtaatcagccagttcgtcaaccatctgcttggtgttggcgaaaaccagggccaggtaaggctggcccatggtcaaaagcttgtagacgatcttctttctgtccttgctgccgatgtccaagaggtcgtttttgatggttggggcaataactgccggattgtcgatcacgatttcttccggcttggccatgtacttgcgtaaaaagttggtcagcttgaccggaatcgtggctgaaaaggcggacatgaccacgtcctttggcaggcgggcggcaatcttgtccacatcggccaggaagcccaagtccagggtcatgtcggcttcgtcgatgacaaagttcttgacctggtccaaaagcaggatcttcttgtcagcaaagtccaaaagccggcccggcgtagcgataaccaactggggcttgttctgttcaaatctggcgatctgccggtcccggtcgctgcccccggccaggtgggcaatggcgatgtttaagccggaattatcccgcagctggcgggccacccggtagagctggtcagccagttcccggctgggagccgtgacgatggcctggacatagcgggcgtcttcatcaatggcgtttaaaatcgggatcaagtaggcgtgggtcttcccgctccccgtagccgcctggacgatcacgctttcgcctttcagcatggccgggattactttttcctgcaccggagtcggtttagtaaagccgatcttggccaggccctggcggatttcgcttcttaagcgggtatcagtaaaaatgttattcatggtcttccttgtatttcttggttacttcaactaattcctggaaaatctggtcgatttccacctggtcatgggccgttgccccagaggctaattcatggccgcccccgtcgtgggcttcagccagcttgtggatgtgcggaccctttgaccggtagtggacccggtaagtaccgtcttctttttccacgatgaccagccaggtcagaatccccttgatccggcccggggttgaaacagtgactgaagcttgcggctgggtaacgcccagggcctttaagtcagcctggctaattacggcgatagcgaccaggccgctttcgtccagctgcattttctccagggccaggctctgcagcttggcctgctggaaggtaacttcactttcgtttctggcaatttgggagatgtcgatccccgtctccatcaagcgggatactacttcgaaggtgtgggcgctggtcgcgtcgtacatgaagcggccagtgtcaccgataataccggcgtagagggccagggcaatttcctgggtaaggggcaggccttctgcttcgataaagtcagcgatgatttcacaggtagcagcggcttttgagtcaacgtaagacatgtcagcatatgggtcaacgtccgggtggtggtcaatcttgatcaggtagtcccccagccggtagcgctggtcagagatccgcggcgtgttggccgtgtcagtcgtgatcaccagggcgccttggtagtcttcatccttgacttcgtccatggtgttgatccagtccaggttaccgacgtcattttccccggtgcagagaatcttcttgtccgggaactgcaggcgcaggctcttggctaaagcggcctgggagccgatagcgtccgggtcgggattggtgtgccggtggaggatgatggttggatattgcttaatcttactgaatatttcgtcaaaagtgttcatcgcggggtcctttctgccttatgagttcaaaactttattttagcaaaaaatcagccttttagctattcatctgcaaaaagactgatttcctggtaatgtttttcttcaagttcgccggctgacaggcccaagaggcggatgccttcaaccaggaattccggttcccgggccaggagctccttggccagctggtaaaagacttccgggtcactggtcggctggatctgctgccggcgggtgatagttttaaaattgcggtcgcggacctttaaaacgaccacccgggctaaaagatttctctcctttagttcagccgccaccgtctggctgaagtcctttaagtaggcatcagcccggtccgggtcatagattaccggttcaaaagtccgctccttgcccagggacttgcgctgcctggaggcttggacggggcttaagtcaatgccataagcatgcagggccatgtagtagccggacttcttatagtcttttaaaaggcggctgagcccgtaatttctgatgtcgcggccggtcaaaactccggcttcctttagccgctcctgggtcttcttgccgatgccggggaatctcttgatctcctgcctgtctaaaaagtcctgggcccggtccggggcaagataagtgcggccaaaaggcttggcgtattctgaccccatcttggccaaaaacttgttgtagctgaccccaaaagatgaggtcaaatgcagctggcggaagatctgctcttgcaaatagctggccagctccagggcgcttttgccggggatcttgctccgggtcacgtccatatatgcttcgtccagcgccacgctttcgatctggtcggtcagttcgtgcattaagccgtgcacttgcccggaaacccggtggtatttcacgaaatcgggttcaacgaaaaccagttcttcagctggaatcagcttgacggcttgggcggccgccatggctgacccgaccccgtactttctggcccggtagttggcggtggcgatcacgccatggccgccagttttccgggggtcctgggcaatcacgactgccttattcgccaattccggccggtcccgcatttcaactgaagcatagaaagcgtccatgtccaggtggatgatccggcgggaaaaatcgttcctgggcaaaaggtcaatatcggccattacttgtagatccagccatcctcaggatccgcgaagatcttgctggtatccggccccatgccgtaaggacggtacttgaccggcttttcgccggcagcgttttgcttttgccaggcagcttcaaccgcgtccacgaatctccaatactgcttcagttcttcccacttggtaaagttggtggagtcgttgacaaagacgtcgtggatcaaacgttcatagccgtctggcacctcagcttgttcatcttcgctgtagcggtagcagaatctttcaagacggaggtcaccgccagcaacaatcttgccgtttaagcggaagtagacctggttgaccgggtcaatctcaatagtcagtacgttggtcttagccttatcgccatacaggccagcttcatccttaaagaccacgtccacccgggtcttcttttcccgcatttccttgccagttcggaagtaaaccggcacgccagccaaaggccccttgctaaattccaaacggccagccacgtaagtttccgtcttggagtcttccgccacgttcggctctttgacatattcaaaagtggtttccgtccccagatactggccacggatgatgttttcgctgacggctttttcatctgggataactaaagatgccaaaaggtcttctttagccgcgtggatggccttgtcagacaagtcttttggctccggcatggccaaaagggtgatgatctgcatgatgtggttctgaaccatgtcccgcagggcaccggagttgttatagtagccgccccgggcttcaacgcccagccgttcagccagggtaacctggacatttttaaccgcgtcggcgttccaaatccgcttaaacaaggagttgccaaagcgcagaggcaggatattctgcaccatttccttacccaggtagtggtcgatccggaagacctggtcttcagcaaaagaattgcggatctgctggttcaagacttccgcactggccaggtcagtcccgaatggcttctcaaccaccaggcggttgaagccggtcccggtcaaatgctggtcggcaatgtgttcggcaatcgtcccaaagaagcttggggccatggccatgtagaaaatgcggttgccgccgcattcatagcgctcatccagttcctgggccaattgcttcaaagttacgtagtgttcaacgttggttacgtcgtgggactggtagtaaaagtggctggcaaattccgtcagctgcgcttcgtcgacctcttcccagctttcatgaacagcttgggccacctgctcgcgcaggtattcatgcgaccatggccgccgggcagtgccgataacggcaaaattgtcgtgaatgacattccggcggtagagattgaagagggccggatagatcttgcggtgggccaggtcgccgctgccgccgaaaaggatcattactgttggaatattgttcattatagtacctcaaaaaaatcaactactaactattttagcaatttatcggcgcaggcaaagcaaaaacgtccccgaaggaacgttttgttcgtttattcttgactgtctttgtcttctgccttgtcttctgcttcttcagtcttggctgcttcagccttttcttctgctggcttggctgcttcagcttcacttgcgtcagcttgcttcaaaacagttctgactgccagtctggagaaggttaggtaaatgccgtcagcgtccaagacgatagtcttgtcagcatcgttgattgagtcgatcttgccgcgcaggccgtcgaccatttccacgctgtcgcccttcttgagctgattcatcatttcctggcgctgctgttgctgcttcttttgcggcttgatcatcgtaaagtaagtaaaaccaaacaaaacggccagcataaccagcatgaagatgctgctgccagcaccgctgttggctgcggctaatgcaaaagtattcaaattatccacctcataaaatttatttgccgctttttggcagatgccaaaaggctttaacgaacattatactgtaaaccagatttttttgctattcttcctcacccggcaggggcaaattcagctgctggtaggccttctgggtcactacccgcccccttggggtcatgacgataaagccgttttgcaaaagatatggctcatacagggactcgatcgtctcccggtcttccccgatattggaagccagggtccggatcccgaccgggccgcccccatagcttaagatcatggttctcagcagcttgcggtcagtctggtctaagccggcactgtcgacttgcagctgctttaaggccatggccgttgtttccagggagatttctttttctcccttgacttccgcaaagtcccgcacccgctttaaaaggcggttggccacccggggcgttccccgggaccggcgggccagttcatgggcagcttgcggggaaatcttggtgtggaagacctcgcttgagcggaggatgattttttccaagtcttcgacctggtagtactgcatgtgctcaacgatcccgaagcggtcgcgcagaggcgccgacaactgcccggccagggtggttgccccgatcaaggtaaaaggcggcagaggcaagtggatggcatgagtcgtctgcccttccccaaccacgatatcgatgtaaaagtcttccatggctgaatagaggacttcttcaaccggcttggccaggcggtggatttcgtcgataaacaagacatcccccggctcaaggtcagttaagagagccaccaggtccccggcccgctcgatggccggaccgctggtgctttttaagctgacccccgattcattggcaataacaaaggccagggtagttttacctaaacctggcgggccataaagaaggacatggtccagggcctcgtcacgctggcgggcagcctggatgtagacttccatgtcctttttgacatgcccttgcccgatatactggctgagcagctggggccgtaaggacagttccaccgcttcctcgccttcggcggcttcctggctggtcaaatgttcttccgtcatttccctttacccccttatttcttaagcaaaaagcccagcccctgcttgatgtattcgtcagcggacatttccggcagtttcttcagtttcggcttgatccggtcaacttccttttgactgtagcccaaagccccaagggccaggagggcgtcttccagggctgggaaaacagacttaaccggttcatcttcggtaaagaggttttccgccacatagttgcccatcttcccccgcaagtccaggacgatctgggatgccgtcttcttgccgatccccgggaaacgggtcaagtaggaaacttcgccgctctcaatggcggaagccagggctccgttgtcttcagcggccatgatggccagggcagacttaggaccgatcccggaaacttcattaagcttgttgaagaggaccttgtcttgctggctcttgaagccgtagagggtcatcccgttttcccggacgacctgttcaacgtagatccgggccttgtccccatctttataggcataaggggtcggggtcaggatccggtagccgatcccagccacttcaatcacgacataggccggattaaccacggtaatggtgccctcaaaatactcgtacatctagttttgtcactttcctttcttaaaaagcttgcttaaatcattctggctcaagcggacgacggcgacctggccgctggcatcccggtaagggtcgctggccgtctgcaaacggagcagcagatcggcggcttcagcgccggttaaattgacccggcgggaaacattgctttccgccgccttagccgccaccagcttcaagagactttttccatcgttttcccggctggacaagagctggtccaagagctccctgacctgcacggtgacttcccctttcagccaggttgggtaagagtgcatcaagagggtgttctggccaaagtcttccatctccaggcccagctggcgcaaaaggggcagctggtcttttaatttctggtagtcatagacgctgaagtcaaagaccaaaggctcaagcaagccttgctggtagttctcgtctttttccaggctggctaaaatctggtcgtactccagccgtcttctggccgccacctggtcaagcaggtaaaggtcgcccccgtgttcagccaggagatatccccccatctggcccaaaaggtgcagggccggcaggtgttgccttagcagctggtcagcctttgacgtgaccgggctagcggcttcctctctgcccgcaaaaggcggcagggccgtctgttccttgacatgctggtcccagctcttggttaagacatattggtcatcttctctgacctggtttaagtccacgtattccggagcagaagttttttcttctttctcttcttgtttattttctttcttctctgctgtttcttttgtttcttttgactctgtttcttttttattagttatatctgttttgccttccggctcagccacctgggagacttccagctggaagtcatctggccggcgggtgtcgaccacgtttggttttaagttgaattccaattggtccaactgggtcttgtctttaaaaggagtcagttgaaaaagcgggctggcctcgtcctcatccattaaagcctcagtcacggcactggtgatcaagcggctgagctctttttccttggacaggcggacttcttccttagtcgggtggacgttgacgtcgactaagaggggatcagcctcaatcgccaagaccgcgatcgggtacttgccccccaatttgttgccgtagccgtccaaaagggcactggagagctggtagttcttgatgtagcggccattgagcaaaatcgagataaagttgcgggatgaccgggtcaagtttgcttctgacaccaggccatagagggtaaagtccgggtcctcattttccaccgtcagcattttttcggcgactttgcggccataaatattggctacgtcctgctttaagttgccgttaccgggcgttctgagcaagactttcccgtcgctggccaaagtcaggctgatttccgggtgccccagggcaatccggttgacaatatccacaatcttcaagagttcagtcttcgggctcttcagatacttcagccgggccggagtattgtaaaaaatatccccgaccgtgatcttggttcccttagcgctgccggcatcttcctggaactttttcaccccgccggcaaaagctgcccgggtggccgtctgcccgtcagttgaagtcaaaatttccacatgggctacggctgcgatggaagctagggcttcccctctaaagcccaaggtcgcgatattgaacaagtcatgctcatcttgaatcttgctggtcgcgtgccgcataaaagccaggtcaacctggtctggggcaatcccgctgccattgtcttggacagaaatctgctttaagcccgaatgctggacttcaaccctgatccggctggcctgggcatcgatcgcgttttcgaccagttccttgaccacgctggccggccgctcaataacttccccggccgcgatctggttggtcaggttttctgaaagttcatgaattttcgccattattcttccttcaaggcctgctgccagtcagctaccagctgcatgacttccagcggcgtcttttcattcaagttgacctggctgatctcgtctaacagttcctcctgctccgccttgagcgggttctcttccactacttccaccggactgaagaggtccagctgctggcggcttgggttgatctcccgggccccttctgcttccaggcgcttgagcatgctggaggcttctcttaaaacggcccgcggtaggccagccaatttggccacgtggatcccgtaagactggtcggctggtcctggcaaaatcttgtgcaggaagatcagctggccgttttcttccgttgctccgacgtggatgttctttaagtgcggcaaggtttcgtccagttcagtcagttcatggtagtgggtggcaaaaagggtcttggcgccaaccttgtcatgcaggtacttgataatcgccccggccaaggccatcccgtcgtaagtggccgtcccccggccgatttcgtcaaacaggaccaaagaccggctggaagcgtgctggagggcctcattggcttcgctcatttccaccatgaaggtggacttgccggagtagaggtcgtcagcggccccgatccgggtgaagacctggtcaaaaactggcagcttggcgctgtctgccgggacgaaggagccgatctgggccatgatggcgattaaggccagctgcctcatgtaagtgctcttaccagacatgtttggccccgtgatgaggtagatgctggtgtcttcatccatgaccaggtcgttagggatataggagccagctggtaaaactgcctcaacaaccgggtggcggccgttcttaacggcgatttcgtttttgctggaaaaacttggccggcagtaatttttctcttcagcatcctgggcaaaggccacgaagacgtccagggccgccaattgccggcccagttcctgcaaggccgggatatgggccttgacagcctctctcagctggctgaagagctcgtattccaggtcagttgaccggctctcagcttccaggatcaagttttcgtgttcctttaattccggggtaatgtagcgctcagcattggtcagggtctgctttctggtgtagcggtcctggggcactttagcgacattccccttgctgacttggatgaagtagccaaagacccggttgtagccgatcttcagattgtcgatcccggttctctgccgctcttccatttccatctgggccagccactttttcccgccattcatggcttctctgtacttgtccaggtcctcgctgaccccggcccggataatgccgccgtctttagccgaaatcggcggctggtcaactaagcagttagtgatgctctcagcaagttcactttgcgggtcgatcccctgcccgtatttttccaggtctggattgcccgattcggccagggcctggatgatcggcttggtcgcctccaggcttttcgccagttgcaagagctcacgggggttgacattgccaaaagccacccggccgctcaaccgttccaggtcatagactcccttcaaggagtcaacgatattttccctggtaaagtagtcgtccaacagggcttgcaccatctgctggcgctgcttaatccggtctaaagacaagagcgggcggctcagccactgctttaaaagccgcccccccatagccgtggtggtcttgtccaaaacccagaataaagagccctgcttcctgccagtcgtggctgactgggtcagttccagattccgctggacagtgttggccatctgtaaatactggccgatttcgaaactttccgccacttgcaggtgagccaggctccgcttctgcgtggccaaaaggtaaacgaccagctggcggacggcggctttttccatagagtcagtcagtttctgctggacataggaaatttccgcgtgctcgccttccagttctgccggttcagacacggtgatgtttgccttttgcagtctgtcccggtcgctggcgctaagcttgccagcaagaacgacttcccgggttctcaaagacaggagctcgttgaccacctcggagtagtgcttgacgtgggtggcaaaaatctccccggtcgacaggtcgctgtaagccaggccatagccgccggccttttcaaccacgctggtcaggtagttgctttcctggctgtcgtctggcccctgggccatcttggtgccgggagtaaccagctggatgatcccccgcttgaccatccccttggccttcttcgggtcttccaattgctcgcagatggccaccttgtagcctttttccactaaagtgttgacataagaatcaaccgccatgtggggcaccccggccatgggaatcgggttttctgacttatttgaccggtgagtcagggtcaactctaaaatctgtgatcccttgatggcatcgtcttcatagagttcgtaaaaatctcccacccggtagaagagaaaggcatccgggtactggtctttaatctggtaatattgctccatcattggagtcgtggcttttcttggcataaaaactccctcgcttatcgtatgctttcaattatacagcatttcgccggcctgcttgccttgtctgcacgcaaaaagagcccagccaaagctggacccttcttacagtaattcttgtgtgtgttaaacttcagtattttacatcatgcctggttgagctggagcagcttccggcttgtcttccggaatttctgccacaactgcttcagtggtcagcaagaggccggcgattgaagcggcattttgcagggctgaccgggtcaccttggttgggtcgatgatcccttcgtcaatcatgttgacatacttgtcttcagcagcgttgtagccgacttccgggtcaaccttgcgcaggtggtcaacaacgactgagccttcttggccggcgttttcagcgatttggcgaactggggcagtcaaggcgcgggccacgatgttgatcccggtttgttcgtcagcagtgtcacccttggttgccttaacagcttcttcaacgttaaccaaagcagtaccaccaccagctacgtagccttcgtcaacagcggcacgggtagcgttcaaggcgtcttctacccggtagcggcgttccttgagttcagtttcagtagcagcaccgacgtggattacggctacgccgccagtcagctttgccagacgttcttgcagcttcttcttgtcgaagtcagaagaagtgtcttcgatttgctttctgatggtgtcaacccgttcttggatggcttccttagcgccagagccgtcaacgatagtagttgagtccttggtgatagttacccggcgggcttgacccaattggctgagctgggtgtccttgagttccaggcccaggtcttcagaaattaccgtaccgccagtcaaagcagcgatgtcagccagttgttccttgcggcggtcaccaaagccaggagccttaacagcaacaacgttgaaggtaccgcggatcttgttcaaaacaagagttggcaaagcttcgccagtcacgtcatcagcgatgatcaggagtgagcggccttgttgcacgatttcctgcaacattggcaagatgtcctggatgttggaaatcttcttgtcagtgatcaagatgtatgggttttccaagtcagcttccatcttgtcgttgtccgttaccatgtattgggacaggtagccgcggtcgaattgcatcccttcaaccacgctcagttcagtttcgatcccgcgggagtcttcaatggtgataacaccgtcattgccgaccttttccatggcttcagcgatcaagtcgccgatttcctttgaagcacttgagattgaagcaacttgggcaatttggtcccggctggaaacttcgtggctgttcttgtgcaattggtcaacggctgcttgggtggccttttcaatcccgcggcgaatgccaactgggttagccccggcaaccacgttcttcatcccttcttgcacgatggcttgggtcaaaacagtggccgtggtcgtaccgtcaccagcgatgtcgttggtctttgaagcagcttcagcaaccagcttggcccctatgttttcgtagtggtcttccagttcaattgccttggcgatggtcacgccgtcgttggtaatcgttggggcgccgtagctttgttccaaaacaacgtttctgcccttaggccccaaggtcgtcttgaccgtgttggccagcttgttaaccccgtttaaaagtgaacgtcttgcgtcttctgaaaacttgatgtcttttgccattttttaattcaccctccttaagttacttaacgattgccaaaatgtctttttcatgaaggactaagtattccttgccttcgtacttgaccttggtgccagaatacttatcgtataaaacttcatcgccctcttggacggtcatagggagcttgctgccatctttcgcgtacaggccgccgcctacggcaacaaccttgccttggattggcttttccttagcgttggaagcaagtacgatgccaccaacggtttgttcttcagcttctttaacttcaacgatcacgcgatctccaattggttgtaacacgttattccctcctgaaattaattgtctttagaaattctttagcactcatcttgatcaagtgctaacttacaactatgataataatccctttttcccaaaaaggcaagagaaaaatagcactttttagtcgagagtgctaaaaagtgctgttttccttatttattcgtgttgttcatggcctttttccgctcttccagctgcttcttgatcatttcgtcagagtcaaggaagtagatcaaggtctgcaattcggtagccaggtcgacgttttggatccggaccccatttggggcggataggcggatcggggtaaagttcatgatccccttgatcccggcttcgatcatttcatcagccgtcttctgggccgtcgcctggggaacggtcaagatagcgatctggatctgctggtcagcgatctgctgcttcatttcatccattgagtataccgggaccccctgggtgatcttgccggtgatttccgggttgatgtcgaaggcgcaggaaattctgatattgttgctgcgcttgaagttgtagttcaaaagggcgtgacccaggttgccgaccccgaccagggcaacattggtcaaagtgtcctggttgaggatcttcttaaagaagctgagcaggttcttgacgtcgtagccgtagccccgcttgcccagggcaccgaagtaagaaaagtcccggcggattgaagcgctgtcgacttggacggcttccgccagttcagttgaagaaaccttgtctttgccttcatcattcaaaagcagcaagtagcggtaatatagcggcaatcttttggcagtagccttgggaattctaaatttgttgttcataaaaagatgcctccagtttttattttgtgaatgtgaatctctaatcaatcatctactatgatacccatttttaccagtccttggcaagtcgtattttcacaatatttgccgtaaaatcctttttattgaactttttcacaaattgattaagagatcagcgcttccggcattttctttaaagaaagaggaaaaataaaaggagggaaaaaagaagcggaaaagaaagggaaaatcagcccggctggcggcaggcaagccttttgcatggtacaatgtttcaaggtgaaaaaatatgataatagcacaaggacacaatttggagcaacgcttcggggctgctcctatattcagcaaggtaaacttttcaattgagaacaatgcccggatcggcctggtcgggccaaacggggccgggaaaacgacccttttaaagatcatgaccggccgccaggaagccagccagggggaatttaccgtcaacaaggggatcgagcttggctacatcgcccaggagcacgactttgacgaagagaagtcgatctgggaagagatgctgacggtcttccagcccttgatagaccagggccagcagctggagaagctgcagtacgccatcgccgaccatccggaagacgaagaccttctgcgccgcctggaccaggcccagtataattttgaacaagccggcggctatacctaccaggccgaaatcaagagcatgctcaacggattcaacttcccggaagcgacctggaacaagcagattgccagcctgtccggcggggaaaagacccggctcagcttcgtcaagctccttttaaagaagcccccgctcctgcttttggacgaaccgaccaactacctggacctggatactttggactggctggacgccttccttaagaactacccaggcgccatcctgacggtttcccacgaccagtacttcttagaccacctggctacgcagatttttgaactccagcatggggaactgactgtctttaagggcaactacagccagtacctggcgcaaagagaactgcacgaccagcagcaggaagccgcttatgaaaagcagcaggaagagatcaagcgagaagaagagttcatccaaaagaacatcgtccgcgcctccaccaccaagcaggcccaaagccggcgcaaggccctggagaagatggaactggtcgacccgccaaagcacaagtcaaaagtccggatcaagtttgacagcgcccggccgtcaggcaaggaagtcttgatcttgaaggacctggccgttggctatccagacaagaccatgcttaaggacatctccttccagatcaataagggtgaccgggtggccatcattggccaaaacgggatcggcaagtccacccttttaaagaccgtcatgaagcagctgccggttaagagcggggccatcaagtacggggccagcctggacatcggctactatgaccaggaactgcaagggatagactattctaagactgtgatcgacaccatctgggaccggcacaaggacatgaacgaaaaggacatccggtctatcctggccagctttttgttcacggccaaggacatcgacaagcaggtcagccagctgtccggggggcaaagagcccgcttgaccctgaccgtcttgtccatggaacacaacaacttccttttgatggacgaaccgaccaaccacttggacctggacgccaaggaagttttggaaaaagctttggccgattacgacggcacccttctcttcgtttcccacgaccgctacttcatcaacgaactggccaacaagatcgtcgtcgctaaagacggccaggccaaaatctatgaaggcaactacacttactacttgaacgaaaaggccaaggaagaagccgctgctcaagaaacagccgcgcaggaagcgccagtcgtcaaggcagtcagcgaaagcaagttctcctaccaggagcagaaaaagcgggactcggaaaagcggaaactggagcgtcaggtcgcccaggcagaaaaggacctggaagagctggaagcaaaagaacaagagatccaggaagcaatggctgacccggcaatcgccgccgacttcagcaagctggggcctctccaggaagacttgaccgctgtccaggaaaagatcagccaagttagccaggcttgggaagatgcctccttggccctggaagaattttaattttaggcaaaggaaaagcaagtccgttactggacttgcttttttgttgcattttcgtcttgctttttacttgtaatcctcagcgtaaggcagttccattgacgggtccgcgtccaaggtcaagtcggcaaaattaccggccaggtactggttgtaagcggcagccccgatcatggccgcgttgtccccgcagagcttaagcggcggcaggataaccttcggtgccttttccaaagcagcgatctccttgttcatccgctctcttaagcccaggttggcggcaaccccgccccccatgatgaaggtcttgggctggtactgccggatggcccgcatggtcttttcagccaaaacgtccaccacggccgcctggaagctggccgccaggtcatacttgtctaattcctgccccaattggtcagcatggtggcaggtgttgataaaggcactcttaaggcctgagaaggagaagtcgtaattatcttcatcgatcatggctctagggaagccgaaagtatccttaccctggtgggcccactggtcgatcgtcttgccggccgggtagttgacccccaggacccggccgatcttgtcgtaagcttctccggccgcgtcatcgcgggtgtcgcccacgatttcaaagtgggtcgggtctttcagcaaaacaatttcggtgtggccgccggaaacctgcagggccaaggccggatactcaaccggttcaaccagctgggcagctgaaatgtggcccatgatatggtccaccccaatcaaaggcaggccggtcgccatggaggccgccttggccgcgttgatcccgatcaaaagggctccgaccaggcctggcccgtgggttacggcgatggcgtccagatcttcccagctgaccttggcttcttccagggcttcccgggtaatctgggtaatcacttcgatatggtggcggctggccacttccggcacaaccccgccaaagcgggcatggctcttgatttgtgtagccacgaccaggctttcgatctctgacccgttcttgaccacggcagtcgaagtctcgtcacaggagctttcaaaagctaaaatgcgaatgtctttcttttccttcacagtcagttcttctttcttagatggcagatcatgttcaaaccgtcgctgtccggacggtcatcattatcgtagtagttcttgcgaacaaaattgtcttcaaagccaatctgccggtagagttcttgggccttcttgttttcgacccgcacttccaaggtgaccgctttaaggtcagccgacttggacaagtctaaaaccgtctgaaccaggtagctcccgatcccctgcccctgctctttcggcatcaccgccaaaaaggtgatgtgggctttagagagactgaagcggcagccgatggctccgaccaaaaaatccccctcaagcaagagcaagtataaggaatcccggcgacgcaattcttcggcaaagacctccccgtcccagggcaggcggccggcataaacttccttttccagcaaaaggaggcgggcaagctcgcctgcctccgccttctttaagcagtattcatggccgctgatgctgattgcccggggggcaaacagcaccaggtcagctttaaagaatagtcccataagtctaaacttcttctacatatgcactgtctgcttcaaattcctggccggtcttctttgcccagtcatactcagcctgcgtccggcgcagatagttcggcacggcctggtccggatcaaggacgggagcacttaccgccaagcggccaattgcaccggcgtgcagaaggttttcttccccttcagccaggcgcaggtccttgtcagccagccctgccgcgatttcttcctggtacttgctgaagtcgctgccgacaaaaatcaccctctggtcaggcagggcccctacttgctctaagagctcgcttaagtggtagtgaccgtctgcaatcacggcttccttgccccggtaagcaccggcaaagaagttcttgcttctggcgtctaatgccgccacgatcaaggcatcttcaccggcaaagttctgggccagggcctgtaaagttgagaccccaaccagctctttattcaaaatgctggcaaacatcttagccgtggtcaagccgactctgaggccggtatatgaaccaggcccgatcgccaccgcgaagcggtcgatgtcttttaaagacagaccgttttctgccagcaggctggcaatatccggatcaaggtcaacgctgtggttgcgctggttttcctcgatcttttcgctgaccaagtggtcagcttcattcaaggcaacgctcaaatcgctcgttgccgtcgaaatgcttaaaatcttcatgctctaacttttatttcctaaaattttctactcagcttgacccgggacaggccttccaggataaaccaaaccacgaccatctgaatccatggagtaatcatttccttgaggatccggctggacagggcgaccataaagttagtcccgtacatcatgctgacccaaagggtgttcaagccgatgttgcagattaccgtaacgcagattacggacgcgatgacccgccaaatctggatgggcttcttgtacaagaagaagccgtagatcatcggccccaaggccgcggtcaaggtgtaaccgataaagaagccgcccaggttgccaaaaattgcggatgaaaccaggtcgctcaaggcaccgccggcaaagccccaccaaggcccgaacaagtagcccagcatgacgctgccaataaagcccaggcccacctgcagggtggcatccccgaccttaaactgtcccaaaaccaccttgatggcgataaccatggccagtaagaccagctcccgcagctccagcttgctgctgacttttgattcatttttcacaagactgtcctcctaaaaatggcttaacaaaaacaactgaatcagtctctattaaagcacatttttttccagtttacctcacaaagtgccataagttcaccttgccgggtaatggcgtggcaggtcttgacagcgctgtcttccgtttcctgcataacctggcaggcaacctcatcgccgtatttaatttccttctcaaacttgatggccaggtctttcggctcatggctgttgatgaagtcccggggaaggctgtcgacgatccagtccaggtagtgggcgttgttgacgtggtggttggagtccaggtcatagtagtaggcccggtagaccttctcgtctttgtaatcgtcttttggccgcaatttcttaaagcggggcattttagccaaaaggggtgctcccaattcctcagcgattttatcatcgctgggcaaaagcttccggctctttaaatcaaacaaaacccactggctgtgggcaattaccaggtctttgcctgcttcgtcctcaatgccgaagtcccggtaggacaaaaagcggttgtagccaaccgcttcggtccagaccctaaccttttgcccggcccgaggaaggctggtaaattcaaactcgtactgagtgactacccagcccctgccccgctctttcatggcgctagctccgcctaaagttggcgccagctgcccgtcagagctttccatcatcaggtcaatcattctgggcaatttcagctggccgctttccccgcagtcagcgtattccagctggtaatccttgtagtatctcattttgccccctcctggtggtagcggtcatagagttcgtttttggaaacaccctggctcttggccacctgcttgatggcatcctttttagaaacgccttgggcaacttgctctttgaccagcttgaccaggtcagcccagtccagggtcttttcttccgtgtttggcgacaccaaaacgacgaactcgccccggggatcgacttctttaaagtgctggatgacttcttccaggctaccgcggacgaattcttcatgaatcttggtcagttctctggcacagacgacctgccggccgcctggcaaaacttccaccatttgctctaaagtcttcaagagccggtggggtgcctcataaaagatcgaagtggctcttgaagcattgatttcttctaaaaaaggccgctgctggctggccttgcggggcaaaaagccgtagtaggtaaagggctgcccgtcaaagccggaagcgatcaaggccgtggcaaaagccgacgggcccggcaggggaacgactggaacattgcttttgatgcattcctggaccaaaatatagccaggatcagaaatcaccggcatgccggcatcgctgatctcagcgattgtcgccccctcctgcatcaacttgaccagttccggcgccttttctttagagttgaacttgtgaaaggccaccatcttgttgtgaatgcccagccggtccagcatgatcccgctggttctggtatcttcagcggcaatgtagtcagactcttccagaatccgcttggcccggatcgtaatgtcttccaggttgccgatgggggtaggcaccaagtagagcttgccctgctggtcatccgcgtagctgtgttgcgtttgcattatttgtgcaccgccttctttccaaaattatccaaaatatccaggcaaaacatgcagtccgcgctgggatcccggtgagttccgtagtacatgttgcaaatatggtagccagactggtagatctgcttgagcatggccatcccgctctggctcttgccctcgtgttctttaaccgtcaatttgtccagcttctcgcgcaaaagctggttttcaaccttgagctcggtattttccttcaagctctccagcacctcctgctgcagggagtccatgcttttgagcatgcgctccatctgctgctgcagctgctgcaatttagtatatgggtccactttccttaccgcctttactgctgccactttaaggccaaatagtccaaattgttcaaaaagccgacattactctgccgcatctggtcaacccgcatgaggtccgccaaaaagttggccgcttcctggtagtcacccttctccaggtccttttcgccccacttcttgagcaaaatccagacatacttctcccaggccttggtcccctgcttttgctttttaaccaggtccgccagctggtgggcggacacgatagccaaagagtcatgctcgcggagctcctggtaaaaatattttaccgcctggtcgacttcctggctgcttttcacctggtcaacttcttcctggctcatcccgttggccaaaaggagcctgtccttgctggaagcagcttgctggctgaaattgatgatctgggttctggacttgatcgtcggcagaatctgcccgccgttattggcaatcaagaaggtgactaccggcgccgctggctcttccagcaggttgagcatggcgtttgcagccggcagggtcaatttctgggcatggttgatcacgaagtagcgccggtcgccttccagagggctcttggctaattcctgcttaagcggccggatctggtcaatcgcgatcgactgcttgttttcttccgtgtcgatcaaaaagacgtccgggtggttgccggccagaatccgccggcaggccgggcaggtcccgtccggcttcttttcgcccgtgcagttcacgtagcagatcagccagtaggccgtgtttaaggcttctgcctcatcacttgacaagagcaggtaggcatgcgacagctgcccccggtcctgggcttgcttgagctgccgggattcagaagcgccaatttgctttaaatccagcattaaaagtgtaggaactggtcaaccggcaagacaaagaccgtcgcgccgccgaccgtgatgttgaccggttcaatcggctgctcgaaggaaatgccagggtgaatgccagggttgattgtttcttctctggtttgggaatgctcttcgatcagcttcaaaacgccgtcaacgtcttcatcttccaccccaatcaagaaggtggtgttgccttcgcgcaaaaagccgcccgttgacgccagtttagtggcgccgacattgttgtcaacaaaagccgcctgcaggcgcttggcgtcttcagactggacaatggcaatgatcagtttcatcttgatcccccctaaaacaattctggaaatgtgcttttcaccagtttaacacttgcggccacaacttgcggcaaatcttgactcgcgtcaaccacttttacccggtccggatgagcctggttgaccttttggtagccccgatagacctcttcatggaaggacagcttctcttgttccagccggtcttcgctgcctgaccggaccttggcgattctggccaggccctgggccgggtctaaatccaaaaagatggtcaggtccggctccaagtggccggtagcgaaagcgttgatctgggctacttcatcaattcccagtccccgcccctggccctggtaggccaaagaagagtcgacaaagcggtcggagatgaccaggtccccccgctttaaagccggattgatgatctcgctgacatgctgggaccggctggccgcgtagagcagggcctcggtcttggcattcatttccgtattggccgggtccaggatgatgtcgcggattttttccgcgatttttgacccgcctggctcccgcgttactaaaatttcccgcttgcactggccctggatggccttgacgacttcattgatcactgtcgttttgccggcgccgtcgggaccttcaaaagtgataaagtaaccttgcatttgaacttgcctcctatctatctattttacagaactaaagctagtatttacagacttatcttcccactaaatctagtaggtaaaaatcgtaaaaaaataatcccccgaaagcgggagattatcagttttttattgggaaatggcgttggtcacgccggtgtaagaagcatggcggtagcgggcctcatcgtacaaaaaggcatactcagctcttaaaatcttgtccgccacgatattgtcatcggacatgtccagggtcatgttgtctaaaccattgctaaggctgatttcctgctgcagcttttctaccaaagccatcagcttctcatcttctgcttgcttgattttgtcgctgtgcttactcatgctatagctccgttctaccttgaactgcccgcttcaaagtgatcaagttggcatactcaatgtctgagccgaccgccaggcccgcggccagccgggtaaccttgaggccggccggcttgatcaagcgggaaatgtacatggccgttgactccccttccggggtggaattaagggccaggatgacttctttggcagcatcatttttctgcaggcggacgatcaaggacttgatgttgatctgctccggcccgatcccgtccatcggggacaagaccccgtgcaggacatggtagaggccgtcatattcgcccatattttcaaaggccatcacgtccttggcttcctcaaccaccatgatggttgaccggtcccgggttggattgctgcagatggcgcaagggtcttgttcggtgatgttgccacagaccgagcactggcgcagcttttccttaacgtcgaccagagcctgggagaattcgtccacgtcttctttaggcatgtccatggcgtaaaaggccaggcgggtcgccgtcttttcaccgatgcccggcagtttcatgaaggaatcaatcaagcgggcgattggcaatgggtattgcaaattacatcaggcctttcgtgtacttgcccaggctctgctgggttgcctggtcgatctgcttcaagcccttgttaacagcgtcgataaccaggtcttccagcatgtccggatcatccggatcaatggcttccggcttgatgaacaagctctttaaagtccggtcgccggtaaaagtagccactaccatgtcgtcagctgccttgccggtgaattcctgggtcgtgatgttttcctgttcctgggccatttgttcctgcagcttcttggcttgcttcatcatctgctgcatgttcatgccgcccattcctgggaaagctggtctcttgctcatgaaaaaatctccttttactacttcttattacttcgtttttatctgcttaattttaacgcgaaaaaagttttttggcgaatattagtccttaacctgggccaaagggccgaaaagctcttctgccttggtcacgatcgcgtcatctgccgcttcttccggcggcgcctggtccggcaaaggcggctcaggagctgcttcttctgccggctgggcttcttctggctgggccttggcccggagctgactggcatgttctttaatgaattcctggcggatctttggccagtccttttcgtcaacgatggcgatggtccagctctccttggtcaattgatccaggtcagctttgagagttgctaaaaattcctgaggatttgtggccagctgccaggcccgggactggctggacaaaagaaccgcccggtcgctggccgcgatcggctgcaggaagcccaagaccgtcttggccggctcttccagcatgcttggcaagtcccggtcccaaaggttgcgggcctcagctaagccgggcttggtggcctggcttaagaccgcgtagatctcttcctggctgctggtgatttcagcctgcaggctttcagcttgctgctgcttttccgccgcctgctgggccacttcggttgccccgcccttttgcgtgtacagctgctggttgagctggaagacatggcgggggctgaaggcctggcttggccgctgactcagctgctgaacctgctgggtcagctggtggacttgttctttcaaggccttgatctgccgctctatggccgggttgctggccgcggaagcaacttgcgggcctgcctggctgttttgccgcttctggctggcctggactaaaaagacttccaagggaatctgctgctggttggtaaagcggagactgcccaaggcgtcattagcctggtcaatgatctggctgaagcggtccgggctttgctgggcaatttcctgggcaaagtcatccgtcaggaattccccctgccctgttttggtaaaaagcatggcctggacggtcaagctgataatttcatttaagatgttttgggcgctggccccgtcctggatggcagacttagctaagtccagggccgtctggctgtccccgtttaagagggccaaaaggagcttttccacttgctcctgggcggcgaagccggtgacttccagggtgtcctcgtagcggacactgcttttttcaaaagaaaggagctggtccaaaatgctcaaggcatcccgcatccccccgtcagcgacttgggcgatgacctttaaggccttgtcctcatattcgaccccttcctggcccaggatgtattccatccgctggaccatggcctcatttgagaagcgcttgaagttgtagcgctgggttctggaaatgatggtggccggcaccttctgcagttcagtcgtcgccaaaataaagacgacgctggccggcggttcttccaaagtcttcaaaagggcattgaaggctgaaatcgacagcatgtggacttcgtcgatgatgtaaaccttgtacttgccttcagttggggcgtagtgaaccttgtctaaaaggtcgcggatttcgtcaacgctgttgtttgaagccgcgtccatttcaatgatgtccggcattgccccctggtcggcggccaggcagttgctgcactcgttgcaaggttcgccctcttgcaggtttaaacagttcaaggccttggcaaaaatcttggcgcatgaggtcttccccgtcccccgcgggccggcaaaaagaaaggcatgcgagaccttgccccggataagtgaattcttgagggtatcggtaatagcttcctgcccgaccacatcatcaaaggtgcgcgggcgccatttgcgatacaaagcttgataagccatacattctccccataatgaaaaagctcctagccccgaagagctaagagcctgttaattgctaaataaagggcacatgcccaagcgaccttagtgctgctaccttccggtcctgacacgcttcggaggtcgaacattgcccaataaatattgtaacctaaactaatccttttggcaattttcctgggcttttttttgctaatttttgcttgcggcggatttcccggaagaaatctttcaaaagttgggccccttgctccttgtaaagaccccggatgaccttgggatggtggttgaatttttccacgctgaagaggtcgaccacgctgccggcggcgccagctttggggtccatggccgcgaagtagacttccttgatccgggagttgataatggctccggcacacatggcgcaaggctccagggtgacaaacaggctgcagtcgatcaggcgccaggagtctagcttttggcaggcttctttaatagccagaatttcggcatgggctgtcccgtcttcatccagctcccgccggttgtagccctggccgataatctgcccgtctggccccacgacaacagccccgatgggaacctcgtcttgccggcgggccttttctgcttccgcaaaggcggcctccatgtaggtctttttttcttcgcttgaatacattatttcttcacgctctttaaaatgtagtagcccttgtcccgggtcaagatttcacagttgcccaggctggctgccatcagcttcttcgcgctcggtgccccctgctttttctggatgacgaccagcaaaatcccgccatcagttaagtggtccttagcttctgacaaaatgctggaccagatggctttgccggcccggatcggcggattggtcacgatcatggcatattggccggaaacttcttgatagcggtctgaggcaaaaatattaacgttgcctgccccgttggccgccgcgtttcttctggccaggtccatggcccgttcattaacgtcaaccatgtcgacctggcggccgggccactttttagcggcgaaaagaccgatcgggccatagccgcagccgacatccagaatattgccgcctggcagctcctggtccagcatctgctcaatcaagaccccgctgccgtagtcgacccggtttttggaaaaaacgccggcgtccgtggtcaggtttaagttaatgccattaaggtggtagttgacatggtgctcatcatggtcaaccgtgggattttcagtaaagtattgttcagccatcttatgcctcgctgatctttacggcgtcagtaccgtcgatttcgctgacctggacctggacgtcctcgctggccgcggttgggatgttcttaccaataaagtccggccggatcggcagttctcggtggccccggtcgatcaagaccgccagagcgatcttgtctggccggccctggtccatgatggcgtcaagagctgcccggatggtccggccagtgtaaaggacgtcgtcaaccaggatgaccgtcttgccagtcaagtcaaaggaagtgtcaaagctggcaatggccttggccttttcctcctggctgaggtcgtcccggtaggcggagatgtctaaagacaagactggcagctggctgtcttcaatcttggccaggcgatcaccgattctctgggccaggtaccagccccgggtcttgatcccgattaagaccaggttttccgtcccctggtttctttccacgatttcgtagctcattctggtcagagcccggcggatccccgcttcatccatgatttgtttgctcatttttcttctctccgtatggtagttttttcctattctattgttcttttctgtttctattttttattctggtaaaaaagcatcgctaaccattttataagactggcccggatgtagtcaaattccgccagttcttttcataagcgctggccaccaggtccaggtacttgtcatagtcaagcgaatgcaaaattgcttcctgctcttcagcttgaagtaagttgacggcccggttttccacgtgcatggaccagtcaggtgacagattaggaattttctggaccgtagcctcccgcccttttgccaagttgcccaggccgttagccttaaggacggacagggcttcttggtcatgctggatcacggcttccccgcttctcttgcgcttgttcagcatggccggggtcagctttttagccgcggcggaataaaggtgaaccgtcttcggcaggccgtcttgatagataaagacccggttgtagcgctgcaagattaagagctggccggcatccccccggccgaaaatgcagttagcccgctccttgctgtggttggctgagaggacgttttggaacatcctgagccggtgggccgggtctgggaaggcttcctcagcttccgccagaatcttccggcccaggtcccggtcaaaaggcgctgccaggtctgttcttttttccagcaggtagcggctgagtgcccaatcgatgatggccgggtgggccagggacttggtcgggctggtgtccttccggcaggccaggctgcctgaggcagacaggatcttggtcaagtccgggctggcttccaggcggttgttggagtctttagaaaccaggtagagttcttctggcacgatctccaccccgatttcagcggcttctttagcaagaatcttccggtttaggtccgcgtccaaaactgagtaaaggccatcagtattggttgacacaatccgggctctggcataggtctgggcctggccgatcatataagtgaagagctggccgatgatccgcatggaccggatccggttgttcattctaatagaggacggcacttgcccctctcttgggtcagcggccccggtagctgagtttaaaatcagcttggtcccttctctttcaatgttgaacatccgccgctcttcgtcgctgtattggggatcggtccgctttttgtccaattcctgctttctttcaaagatcgccgtataccggtcttcacctaagcggtcattgtaaaaagcattcaagcgccggagcatgtttggatagtaggaagtaaagtcctcgtggttggtcaggtcgcttgaagtaaaggcatagcggtcatccagtcggacccggctcccctgctttttgaaaacggttggttcatcttgactgaagtcccgccaaaactgcccccggtcggctggatccgtctgctccatcagcttgatcgttgctttggcagtcagaaaagtctggtacttttccacccggccgtctggcagggtaacttccctggccttacgcaagtccaaaggatctggataaagcttttgcacataagccaggtcagcctgctttttctcccaaagggcatggtcttttaaataaaggtcacggttatattctgacccatgcaggccgccgacggaaaaagtaatgtagcaagtcgatggctggccgtccttttggtagtagaaaaggttggtatcttcgttttcgacatcacttaagtcgctgaccggcagggcctggtcgccgtaatcttcccggtattcttttgaaggattgaagttcttgccggcaaactgcttgtagtagtcataaacccggtcgaacttcttgcgtaagttttcgtcctcaaagagcttgtagaaaaagtcccggctttcttccaggatgtctctctgcttttcgcccgttttttccgccacgctggccgccgggtacaagaaggaaacagcccggtcgtcttttaagcggccgtatgggcagatggtccggcgggcaaaattagcagaagaagaatcaatggtcaagcggtcttttctgacaaaggccgggccgattttcgcctggtagctgtcctcgtcttcttggtagatcaagtccgggtactggcccaagaggccctttttcaaaataaactggccctggtagtaaggatggcagaaaagctcctttaagttgaccacgtcagaaacgttgtaggcaatgagatctgccagttcttcaggactggtcaaatagtcctggccaggctttaatttgtcactttccagaatctgccagcccagcatccccaaaaggcgcttgaggccaacccgtctttgccgctcattgagctgggccacgtcgatatggcggccggacatctggaagtttttggcaactaaacccatggtcttgtcctgccaaaggcgcaggcgcatgttgccgatatagcggctgaagagctcatcgttaaagtcccgcatctccctggccgtcacggctgaaaagcggtcccgcttgccgctttcgccaggctgccaggctctagtgaagtagtaagccagcatggtcaagtcgtaattgctggaattgtagcccatcaggtagggcgcttcttcttcctggtagccggcgtcagtgtcgcagaccgggcggaactgtccagggaaagaggacggggcttggggatcattgacgtattgggcatctgaaaccccaaaggtctgggccagacgggcggaagctgcacttgagcagagattgtagtagtagatctcccctttaaagttctggttcttctcccggatccgccgggcagcagccttcttaaagtccaggctgtctttgtcatttaaggccggatcatcaactaggtaatagatgtcaacccgctggtcgtctggccggtagcaggacaaggtaaaggcgttggtcaaagattcgatatcgtagaaataagaattgagtcggctcattttttcctccagtcgtttacttccattttagcaaaaatcaagaaaaaagcgggccatcaggtccgctcccttgtcctgccgtgcagctgctcatagcgctccagcgacattgaggttacatgataattcttgcaataaggacaccggtaagcccgaatcggcatctgctgccagtgctcatggttgatttcacgcaggtgaacggtcacctcttcctggtaaagaaacaagtcggcatcaaacttcgtcttaaaggcccgcttgccgctgggacaagccagcagacggctgcagcgggcgcgccggtaagccttactggctttactcttcgtcattgccatgcccccttactttcttcagaagtaaaacagcagatcactgattccttatgtcaatattcactttctagcttgattttatcaccattcgcctgcctgctcaattaacagccactttttaccaagattttagtaagcgctctattgttttttaattaaataaggacgataataaactagtgtgcaaagaatatttcatgaattcttaggaggcaaaatgagaaaattaactaagtctgtcgtgactgctttgtcactggcaaccgcaaccctgtcagtaattccgcaagcagccgctccggcagaggcagctactcagaccaagactagcaaagaatatgtaaatggcagctatactgtagccgccagcttctatgacagcggcagcaaggtttactcaactgaagccagctttttgacggcagccgcagccaaggtcacgatcaagagcaagaaaatctcttcagtgtccttcaccctggccaaggacagcccggtctacagcgacttgaccatcaacggctccaaggccaagaccagcactggcaaggacggcagcgtaacctacacctttgctgctggtgcctaccaaaccagctcaaaggctgctaccttcacggtcaacggctccaagttcagcgctgacgttgtcttcggtgctttgccgagttcagcctttgtaactgtcactgaaacttcagcggttgttaagaagaaggtgcaaaagacctcagccgtttacaaccgtgacggggctaagactaagtacaagtcaatcaaagctggcaagaccgttaccacttacgggactttaacccggggcactactaagtactacaagctttctaagaccgcaagcaagtacatcaaggcttctaacgttgacggccgctacatcaccttgaagaacgccgctgccgtttacacccaggacctgaagaagaccaagaccagctacaagaagggcaagaaggtttacgcttacgcctacgctatcttgggcggggaaaagtactacaagctgggtactaacaactacatcaaggccttgaacgctgacggccgctacatcactgtcaagcacggcgcggctgtttacagcaaggacttgaagaagacaggctcatcttacagtgaaggcaagaaggtcttgaccttcggccggaccactttgagcaacaagaagaagtactaccaagttgaccaaaacaagttcatcgtcgcttccaacgttgacggcaccacccggactttgaagaagaatgcctacatctacaagaagtccaagggcaaggcagtccgctacaagaagtacgtcttgaagaagaacagcaagcgcaagacttacggcagcgctgtatcaatcaagggcaagaagtactacatcatctcagttggccaatacgtggttaagtccaacttccgctaaaactgaagataagcttgaaaagattctgcttcggcaggatcttttttgattttttttgattttataagggcgataataaattaatatcttaatcagcaaatttgactaatcccggaaggaaaaaatccagaatgaagaagttaaccaaatccctcgtgaccgccctgtcactggcaaccgcaaccttatccgtaattccgcaggccgccgccccggcccaggcagctactaaggccaaaagcaaaaccggcacggaatacaaggacggcagctacacggtcatggtcactgtaaagaatctgggcaataacattgatgttcctaataactttttcccagcagccacggtaacgatcaagaatcataagatttcatccgtcgcgatcagtgtagatgacattgatgacgcgggcttatactacgtccaagttaatgatgaagtagcgatcggtgaccagaagaccttaaccttcgacggctctgtctacaagaacggcctgcaaaacgcaagcattaatatcagcggtgatccgtcatactgcaatattactttcggtgacctgccaagttcagcctatgagacggttactgaaacttcagaaacggcaaagaaagtcgtcaagcggactgcggctgtttacgacagaaacggcaagaagaccaaggacacggccctcaaggcgggcaagaccattagcacatacggcagcttaacccggggcagcgtcaagtactacaagatttccaagaccactaacaagtatgttcagtctgccgatgtcgacggccgctacatcactttgaaaaatgccgctgccgtctacacccagagcctgggaaaaaccggaaccagctataagaagggcaagaaggtctacgcctatgcttaaaaaagtactacaagctgggcactgaccagtacatcagcgctttgagcgctgacggccgctacatcacggtcatgcacagttcagccgtttacagcaagaacttgatgaagaccacttcttctgtggctgaaggcaaaaagatcctgacttttggccggacgacgataaagaataagaagtactaccaaactggctacaactccttcatctctgcttccaacgttgacgggacgacccggaccttgaagaagaatacctatgtctacaagaaatccaagggcaaggcagtccgctacaagaattccgtcttgaagcaaaacagccagcagcagacttacggcagcgccgtatcgatcaagggcaagaagtactacattatcggtgttggcaagtacgtagccaagtctgacttcaagtaaaatgcaaacaagttgatcgcagtaagaaatgcaggtcctttgcggacctgcattttagtttttctttaacttttccacagtcttttttagcaagcagttcatcaaatagccacgcttgctggttatccttacagtacaagttcagaagaacttgcgactaagcaaaggaggcaaaaactatgctgaaactgtttaccaaattactcacgatttcattggccctgtttgcctttaaccgctacagacggtcccgccgccaactggcagtagttcctgcccaccagcggcacaattaagattcgtgacttcccttttccccttgaatttgaattgtatctaattgctggtctaccgctttagccagcattacattaaatttcttatacataccaacacacaaacctccatctcgatggcaagaaagccctggcattcgccagggctttcttgcgcttatctttactttttaccagctcttacaggttcttaaccaacttcaaagaagcagaaacattgatcttgattggatcgccgtacttggcccccttgttcaaagcggctaagtcggtcccgtccaggtagtagacgtagtggtagacactggttgcgtcagtaaatttgacttggtattccttgcttgaagcaatgccagcatttacggcttcagccaacttagtgaagctatcggtagagatttccgtccccttttcaccagtcaagtattgggcagcagccttttcgatcaaggccgtgtcttcagctgacagcttttggccaaccttcattgggctgtcgatggtgacattggccaggccccaaacagtcgtggcagttgcttcaacagttgaacttgccttttcaattaccttttcgtccttaaccaaggtagccgtgtagttgaccgtgatctggctgccgtaagttgcgccaacgttcgccttaaggaagttggccagcttttcatcggcgtttgatccttccagccagtattcgtagtggtagttgttgccagcttcgtccttaaattggtcgctcttcaggctgtcagtcaagccggcgaagagggccttcaaggaagcttcactgatcttggttcccttgaccccgttcaagtacttggaaacagccccatccaggtagttagtcaaagttaagtcctggcccacctgcaattggttttcagccttaaggcttgcttgatctgccccgtaaagagcggctaattttggcgtgacagttgaagcagtgttttcagctgactggtagccttccagcatccccttgtagaccaacagagattggagtgggtagccgtggtcatcaaagaggcccatgttgtcccaagtggacccgccccaggtttccttgccattgtagtgcatttcattgtccggagcatagccgatcacatacttggaagcccagccagtcccgtagacgttggccagctgcttgttgtagttccagctgttccagccggctctgaccgcgatttgggctggttcccagtagaaggcaccgacaccgccgccagcaactaaggacttgtagagggcagttacttcatcgacctgtccttgcgggccaaccgcgtagtcgcttggggcgtagccaatattgttgccagtaccgtctgagtcattgacattgttcagccagctggtttccatgacaaccacccgcttgccaaattccttttgggccatttcctgcaccttcagcaggttatccgggttgttgttggaactgccccagaatgggtagtaggaagtccccaggtaatcgtagtcaactccgttgttcttcaagacagtcatgatcatccggtagcggttgacatctggcgattcaaactgcacggcaatcttggcgtccttattggtcgttctgaccgcctgggccgcggtggccaggtagcgggcaacggtcgtgccgtagttgctctgccagagcttgttccagtccccgccggtcagttggtcggcatcatagccgaaggtccccttggtgatttcattaccgatctggaccatggctggagccaccccggccttttccatatcggtcaagaccttcttggtgtaaagggaaattgcttcgtttaattcagcgctggacaggttcttccaggacttaggcaggatctgcttggccgggtcagcccaaaagtcggagtagtggaagtccagaagaaccttcatcccgtacttcttagcctgcaaggcagtcttgatcaggctttcttcgtcggtgttaccgccgccgtagccctggccgtcagcgttgtaagggttgttccataaacgcaggcggacccagttgaccccggcttccttcaagacatcaaacaggtcagcttccttgccgttaaagtcatagtacttcacaccggctttaagcatggcctggtaggttgacacgtccaccccgcgggccatgtcatcagtcatgccagggatcttttccaccttaacgctttcgtacttaaggccagtttcagtcccgttttggtaggcagcagtgatttcgtcggccggcttcttactggttggggtttcgtcaactgcttcattgttattgccggccccttcagtcaaggtcgcggtaaagttggccttgatagcctccccgtacttaacccccttgttcagggccaggaagttggctaacttagcagcgctgtctgccccttccagccagtaggcatagtggtaggtcttgcctgcatcatcgccgtagtcggtcgtgccaacataagccgtgtcgtcgccgcccaggccggcttcgatggccgtcaagacatcctggctgatttcagttccagccgggccagacaaaagtgaagaagagatcgtggaaagcagctttttgctttcatcagccgtaaaggcctggccatccttcaagccgttcttgacgctgaccttgtcttggccgtagaccttggtcacggatggagtaagggtagaagatgcttgcgctggctgggttacagcttccaccttgtagatcaagccggccaaagtaccattgtagtagccggccccaaccacgctgccagcagcgctggtcgtccccagctgtctgatcaggtcactgacgaattgggcagcagtttcgttgttcgcagagacgtcagtcttcaaagtggccagaaccttgccctgcatggagttgttcttttccatcaaggaagcaatcacctgcttgtcttccttgacatccccttgagccaggagctgggccatttcgtggactgctgattcctggtagccgttcttggattccgtccagtcgtacttgaccccgtttttcagcttgactgcagtcaggaattcagtttgatcccgcaaaagctgggcgtggtccatgccgttttccaccgcgccatccttgtcaaaggaaaccttgatcccgttcaaggtcttgctggtacttttggcaatcttaccagtcgcgtcagcgtaatactgcttgtcgttgactttgatgaactggtgctttactacctggccattcgcgtcatagtagttggtaacgccagaagtggtcttaaaggcattcttggttggctgagcggtagccgtaacggccttttgggccgtcactttggttgcctggactgccttgctggctgtctttgttgctggagcagtagcggcagtagtagctgcggtattagtcgtagtggcagcagtggcagtcttatcttcatttacagcagttgtcgttgtagtggttgtcgttgtagctgcagtagtggcagtttgtttttcacttacagcagtatcagcagacttcttttctgcttccgcagtagtgttttcagcagtagttgcctgagcaactgcctgcttgctgctatcatcggtcgtgtctgcctttacgctattgacattgccgacagccaggccggtcgccagcagagctactccggcagccgtcaaactcttattagacttaaagtgcttaatccgtctcttcttcataagcttgttcctcttttaattcctctgaatgcaattgaattgtattttctttttcttgtttttcttctgttctctcaaagaatgctcaacagcaaggttgagcattcttggttaaattgattgcctgctttacaggttcttgacccacttcaaagaagcagaaacattgatcttgattggatcgccgtacttggcccccttgttcaaagctgctaagtcggtcccgtccaggtagtagacgtagtggtagacactggttgcgtcagtaaacttgacttggtattccttgcttgaagcaatgccttcgttgatcacggctgccagcttggtaaagttgtcagcagagatttccgtccccttttcaccagtcaggtattgggcagcagccttttcgatcaaggctgtgtcttcagctgacagcttctggccaacagtcatcgggctgtcgatagtgacattgtccaggccccagacagtcgtagcggttgcttcaacagttgaacttgccttttcaattaccttttcgtccttgaccaaggtagccgtgtagttgaccgtgatcgggctgccgtaagtaacgccaacgttcgccttaaggaagttggccagcttttcagcagaagtatttccttccagccagtattcgtagtggtagttgttgccagcttcgtccttaaattggtcgctcttcaagccgtcagtcaagccggcgtagagggccttcagcgaagcttcgctgatcttggtccccttgaccccgttcaagtacttggaaacagccccatccaggtagttagtcaaagtcaagtcctggccgaccttcaactggttttcagccttaagacctgcctggtctgccccgtaaagggcggacagttttggcgtaacagttgaagcagtgttttcagctgattcatagccagtcagaaagcccctgtacatcatcaaggattgcagcgggtagccatggtcgtcaaagagggctacgttgtcccaagtggaaccaccccaagtttctttgccttcgtagtacattacgttttttggcgcatagccaatggcgtacttggaagcccagccagtcccgtagacgttggacatttccttgttgtagttccagttgttccagccggccttaacagcgatttgggctggttcccagtagaaggcaccaacgctgccgccagcgatgatcgccttgtacatgtcagccatcgcgtcaacttgcccttgcgggtcagccgtgtaggaaacgccgtctggcatggttggcatttgcccgatagagttgccagtaccgtctgagtcgttcaggttgttcagccagccagtttccagaatgacggtcgtcttgccaaattcttccttagccatcttttcaacagccagcaggttgtttggcgtgttggcacccttgcccaggctttggccattgtaagtcccattgtcgttcccggttgaccagaatgggtagtaagaagtccccaggtagtcgtagtcgatcccatgcttcttgaagacagtcatgatcgtccggtacttgtagatatttggcgtttccagctgcaaggcaatcttagcctgcggagcagcgtttctgactgccttggccgcggttgccaggtattcagctacctggtcgccgtcagcgctcttccacagagtttcccagttgccgccgtggtcacggtcagtgtacaagccaaaggccccgttggtaatttcgttgccgacttgcaccatatcagcgctggcaccggcattgcgcaggtcggtgagcaccttttccgtgtagagcttgattgattcatccaaagcgttgactgacaggtccttccaggcctttggcaggatctgcttggccgggtcaacccagaagtcggagtagtggaagtccaaaagaaccttaatcccgtacttcttggcttcgctggccatcttgatcacgctggcttcgtcagtgttaccaccgccgtagcccatgccgtcagcgttgtatggatcgttccagatccgcaggcggacccagttgaccccggcgtcagccagaaccttaatcaagctggcttctttgccgtcaaagtcgtagaacttaacgccggcgttaaccaaagcctggtaagttgagatgtcgaccccgcggatcatgtcatcagtcatgccagggatcttttccaccttgacgttttcatacttaaggccggtttcagacccggtctggtaagcagcggtgatttcatcagccgtcttcttgctggttggcgtttcgtcaactgcgtcggtattagtgcccgtaccggcaaccaaggtagccgtgtaaacaaccttcaaggcgtcgccgtacttaacgccggtgttggccttgagtaaattggccagcttctcagcgctgtccttgccgctgagccagtattggtagtggtaggccttgccattcgcgtcatagtaaaggctgctgccttcaaaggcggttgcatccccggccaaaccggcaaagatagtttgcaggacttcttggctgatggccgtaccggccttgcccgtcaacagggctgatgaaacgccgtcagtcaaagtcttggcgtcttcatcgctcatcttgctagttaccgggttggtcaccttgcctgcgtcgctgtaaacggcgctgacgcttgggtcaatcttggagacagcttgagctgctttcttcacttcttcaaccttatagatcaaggcagatgcgacaccgttgtagtagccggccccgatcacgctgccagtagcatcagtattgcccagtttggaaaccagggcggcagctacttggctggcgctagccccgctttgaccgacgttcaaggtcagactggccagaaccttgccggacatggaagagttgttttccatcaaggtcgcgatcaggtcattgtcgttcttgacgtcaccttgggccaggagctgtgccatttcgtgggtagctgattcctggtacttgttctcagtttcagtccagtcatacttgactgccttcttcagcttgcttgcggctgagaattcgatttggtcgcggagcaattggccgaagtccaggttgttgctgatggcaccggtattgtcaaaagtagcagtgatcccgttgaccttcttggtcgtgctcttggcaatctggccattggcgtcagcgtagtactgcttgcccttgaccgtgaagacctggttcttgactacttggccgtttgcgtcatagtagtaagtcttgccgctggtcgtcttaaaggcgctcttagtggcagtagtggtcgtcgtggtagtagttgccgccttagtcgccgttaccgcgctggtcttggtttgcacggtgttagcggctgcagtcttagtagtagtagttgcagtagtagttgcagcagtcgttttagtagtatctgccgtggtagctgcagtatcggcagtatttgcgctaatcttgctgtcagttgccgtatccgcggtcttagttgtatccgctgcggtttgctctgcctgggtatcagtgctttgaacggcttgcgtttgctctgcttgtgctgcttgggtattggcagtctgctggtcactagcctggctgtcggttacgtcagccttggctgggttggcataggccaagccagttgccgtggctaacagggccaagttggccgctacgatttttttgctcttaaaatgcttgatctgtctctttttcatagaggtccttcccaattttttccattaaatttctatcttagtttattataccgttttcaattaatttgttcagtctttttcgagaaagcggtaaaatatcaagaaaactgtctaattctatgctttcttgcctccttttccttgcctgccgcccggaaaaggccaataatatcatttatagagactttgtgaaattcacaaaatatccattttgttttaactttagaaagcaggtacatcatgtcttcacttagtcaaaaactggccagccttttcctaatcgacagcactggcgattttactgaaaacctccgccttttggagcagtaccagccagccggcctcctcctctttgccaaagacctggcgggcctaagcgaaaaggctgttaaagagcggctggcgatttatcggcaggcccggccaggtttgctgctcgccattgaccaggaaggcggcttagtgagccgcttgtccgccctttacccaaaccggtcttaccccagccaggctgaacttttgaaaaagggggctgactttttcttagcagaaaaccaaaagacggccctggaattaaaagatttaggcatcaacttgaactttgctccggtggctgatctttcgcttgatccggccagtttcatctacagccggaccctgcaagcaggagctgaggaaaccgggccggcaatcgcggcctttatcaagctctaccggcagctgggagtcgcctcctgcgccaagcattttcctggctacggggatgccggcgacacccaccaggctccggctaaagaccttagaagccttaaggaagcccagctggatcttttaccttttaaagctgcgatcgcggcaggcgtgccgactatcatggtggctcacttggaagttgcctgctatagccctggccctgcttccctctccccggaaatctaccgcctgctcaaggaggaccttcattatttcggcgtggccatcaccgacgacttagctatggcggcggcgcgagagagcagctgcccggaacttttggccctaaaggccggagccgacctccttttaggcggcaaattggaaaacttgccaattttggaagcagccgcagagagcggtgaattgccaaaagagcggatcaaagacgccctggtccgggtccagaccctgcaggacgattattccctttaagcttttaaaaagctctgtaacatttcagaattaaccagcaattaacgacaaaaaaggcagatccggagatctgcctttttatcttgcaatttattgtctatttcttgctttgtttctttgttactttgcttaagtcttagagaaagtagcaaacctgatctctttcaagatctggtagccaacatccttgaccttgtcttcaccaaagctgcgctggttgagaagcaggataatcccgttcttgttgtcagctgtcagctggaagtaagcagcatagtgggcgctgccaattgccccgtaggccagcttgaccttttcccccttcttgaggtaaaccccgccgctatattggttgatcttgctcttgaggtgggtcagcttgtgaaaggcgctcggcgacaggaactgccctgtccccaaagcttcttggataagatagtagtcgctggctgtcgtcagcatgttcccggccccaaccagctgagacaaccgtgtcttttccaaagttgccgcctgctggtagttcttgccatgcttataggtgtaagatacagccagcatcttattcttaggcagctggctacttacataagttgacttgaggcccagccgctggaccacccgcttcttaaagttccaggcatatgacttatggctcaccttcttgatgatgcctgccagcaaaacataattgacgtcgctgtagtggtagctccccaccttgtcctgcggcaattggttggcccggttcacaatccagtttactgcctggtcttcactgtagttgatatggcggtcggcttcgacttccggaatctgcaagcctgaagtgtgggaaagcaagttgcccacgctgattttcttggcattccgcaaggccgggtaccagcgggagatcttcgtgttttgactaaaagcacttgagctccccttcttttcttccatcagctgcatgatcatggccccggtaacttccttttgcatggaagcggccgggtagacgacctggctggccccgttcttaaccttctgcttagcattagccaagccatagttaacaacctggacatgcccgttttgcactatagccacgctgccggtcacatgcttcttcttaaaaagcttctcgacaaaaacatgcatatcggccgctgttaccagatcaggggcggtttcttctggccaaaacgccaaagcggccactaagacaagcagggcaacgattaatttcttaccttttttgaacaagtctgcttttccctcctagaataaatatgaacattataagcccttttccagggaaaagggaaaagttattatacttttaaaaaataaaaaaatactcactaattcaaactgaaggttcccggctggatcttctgcaagaggccgaaggccaggcccttgagctgctgttcagtctggctgcgctcattgacaaacatgatgatcccgtttctgttgtccgccgtcagctggacgtaattcccgtagtgctcatccccaatcgcgccaaaggcagacttgaccttgccgtcccgcttcatgtacatgccgccgctataggtggtctttctggccttgaggtgggtcaggtaattgaagtcgctttggttcaaaattgccccgttctgcaaggccagcatgatctcataatattcaattggcgtggtgcacatattgccggcacctgggatctgggaagccacggacttaggcagagaaaccggtctttggtactttctctgccaaaggtaggcataagagaccgcctggctccgggtccaagggatgtcgtgtctgaggctggtgtgggctaaacccagcggctgaacgatccggtgcttgaagttgtaggcgtaggagtggccggtcaatttgcagataatgcccgccagcaagatgtagttggcattgttgtagttaaaactgcccgtctgatactgccagctgccattgatcttctggctcacccagttgatggccttgttttctgacagattcttgcgccggttgctttctaagcctggcgtccagtagccgctggtgtgggtcaaaaggttgccaaccgtcacatagcgggcattcttcagcttgggataccagcgggaaatcttggtgtactggctgaattgctgcttggtatgattcttttcgttcatgatctgcactagcatggccccggttaccaccttttgcagggaagcggctggataggtcacgttataagaaccgttcttcatccaccgtccaaaccaggcatagccgtagttgacggtcttgacgctgccgttttggactaaaagaactgacccggccaggtggttgtccctcattacccggttgacgtcgctcttggtcgcttccgcctggaccgtagctggcgccaaagctggaagcaggaggctggcagctaaagccagcttgccggcagttttcgcggattttttcaaaaagaaatctttaaaattcaatttgctcttctctttctcatcataagcataaccacgaattatgttagccctaatgtttattaaaaacaagggaagctgtgttacgttttaattacaggatttttccgcaaaaaaagaccaccggaatcaaccgatggtcatttagaagtggtcaagcttacttaacggcatccttcagggccttgcctggcttgaaggctggaaccttgcttgcagggatttcgatttcagcgccagtttgagggttgcggcccttccgagcagcgcgttcacgaacttcaaaagtcccaaagccgatcaattgtaccttttcgcccttagcaagtgcttcttcgattgatgcaaacaaagcgtcaacgatttgagcagattccttcttgctgaattcagtcttttcacttacaactgagacaagttcagtcttgttcatcttgtttcctcatctttctattaaaaggctcagcaatatgccgaagcttagtcatatgcttaattatagcaaaactttgccgctgcaacagcctttctgtgaaatagatgaggggaaatactaaaattacaaaaatattttagcagaatccacctatttcactggcacgcagtgcttgtcgttgatcgccttgactttgtccacccgccggcggtacttttcttccatcaaaggatccgtgttcagccaggtcttgacgatttcgccggccatcatgtccccgataatcttggcgcctaagcaaaggacgttggagtcggtgtgctggcgggcaagcttggcacagaaaggatcttggcagaccgcggcgtaaatgccgttaatcttgttggcgatcaaggcgctgccgtagccaaccccgtcaacgaaaatgccccggtcacattcgcccttggccacagccagactggctgggtagacaaagtctgacaggtcgcaggattcttcattgccggccccgaagtcaacgacttcatagccttcttcttccaggtaggccttgatttcgttcttcaagcgggtacccgcgtggtcgtttgccattgcaatcttcatgtttatgccttcttctatttcaattttttaaaaagcttctttcgcctctattctaccatttccaaagaaagggaaaagttatgagcaaattttagcctttcttaaataagttcatgtactttggtcaatttcttgccatacttgcttctaattatccagatagaatttcttgtaatatcaaggaaagtattttatggcaaggagggactaccatgtctgccagaaaagttatcacgagtgtactcgccgttggaacaaccattgctattgccatcgacggctatctcttatttttaaaagctgaccaagccagctcgactgcatctacagcttcatccagcacaagcactgcaacttccagttctgcttcatctgcttcatcttcaagctcatctgcaagttcatccacgtccagcgggttaaaagacgggacttacagcggcaaatccgtcagcacccagtggggcgatgtccaagtccagatcaaggtcagcgggggaaaaatcaccacggttaatgtcttaaagtacccttcagacaacgaccactcccagcagatcaacgaccaggccctgcctgtctataaaaaagaggccgtcgaggcccagagtgccgacatccagcaggtttccggggccaccgtcacttacgagggcttcacccagtccctgcaaaacgccatcacccaggctaaagaaagctagtggccattatgactgtaacctgccttaaccagacagtggaagccatgaccattcctttcactgtttctgttgctgttcaaggagaggcatccccggacttgaccccggcttttacagacgcctgtagaaaaatttatacagaattaaaaagaatcgaagctgatttctccgcctttttgccagactccttagtcagccgctttgctgaaggcgataagagcatccttttagccaatgctgaatttcaagaagtgtacgcggccgcccttttggccaaagaagaaacagccggtgcctttgatccctactttgccggcaaattcgacccgaccggcctggtcaagggctgggcagtgaaaaaaatctttgcctcctgtctcatgcccctagctgcttttcccgaagtcaccggcctctgcatcaacggcggcggggacctgcaggcctggaccaggggcgacttccgctggaagaccggcattgagaacccggcccagccccgcctgctcttggctatctatgatttagccagccaggccttggcaagttccggctacacctaccgcggccagcatgtgactttaactggccccgctgacctcagccaggtcacggttttagccccagacttaacttttgctgacatctgggcaacagccggcctggccatgggagaaacagcctttaaggagcagattgcccaaagaagactcagcggcttatatgccagaaaagacggccagctggccttgtttacagaaggagacctgcaatatgttcaaaaagcatgactacaccctgggcgtcttatgggcggcggcgatttttatcctccccctgcccttcatccagaccctggaagccggcctgccggccatctactatccgcaaaagctgcccatcatagccggaaccatcgcctatgtctggctgctcttagccatttatcttagtacccgcccgcgctggcttgaccgcttgatcggcctgccaaaggtctacatgatccacggcatcatgagcctgggcgccatccttttagcctggctgcacatgcaagggtcaccttcagcaggcctcatcaagcagaccggcaatatcgccttttacctcttcttgggcctggcggtttactccatggtcttcatggccggctggctgaccaagcgggtcccatttttggcaaaaagcaagcaggtcctggaggaaaaaatcttcaagcacgagctgtccatttggctgcaccggttaaacctgctggccgtcttgctggtctttatccacatccagctgatcccttacatccgggccatcaccccctttatggcctggatctggcttaccacggtcttcgtttttgccagctacttcatcagcctggccaaaagccgggggaagagcaacgcggaacttctgtccagccgcttgatcgccgacaatgtcctagaattgactttaacgactgaccagaatttgtcagactttgaggcaggcgacttcgtcttcctttccttcccagaagaaaaaggcctggaagaaccccaccccttctccttcgtcaacctcccgcaagaagaaaagcaggtcgttttggccatcagaggtgacggggacttcactagacaattgcaagagctcaaggcgccggtcaaagcccgcctcagccccaactttggccgctaccaggaagcaattgacgaagccaagcccaaccagctcttgctgatcgccggcgggatcggggttgtccccctcctgtcggtaattgacggcaatcctgacttgcctactaaagttttttacaacgcccacaccaaggaatccttgatctatgaggaaaaattctactactggaacagccgggacaatttccagagccactgccaagtgggccggtttaaagatgaggaaattttggcttccctgcctgaagacttttccggtctccaggttttgatcgggggtccccaggtcatggctgaccactggctcaagctcttaaaagaaaaaggcctgccagccggtcagatctattatgaagaatttgactggtaaaaaataatccaaacaaaaagtgagacccagcggtcccacttttttctgtgtttctgaattactaattagcgatgtaggcatacttgaagttgtagcagacgccggcactgttgtagataatgccattgaccttgctcttgatcatccaggccttgttggcttgagttaaaggagttaccccctggttgaccatcaagatgttttcagccttggccaaaagcttcacgcgggcctccccggaactggtcttagatgccgcgatcagcttgtcgtattccttgttgctccagctcccgtagttgtaggagttaccagtcgtttcacattccaggaaggagatcgggtcagcgtagtcggcgatccagccggacaaggtgcattcaaagttgccggccaagacccggttgagcttggtcttggaagggatgctctgcaccttgacggtgatcttgtcgccaaaagcagtttccagctggctctggacgaattccgccagtttcttggaagtatcgtcgtcagaagccaaaagggtaaaggacaatttgcttaggccctcttccttcaagcccttttcgaagtactgcttggccagctgcttattgtagctggtgtactttttagcctcgctgctggcggccagcttggtgaagtcctcaccgttgacagtagtcaatccgctggaagtaaaggtcgtcgctaccttgtaggtggcccctaatgtcttggacaggctggaccggttgatggccatggagatcccccggcggaggttagtactcttaaacttgctgtacttctttaggttgaactggaggtactgggtgttggccacttttctgatcgtgtagcccttagacttggccagttgcttggaggcttgggcgtccaggatggtcccgtccaattttcctgcctggtagaggttgtaggcagttgacggagacttttggacagagtagttgatctgagtcagcttgacgtccttcttgtcccagtagtacttgttcttgaccagcttccaagagaggttggagccagaccagcccttgtgcacgaatgggccattgtagaccatgtatttagaagcggtcccgtacttggatccgtacttcttgactgcctgttcattttgcgggaagaaaagcgggaaggccatcaagagcttgaagtatgggatcttccgctctaagctgaccacaagcttgtacttgcccacggctttgatgcccagggtggaagcctttttcttaccggcgacgatcgcgtcagcgttttcaatcccggaaaaaagataggagtattctgacgcggtcttggggtcaaccgtccgcttccaggagtagacaaagtccttggcggtcagggcctggccgttggaccatttggcattcttgcgaatattaaaggtccaggtcttgccatctttaaaaacggttgccttggttgccagggcgcttttcaccttggcattgttgcccagggtgtagaggccctccatgacttggttgacctggttgaaagaaacgtcgtccatgatcttggacacgtcgatggtggacagttccgcctcttccatccagttcagcttttgattggccgcggtcttgctggaacttgccccgcaggcagccaagagggttgacgtcatgacggccagaccgcccaggataattttgctctttttcatttattttttgcctcaaatcaaaccagactggttcaaggacgcgcggtgaaccagcactactgccattattcctaaacctgcatgtcgcctgtagtttctctcctgattcatcgcttgtcacgctccttttattgaggtataaattaagctttaagtttttttcattctatcagctagggcggaaattgcacgcatctttttgagaaaaaacaatttttaagcaaaaagggctgaaataatgatggtaaacgtagaaatgatccaagtagtacgctattcatcat

SEQ ID NO: 2165 - DNA, 48499 bp, Unknown
  gut microbiota DNA sequence
tcagcttcccaattgcggagagttgacttagcaacattaagatattcagctgcttttgatatggacatgtattcgctcattatttcttcctcccaatcttttgataccggcattatatcatgaattggtaagaaatattactatttagcactggatggaattaatactttttaacagtcacaaccttttctaatggcagctcgcaatttaattgcctatattctagcaaaaaagctctaatattcatatcttgaaaacgattcgttttatttttttaaacaaaaaactctccaggcaaagctggagagttaaatttagcgatatggactacttgtccaggttaatattcttttcgccgtcgacgatcttatccggccgcatggttgggaagaggaggacgtcgcggattgaagccgcgttggtcaaaagcatgaccagacggtcgatcccgatgcccagaccacccgtaggtggcataccgtattccatggcccgcaggtagtcttcgtcgatgatgtcggcttcgtcgttaccggcgtcacgttcagccatttgggcttcgaaccgttcccgctggtcaagcgggtcgttcagttctgagaaggcgttgccgtattcattgcccatgatgaagatttcgaaacggtcagtgaagcgcgggtcatccgcattcttcttggccagcggtgaaacttcaactgggtggccgtaaacgaaggttgggtcaacgatggtcttttcaccaaattcttcaaagaaggcgttgatgatgtggccaacttgccagtaaggttcaacttcaacatggtgttcagcggcaaccttccgggcttcttccagagtcattggctgccagaagtcaacgccagtcagttccttgatcaggtcaaccatgtgcacccggcggaatggcttgcccaagtccaggtcagtgccctggtagttgatcttgccgtcttctgaaacaaccttggccgctgcccggatgatgccttcagcttcatccatgacatcgtggaagtcgtagtaagcagcgtaggtttccagttcagtaaactcagggttgtgcttgaggtccatcccttcatttctaaagacccggccgatttcgtaaacccgttccatgtcaccgacgatcagacgcttcaacggcaattccagggcaatccgcatgtagaggttgatgtccaaagcgttgtggtgggtgatgaacggacgtgcttcagccccgcctgggatgttgtgcaaaactggcgtttcaacttccaggaagtcctgcccgttcaagtagtcacggatggcctggatgatcttggtccggttaacaaagcgctggtagctttcgtggttggtgatcaagtccaggtagcgttggcgataaatggattcaacgtccttaagaccgtggtacttgtcaggcagtggccgcaaagccttggacaggaaggtcacgtgctgggcccggacagacaattcgcctgagtcagtcttgaagacttcgccttcaacgcccaggaagtcaccaaggtcggccttcttgaaaatctggtagttttcttcaccgaccatgtccttgcggacgtagatctggatcttgccgctacggtcatagaggtccgcaaagccgaccttgcccttgccccgcttggccagcatccggccagcgatcttggtcttcggcatatttgcgttcagttcgtccttgtcaaggcccaagtacttttcgtccaggtcgcgggccagggcttcccggtcatatttgcggccgaagggttcaatccccatctccttaagttcttcaagcttttgccgacgaacaagcaattggtcgttaatttcgttctttgccaacgtgtttttcctccatttacatagattgggtatcagcgacgcggtcttgcttctgccgcgcccttttttcgtaaatttcgacgaattcgtcaagcaggtcaaaaacctcctgacgcgtccagacttcatttattttagcacgagtccgggctgaacggggaattcccttcaaataatatgctgcctgctggcgaaattccggcacggcccgcttttccccatgcagctggaccaggccgtcgagctggtgcttggcggtttccaccttttcccggacggactgcttcggcagttcttcgcccgttgccaggtagtgggtcatttcctttaagatccaaggattgcccaaggcagcccggccaaccatgacagccgtgcagccgatctcgtccagggccttcttggccagctgtggggtcgtgatgtccccgttggccacgaaaggaatgtccatgacctgggctacttcatgcagggtttcccagtcagcttcgccttggtacatctgctttctggtccggccgtgcatggccagcatggaagcaccggcttcctgggcggccagggcattttccacggcaaaaatgtgcttgcggtcccagccgatccgcatcttgacggacaccggcttttccacgttctggacaaccttgtggaccatctggtagatcttgtttgagtccaagagccacttggaacccgcgtcagtcttggttaccttcggcaccgggcagcccatgttgatgtcgatgatgtcggcatcggtgtgctggtcgatgtactgggccgcctgcaaaaggctgtcttccgtccccccgaagatctggatgctcatcgggtgctcgcccgggtcgacgtccagcatactcaaggttttctcgttgccgtagatgatcccgtggtcggaaatcatttcgcagacaaccatgccggcgccgaattccttgcagacttttctaaaagccatgttggaaacgccagccatcggcgctaccatcacccggttggggatttcgatttcacgtatcttccaagtagtgtccattgccacctttttcctttcaataactacaactctatatcataacaagaataggcctgaaggacaaatcaaaagcccgctaaaagagcatcccccgttaaaagaggatgctcttcttatctttaccagtatttttccagaggccgcttgtcttgcccctccttgctctggcgggcatgctcagccgcgatcgtcaccaagacctcggccagcttgtccatctgctcgaccgtcacgtattcgtagcggccgtggtagttgcccccgccattgaagaggttgggggtcgggattccctttttggtgatgaagttaccgtcggttccccctctaaaggtctgcacatttggcgccaggcctgctttttcatagctgtctaaggccaggttgaccacataaggccggtccttgaccccgttgtagatattctcgtactgtcggcgcaggtccagctggaagcggtctggcccgtatttttcccctaaggaagcgacgagctttttgaccaaatcttctttagccaaaaattcatcccagtcaaagtcgcggatgatcaagccgacatgggctgaatcgacactgctctgggcgtccgtaaccataataaagccctcgtggccccgggacttttccggcacctggtcttggggcaaggccgccaaaaattccgtcatgatcgtcgtggcgttgaccagcagcccgtaagcttcacccgggtggaccacggttcccttgatcgtcaaatcagcggctgaggcattgaaggtctcgtattcaaagtcgcctggccggccattgtccaaggtataggcaaattccactcccggaaaatcagccgggtcaaagcgctgcccgcccaggccaatttcttcatccgggccaaaagccacatagatgtcgccatgttcaacttccgggtgctcatggagatacttgagagctgccagtaggccagccaccccggccttgtcgtcagtccccagaaccgttttcccgtcgctggtgatcagggtctgcccctttaaggtcagcaggtcaggaaattcttccgggtccaggaaaatgccgttcgcttcatccagggccagcttttgcccctggtagtcccggtggacttgggggcggatggggaagcggtcgtcaaattcaaccgtgtccacatgggcgaaaaagccgattggggcaacgcctgccgtattagcggccaggtggccgatcgcgaaggcagttttttcattgtaataagactcaaggccatagtctttgacctggtcagccagttccttcatcatcttgacttgattaggtgtggtcggaaactggtctttattggcgtatttggactgggtgtcttccttggcgtagtggatgaagtttttttctaaaaaatcaaagtcggaaaaagccatgcctgcctcctatttcttgatgtaaacaagcttgaagtcgtaagggatgcccagcgggttgtaggacacgttcttgacgtagctttgcaccagctgcggcttggccgtctggatcagcgggatagtcccctgttcattcatcaacagcttttcagctgccaccagccgcttccaacgctgaaccggcttgttgccgtagacgttttcggcttcattgagcagctggtcgtacttgctgttggcaaagccgctggtgttgtagctggagtccttttcaaaaacatctaggaagttgatcgggtcacctaagatagcctgccagttcttgatggtcagctggtagttgccagcgctttgccgggagatcaaggtcgtgtatggcagggtcgtcacggtgatcttcacccctggcagttcgcccagcttgctttgcaggaattcgcccacctgcttggcggagtcagtatcgctgaccgtcaggttgaggttaagggacttgatgcccagttccttgtagcccttggccaggtacttcttggcttccttcaggttgtagctgactgcttccttgacataggcttccttgtaaaaagcttccccggtcgtcgggttgttccccatgccggatggaacgaagcccttggccgccactgacccgtcactcaagaccttggccaggctctctctgtcgatagccaaggacagggcccggcggatgttgaagttgttaaaggccttaaccttcttgcggtttaattccaggcgctggatagcggaagccggccggtcgtagaaggtggacttgcccttgttggccttgacttgttccccggtcaggtaagtttcatccagcttgccagcctggtaaaggttgtaggcagttgaagaagtttcgctgatggtttcgttgaccttgtccagcttcacgttcttcttgtcccagtagttttggtttttaaccagggtaaattgcttgttggacccggtccacttggtcagcttgaaaggaccggaggaaatggtgtacttggccgccgtcccgtacttgctgccgactttttcaataaactgctggttttccgggaagaaaagcgggaaggccagcaggagcttaaagtaagaaaccggccggaccagcttgatctgcagcttgtttttgctcaaggccttgacgcccaggctgcttacaggcttcttgccggcattgatggcttcggcgtttacgatctggtagaggtagaaggccatggaagacttggtcttcgggttcaagcttcttcggtaggagtagacaaagtcattggccgtgatcgcctggccgttggaccacttggcgtctcgcaagacaaaagtgtatgtcttgcccccgtcagtaaccttggcgctcttggccagggccagctggggcttttgctttttgtccaggcggtagagcccttcctgggtgttcaaaagagcttggaaggaagtggagtcagtcgtcagtgacgggtcctgggttgagatctgagcactttcggtccaattaaggacttgcttggtttgggactgggaactcttttgctggccgcaggcggctaaaacgagggctgaggcggtcaaaagaccggcagcggtaattttcttcaaggtcatgatttcctccgttttttactagaaacaacaactattaacaaacacatcgcagcttaaaaagaaaaacgcccctgagatcaactctcagggacgctagtagcgtgttaccacccatcattcaaagcaaaaaagcttcctcaacagatgctctgccagaaaaaaagacgcctcttggcccagaggccaagggacgtcttcgcgcgttaccaccctttattcagccccgcctcacggccagggcccttaaagtcttccagtcagaagatctgaacgcgctaacgggcgttaagcgggtccggcttatcagcgactcgccgggaccatgccaacacaagaccatcttcgccagcttccgcctcctgtttctcagcaccaacagttctctgtagaggcttcccctgactactcatcttcttaagctttgcttaatttaaccataattagagcataaagtaatttttaattttcgtcaagggagaaaaagttatttttctagctttctgtccaaaacggcttgcagttctgcttccgtaaaattgtacttgttcccgcagaagttgcagaccagttcagctccgtggtcttcgtcgatcatttccttgagctggctgcctttcaaagtccccagcatgccggcgtacttttccttggagcagtcgcagtggtaggagacctcgtccttttccaggatcttgcagtcatcgcccaggatcttcttggccaagtcttccggcgtcatcccgtccaaaaaggcggatgagagctgcggcagggccttgatccggtcttcagtttcctgcagcagttcttcgctggcccctggcagggcctggagcaaaaagccacccgcggccccgatggtgtcgttcgggttgacgaaaactgacaggccaacagctgacgggatctgttctgacttggccaggtagtaggtcaagtcttcagcgatttccccggacacgatcggcacttcaccggtgtaaggctgctttaagcccaggtccttggttacctgcaaccagcccttgccgacagccttcttaacgtcgatgtgaccgtcttctctggccggcaaggcaacgtggttattttggacatagcccttaacagtcaaatctgacttggccgtaaccacggctgccccaaccgggccatcgcccaagaggcgcaaagtcagttcctggtcgccctttaattctgccccggccaagagaagcgtgcccaaaaggctccggcccaatacagctgaagaagctgaccaggtgtcgtgccgcttttgcgcttcagcgaccaggtccttgccgttaatggtcaaaaggcgcaggtccttgctggcattgattgctttgattaagtagtcgttcatgattttcctccataaaaatagagccgttgccggctctatttcttctattcatccttgtctgaatcgtctgtttgttcagtcttctgactaggagcgtcattgtcgcccttttcaggatcctttgccaggtcgctttcgcttggcgtcggcagagaatcagcagggtcttcttgacttgctgaagcatctggctcagcgagcttggcggcgtcggtttccggcttgaccgcgtcttcgcttggcgttgccagagcttgcttttcagcagtatcttcttccgccttctcttctgcccgcttctgagcagctttcttggcttcttcatagctcaaggccttggcttcagatgggaactcttcgctggacttttcaggcatcttcccagtcttgtagagtgagtagatttgcttttcatccagagtttcgtacttcagcagggcttcagcaatgatccggtgtttttcccggttgttttcaacaatttcaaccgccttggcgtgggcttcgtccaggatcttcttgactgcttcgtcgatcttggccgcggttgcttcactgtaaggcttgaagccgtaaggagtgccttcgccttccttttccagttcaaccatgcccagttcatcggtcatcccgtagttgaccaccatgctgtgggcgatcgccgtggcttgttcaaagtcgtttgaagccccagttgactggtcgccgaccacgacttcttcaccggcccggccacccatcaaaccaacgatttgctcaaagagctgcttcttggtcaagatgaactggtcgtccttcggcagcatgatgttgtagccgcctgcccggccacgaggtacgatggtcaccttgcggacagttcttgagtcgctcaggaccagaccacagattgagtgaccggcttcgtggaaggccacgcgttcgcgttccttcttggaaatcatccggtccttcttggctggaccagcgattacccggtcttcagcttcatcgatgtcggccgcggtgatcttggtcccgttccggcgggctgcgactaaggcagcttcgttaaggacgttttccaggtcagccccgacaaagccaggagtctgacgggcaacttccttcaagtcgacatcgtcagccagtggcttgttcttggcgtgaacgcgcaggatggcttcccggcccttgacgtccggacgaccaaccaggaccttccggtcaaaccggcctggccgggtcaaggccgggtcaagcacgtcagaccggttggtcgcggccatgacgataacgccttcgtcgccttcgaaaccgtccatttcaaccagcagctggttcaaggtttgttcacgttcatcgttgccgccgccctggccattgccacgctggcggccgatggcgtcgatttcgtcgatgaagatgatgcttggcgcgttcttcttggcgttggtgaacaggtcacggacacggctggccccgaccccgacgaacatttcaacgaagtctgaaccagagatggagaagaaaggtacgcccgcttcaccggctacggccttggccagcaaggtcttaccagtacccggaggcccctcaagcaggacaccggacgggattcttgcccccagcttggtgtatcttgccgggttcttcaagaattcgacaacttccaccagttcctgcttttcttcttcttcaccagccacgtcgtcaaagcggaccttgttcttcttcgggtcctgcggcttgacgttggagcggccgaagttcattatgccgccgccctggccgcggctgccgccttggttcatcatcatgaccatcaagacgatgaagaggacagttggcaccagcatgatgatcgttgagatccagttgctggattgtgattcaccctgggtgctcatcttgatgttctcagactgggccaggtcctggaccttcttgacgctggagtcgttttccagcatcgtagttgagaagccagtcaccttggaggaagtgtttccgccaaagatatctgagcttgaggatgacttggtttgacttgacttgtagctaccggttacggagtagaccccgttggacggctgcacgttaaagtccctaatttcgccattgcgcagcttcttcacgaattccgagtaactgatggtttcagttgcaccggaattgctgctgccgccaagggcccaattgattccccagaggagaagcaaaaatacgactatgtagaatagaccattgctaaatagtcgattccgattgtttttcataaatgacctccgtcagatcgaagaattacttcccaaattttaacataaaagccggcaactatcgaagtttttatctgcctttcttgcatgtttttacttggtacaaatacagcggcctttttccttctttaactgcttgctggtagcagcctgcaacataaactgcttcttggccagcaaaaaggctgaggcagttgccccgcaaggccagcggaattccagccgccgcgaaaagcttcttgctcttagtccggcggccgtcttttaaaagcaggcgctggccgtttggcaggctcccggcagataatttcccgggaaatgatatttccgccaggggactttcctctcgcttttcctcacttaacagataacaatttcctctgaaaaagaagggctggccggccacaacttcttccagggggctgggagccggctgcttgaccggataaagccagtagtggccctggtaaaagctgagatggagcccccctttttcctggctttgccggttggctaacagaatccggtccagctggactcttttattgtactttttttggataaaattctccaggtaggccttgaccagctcgctttccgcctgcccggccgctttaggaatccgccagccgccaaagaagggctccggctccggcaacttgccagctgcctgggcaaagtagtcttcttccgccgtcatttcctggctgaagcgccaggcattttccaagaggtccggactctcccttttcaaaagcgggacgacctcctggcgcagacggttgcgggccgtgatgcctgtaaagttggtctcgtcttcgacatattccagcccctgctttttcgcgtaagccaaaaggtccgccttgccaaccgccagaagcggccggaccagcttgacctgcccccgctggctgacaggtttgaggctgttcatttcccggggaatacctgaccggaccagcttgagcaggatattttccagcaagtcgtccccgtggtgggctgtcagcaggtagtctgccttgacctgccgggccacttcaaacaagaagttatagcggtagtccctggccgctgcttccaggccgctttccggatgaagggacttgggccagacgctttcatacaggggaagctggtacttatggcagtaggcccgcagcacctggctctctttttggctgtcagcccgcagctggtggtctaagtgggccacgtagagctgaaagccgcctggcaagcaccgcattaaatccaaaagcgccatggaatccggaccgccgctggccgcgaccaggaaatttccttccaaaggcaggccttcttcggcgaaaaaggccaatagtcttttttcaatgtccatgctttactccctcgtccatacaaaaaacggcccctcgggccgtttttatttcaaggcagcttccagctgctctatttctgctcgcgcctcctggtcaacctggttgaggacccgggcaaagtcgccggcccgcaactggctgaactggttggtcgggtcgatcagatccggatcgttgacccggcggatggacaagtccagccggcccttgcgcaggttctggaccactactctgacctggtcgcctgcctgccagtgctgccgctctcttggccagtcgctgccaaagtcattgcggtgaacaaggccgctcttatgcttgggcagggtcacgaagatgcccaggtctgtcacgttgttgattactccgtcaaggcgctggccaactttgtaattcatcagttatcgcccttctccttgatgttgtagacccgctcaccgtctttagtgtacttgtacttgtagcggatcaccttagccacgtagtcgctgtccttcatatcgtcgcgctcgttggtcagcttttccttattcttcttgatcttggtcaaggttgcctggttctggctgacctgcttctggatcttggccgtccgggccttggtcatggccagctggaagcccaagacggcaaagaccagcaagatcaaggccagcagccggttgcgccggacccggtggacttccctgaatttgatctgccgcttcttcaggcggcgaacatcctggtccggccgcagcggcgttacattttgctgatttcctctgttgttccccatcactgtctaccctatcctaaaatcatataacagattcagtatatcagctttggtgaaaaaagtcattagtcgactaattcgtataagtccccggcttccgcctttttagtcgtttcccgcaagtccaggaccctggccttaattaccctggttccgtaagcgacggcgattacatcgccgacaaccacgttgtagctggacttgacggtcttgccgttcacgcttacccggccctggtcagccatttccttggccaccgttctgcgcttgaccaggcgggaaattttcaaaaatttgtcgattctcatgcttgtctcctgtctgttaatttttgctttttaacttttcctactttaactttttgctcttaaaaaattaccgctggatgatctccgccgcgtccttggcaaaagtgcccagttccgtgaacatggcccgccgggtcagcttgtctggcaaaagcagggtaaccaccaggcgcttttgggcgccaagtgcgatccgggccttccaggaaacatgttccagggccttgaagatgtttggcccttccatttcccggctgccggaatcactgaaaatgacccggatctgggccttttccttgaccagagtcaagatctgggccaagtcgcagctggccttcaggctagccacgttgagcaggttctcaacagctgccggatagtcaccaaagcggtccaggagctcatcttcgatgtcttcccggtcctgcaggctgccgatccccttgatcttcttgtaaaattcgatcttctgctcctggtcggcgatgtagtcttctggaatataagcttccaggcccaggtcgacctcggcattgctctttttgactggcttcttcccctgccgctccttgatggcgtcagccagcatctgggagtagaggtcgtagccgacgctgtcgataaagccgtgctgctgggcccccagcatgttgccggccccgcggatggacaagtcccgcatggcgatcttgaagcctgcccccagctcggtaaagtcccggatggcatccagccgcttttcccccacttccgtcagaaccttgtttggctggtagaggaagtaggcataggccaggcgggctgaccggccgatccggccccgtaattggtagagctggctgaggccgtagtggtcggcatcttcaatgatcatggtgttgacattaggcatgtcgatcccggtttcaatgatggtcgtggtgaccaaaatgtcgaattcccggtccaaaaagcggctcaagatgtcttccaattggttttcactcatctgcccatgggcataggcgatccgggcctctggcaaaagctgctccaagcgggcaaccgtttcttcgatgtccccgacccggttgtgcaggtaaaagacctggccgccccgctgcatttccctttggcaggcctccttgaccgtgcctggcaactgttccaggacataagtctggattggataccggttttgcggcggcgtttccatgactgacaggtctctgatcccgatcatggacatgtgcagagtccgcgggatcggagtggccgttagggtcaaaacatcaatattggtcttcagctgcttgagcttttccttgtgggccaccccaaagcgctgctcttcatcgataatgagcaggcccaggtccttgaactggacatccttggacaaaatccggtgggtgccgactaccaagtcaatactgccgtctttcaggccggccacgatcttcttgctttcggcctggccctggaaacgggagaagccggcaatttccaccgggaagcccttaaagcggtccttgatggtctggtagtgctgctgggccaggatggtcgtgggcaccaagaaggcgacctgcttgccgtcacagatggccttaaaggctgcccgcatggctacttcggttttcccgaagccaacatccccgaccaaaagccggtccatcggcttggccttttccatgtcagccttgatttccgcagtagcccgcaattggtcaggggttggctcataaggaaaggcagcttcaaaggccgcctggtctgatccatccggggaaaaggcaaagcccttctccgcctctctttttgcatacaggtcgatcaagtcgtcagcgatgtcctcaactctggccgcaacccgcttcttggtcttggcccactcgctgccgcctagcttgttgacgtggggctgcttgccttctgaagccacgtacttttgcaccaggctcaattggtcagccgggacaaacagctggtcacccttttggtaggtgatggtgatgtagtcccgctttttcccgtcggtttccaagatctggatgccttcaaagcggccgataccatggttgacgtggaccacatagtcgccaggcttgagctctgtatagctgcgcaggcgctgggcattttccagggtcttgatccgcttcttcgaccgcttgttttggttaaaaagctccctttccgtcagatagaccaggtcgctgtccggcaggacaaagccgctggcatagccgccgataaccagctgctgggtccggccttcttttaagccgtctgcttctgccaaaggcaggtagatgtcatagtcatggcagctccggttgaattcctccgcctgccggcggctggacacctgcaagaccaccgtctgcccctttttggcataagagtccagctcagttttcaaaagctccatctggctgaaaaactgctgcggctcccggctgtcccaggccaaatgctggccaaaacggagccggcccatggagtgggcaatcagactgacatagaggcggtggtggcaatctgcctttagcaccgcgtcaaaatccaggcgcagcttctgccggctggtcatcatcttgctggcgatctggctggccaggtagtcatcgttgatagcgcccatattcttgacgctttcggcgatcagctgccagtcgttaaacaaaagcaatcctttagccggcaagtaatccagcaaactgaaagactcaggtaacaggtagtccaggtagcggtcgtagtcatccggcaattgcccgttagctaaggcttcctgggcgatttccaggctggcggctgcttcctttggcaggtcgccggccagttcccggcccgcccggtccaagtcttctgccgtaaagacgtggtcactggccgctggtacggtcgcttccggcaattcctccaggctgcgctggctggtcaggtcaaaagtcttgatcgtgtcgatttcgtcgccgaaaaattccaggcgcagggggctttctcggtccaaaggataaaggtcgacgatgtccccccgcatagcgaactcgcccggcttaacgaccaggttttcccggtggtagccagcctggttcagccactgggccaggtcgggcagggcaatttcatccccaactgcaaaatgcttctgtccctgttcaaacagggccggggcacttaacggatactgcaggccctgcggggtcgcgatcacgacaccaggccggccgcttaagagcaggttcaagcactgaatccggctgctgagttcatccggtgaactgaccgccgtttgcgtggccaggttaccgtccagggcaaaaagccccaggtcatcatcggccaaaagccggctcaagtcgttgtagcgctcctgagccttgtattcattctcttcgatcaagagcaggggctggcccacctgggctaaataagcctggatgaggacagcaaaagcgccccgttcgactcctgtaagcagagagttcttgatccgggacgttttcgcgataaaagcagtcactgcttgatcttttttcaaaaaatcaattacttgcatgttcgtgtgcttgtctttaattgtaacggttcattaagtactgggcgtctttgccagcgataaagtcgtcaatgatctggtcaaccttggcaaagctggcttccagctccttttgctggtcgggattaaaaggagtcaggacccaggaaaccacgctctgcttgtccgggtgccggatgccaatcttcaggcggttgaatttctcagtccccaggcaggcaatgatgctcttgatcccgttgtggccgcccgacttgccgccggcccggatccgcagcttggcgattggcatgtccatgtcgtcgtggataaccaggatgtcgctggggtcgatcttgaagaacttggccgccgcgcccacggctctgccggattcgttcatataggtctgcggctccataaagatcacgtcctcgcccgccactttctccttggcgtagagggccgtgaacttgtcgcggtccaggcgcaggcccttttcatctaaatagtggtccagggccatgaagccagtattatgcttggttttttcatatttaaggccaggattgcccaaagcaacgattaatttcatcaaaagtctcctcacttgctgtatcttaataattttagcacaactggcaaaaatcttacgctttcctgtcttttaacctgtctttaatttctgttttctgcatgctataatgtgaaagtatgagataagaaaacatttacatgtaaatccagataacggaggttatcctatgttaatcaaatcactggtcatcaagaaagactacctgacgactgtcaacgaacatgctaccctggaagaagccttgaaggtactggaaagctccggctaccgctgcgtgccgatcctggatgacagcggcaagatcttccgcggcaacatctacaagatgcacatttaccgccacaagtcccaaggcggggacatgagcctgccggtaacctacctcttgaagaacgccaccaagaccatcaagatcaacgcgccattcttccaagtcttctttaccatcaaggacttgccttacattgctgttttggacactgacaacaccttctacggcatcttgacccacgcccgcctgctggacatgctgtcctcagcctggaacgtcaagaccggggcttacgtcttgactgtcttgtcaaccaacgacagcggcaacttgaccaagatgaccaagatcatcgccaagtttgtcaacctggccggggccatgactctggacgcgccagccagcgaatttgacggcaagtacgtccgccggaccctcttcaccctgccgcaagggaccacggaaactgaactgaaggccatctgcaagaagctcaaggccaagggcttcccagtcgttgccgttgaagacctggctgccggcatgaacatcatgagcgaagaaaagccaggcgtcttcttgaacgaagaataagcaaaagcatattaaaaaacctccgaagcaaaattcggaggttttttcctgatcttattcgttatcgtaaatccggtccagacggtcgttaaactggcaggccacttcatagtggatggtatccagccagtcagctgcccggcgcaggctgtttggcgctgccggatcagctgagatcagttcaactggcgtgccagccggcacttccttgggcaaaagaaccatgaactggtccatgcagacccggccgacgatcgggcagtaagtgtccccgaccttgaccttgaagccctggaacttccggatccagccgtcagcgtagccaaccggcacggtcccgatccattcgtcttcttctgcgatgtgggttgacccgtagccgaccccgtagcccttgtggatctgcttgacataggtcagttcactgacaaaagacatggccggcttaagggcaaaagcaggctctaagtcctggctgcctggggctgatgaggggttgagcccgtagaggccaatcccgaagcggacaatgtcgctggctacgtccttgtcaaagaggctggccgcggtattgtccacgtggatccactttggcttgaccgtcagcaggctttccatgtgcttgaagcgcttgacctggtagtcaaagtagctggcatcagcagagtcagcggaagcaaagtgggtgaacatcccttccacgaagaaggcatcattgccttgcagatattcgttgactgccttgaagtcttcatcttcgctaaagccgatccggcccatgccggagtcgatggccaggtggatcttcagctgcaggccttccttgcggaggaccttttccgctttcttgagccagtccaggctggacaccggcaaagaaatgtcgttggcggcagccagggcggcttcttcagccggttgcaggcccaagaccaggattggcttgacgatctgagcccggcgcagttccagcccttcatccagcatggccacgcagaagccgtctgctccggcttcttccatcaccggcgccaggcgcgatgccccatgcccgtaggcattggccttaaccacgcaaaagagcttctggcccggcttcaagtgggccttggcctgccgggtgttttccttgatagcagccaggttgatatgcagggctgctggtcgattaactgctgtgatcattttttcctcccagataacaggtgcgatagtttgccgatcgcgcggcgccagccggccggctcttcaagcacgaccacggcgacgatctcgtgatcatcatgcgcgatgctggaaaaaatccgccccgtaaaaatccgcgacgtcgttacgggcgcgccggactcggtcctcaaggtttccacgtcttcaaaggaaactgcctggccaatcccggttccccaggccttggagaaggcctccttgatggcgaagcggccgcccaggtactcaatcttccgcttatgagtcaagtcctggtactgggcaaattcccggtcggtcagaacctttcgggcaaagccgtccccccggtcaacgaccttggcgatccggtccacctcaatctggtccacaccgatatttttgatcatctttccacctcacgctgtttaaataatagcacaaagagaaaaaggccgggacaaaagcccggtcctttttatttttttaaaatttagcccttccggccgtggaacttaaagcctggcttgcgcttctttctgtcaaaattgcgcttgcccttgaagttattgttaccgctccggctgcggctaccccggccgcctgagtgcttgccccggtaagagcgagggttttcaggggtgatagtaaccgtgacctcgctgtcgttagagagttccttcagcaaagcagcggcgatgtcttcagctgagtaattttccagcagcttttccgccgcgtcgtcatacttgctcaaatccccgctcaacaggtcgtccaccttcaagaccgcctgcttcatctgcccggcaaaggcctgggcgtctgtcggcggacgcagaggagacatcttcttcttggtcaagtcctcgatagtccgcatgtagccgatctcgtttggcgtcacgaaggtcacgctcatcccgctcttgccggcccggccggtccggccgattctgtggacgtaggagtccgggtcttgcggaatgtcgtagttgtaaacatgggtaaccccggaaatgtccaggccccgggcagctacgtcagtagccaccagaatgtcaagctccccttccttgaagcgcttgagcacctgcatccgccgggcctgggtcaggtcgccgtggatgccggccgcgttgtagccccgggcaaccaggccccgggtcagttcgtcaacccggcgcttggtccggccaaagaccacggccaggtccggattttccacgtcgatcagccggcacatggtgtcgaacttttcgttttcccggacgcggacgaagtactggtcgatcaaatcagccgtcagttgcttggcctggatcttcacgacttgcgggtcatgcatgaacttttcgcccaaaacctggattggctttggcatggtcgcgctgaacaagagggtctggtcccggttttcagcataggttaagatgctttcgatatcctggatgaagcccatgtccagcatttcgtcggcttcgtccaaaacaactgtcttgacgccgtccagcttgatggtcttgcgcttcaagtggtccaaaagccggccaggagtcccgaccaggatttccggcgccttcttcaaggcccggatctgccggccaatgtccgccccgccgtaaacgacctggaccttggcattttcgtctctgcccaagcggaaaagttcttcctgggtctggatggccagttctctggttggttcaattacgatggcctggatggcttgctcctgcttgtccaggtccagcttttgcaggattggcagaccaaaggcagctgtcttccccgtcccggtttgggcctggccgatcacgtcctggcctgccagagccaaaggaatggtctgggcctggatcggggtggcttcttcaaagcctgacctcttaattgcctttaagatattatcgttcaatcctagttcagtaaatttcaaattgttctcctatttcagtctgtcgaggactcgttccaggtgcatcccgtgggaccccttcagcaaaacgatgtcctggctgtggatgtcgctctttaaatcatcgattaaatggctcatctcgtcttctgggtagtagtgcagattctgctggccgtacttgtccagcagggcctggtaaaggtggttcatctccggcccgtaaaggtaaaggacgttgatcttgtccgggtccaggcaggcagccagacccttgtgaaggtcggctgaccggctgcccagttccagcatgtcagccaaaaccgcgatccggcggccgccttcactgactggaacctggccaaaggaggcagtcacggccttaactgccgttgggttggagttgtagatatcgctcatgatgtcttcgccgcagtcgcccttttcccattccatccggttggccgttggcacgaagttggccaggccagcggcgatttcctcgtcgctttccccgaagtggcggccaaccagaatagcggccatggcgttagccacattgtggcggccgatcattggaatcgagaattcccggtcagtcccgttaatcttgaagaaggaatggtgcatggtgctgcggaggtcactggcatgaatgctgtcagagtccgcgaaaccgaaggtggacttgtcctgggaaagctttgcggctctttccgccaggaggggttcatcaccgttgtagatgaattcgccgtcttcttgcaaaaagtccgtgatttccatcttggcgtcggcgatcttgtcccggctgcctaagaattcgatatgggcttccccgatcatggtgatgaccgccacatccggccgggccagctggctcagttcatgcagttggccagcccggtccatccccatttccaaaaccaggatttcagtgatcggcttcatttccaaaatggtcatcggcacgccgatttcattgttgaagttggcctgggtcttgtaaacgttgaagcgcttggccaaaaccgccgccaccatgtccttggtcgtggtcttgccgtttgagccggtgatgccgaccacggttgggttgaccttctgcaggtagtagcgggccagatcctgcatggccttcaaggtgtcggcaacttctaaaaccgcgatgccttccggcttgtttgggtggccagcttcccacaaagtggcgctggcgccggcttcaatggctgaactcacaaaatcgtggccgtctctttcccccttgatcgggacaaagagggcgccctggctgatctttcttgagtcaaaggccactgaggtaatgaccgtttctgcgtccccttcacaactggtatttaaggcttgggcgatttctgccaactgcattttcattccaatactgctccttgagaataacacttagtatattatacgttgtttagcgctcttcgcaataaaaaagcaacccaagagggctgcttttaaagtaaagagaacgattagttcttcttgttgaagccgtacttcttgttgaaacgttcgattcgaccatcggctgcggcaaacttttgcttgccagtgtagaatgggtgggaatctgatgaaatttcaacacggatcaatgggtaagtgttgccttcgaattcaacagtttctgatgacttcaaagttgagccggcaacaaacttaaaaccagttgctgagtccatgaagcaaacttcttgataatctgggtgaataccttgtttcataattctaaaactcctttgccatagccttctacaggccatagattaatcggttaactctaatatagtaccactatccagcccgtttgacaagggctcaagttaatcttccacgtcccggatgaccacgtcagcgcccagctggtgcagcttttcttccacccggtcatagccgcgcaagatgttgccagcattgttgatcaccgtttcgccgtcaaccatcaagcccgtaagcatcaagcaggccccggcccggatttcgtcagcgtgaaccaccgccccgcgcaggcggctgcccggttgaaccagaatgatgttgttaacgaccgtgatggaagcccccatcttctgcagttccggcacgtgccgggtccgcttcgggtagatcgggtcgatgatgaccccttccccggtcttagccgtcagcaagagcggcgtaattggctgctgcaagtcagtcgcgaagcccgggtaagtcccggtcttgacctggaccatgcgcaggtccccggccgggtaaacgaagagggagtcttcatcagtgtcgatcaccacgcccatttcttccaccttggccaaaaaggcgtcaaggtgttcagcgatgatgttgtggatccggatcccgttaccgatgcaggctgccatggaaatgtaagtcccggcttcaatccgatcagggatgatcgtgtgcggcaccttggcctccaagcggtcaaccccgtcgattctgatggtgtcagtccccgccccgcggatcttggcccccatgttgttcaagaaagttgccaggtcgatgatttccggctccttggccgcgttttcgatcaccgtccggtcgctggccgtgactgaggccatgatgatgttcatcgttgccccaacagaagccatcttcaggtgaatctgggcccctttcaacccttcatcaggcgcggtaattacaatctgctcattttcatatctaacgtcggcgccgagggattggaagcccataatgtgctggtcaatcggccgcgggccaatgtcatcgccaccaggaaaacctacaaccgccttgccaaaacgaccgagcaaagcgcccataaagtagtaagacgcgcgcaagctcttaatcttcccagctggcaggggactcatcttgatttcggtcgggtcaatttgcagggtcgtttcgcggaagtcgcagtgcacgtccatttcgctcaacaagtccatcaaattgtcaacatcggcaatccgcggaactgattccagggtcaccggcgttctcgacaggattgaggccggaatcagcgctaccgttgagttcttcgcgccgccaatccagatgtcgccttgcaggggtttccctccgtgaattatcatttgcttcatttgggaaagtagtccttttcttttgtcaaattatcataataatgttaatagatcttcgtcaaaaaaacaagagaagaggtttctcttctcttgtcattatctattattatcgtacaaaatttagaacttgtcgacctgcaaaccgctggctgccccaataaagcccttgaagaggccttctggccggtttggccggcttaggaattccgggtggtattgagcggcaacaaagaacttcttgtccgtgatttcaacgatttccaccaggtggttgtctggagaaacgcctgagaaggtcatgccggccttttcaaagtcttcccggtacttgttgttgaattcgtagcggtgacggtgacgttcctggatgacttcctggccgtcgtagcattcccgggtcttagtgccggccttcagcatggctgggtacaagcccagacgcaaggtgccgccgatcttttcctggtcgcgctggtcagccatcaagtcaatgatgttgttcttgcagtttggttctgcttcagctgagttggcgtcttccaggtgcaaaacgttgcgggcgaattccacgctggccatctgcatccccaggcagatccccaggaatggaatgtcgtgttcgcgggcgtacttgatggaagtgatcatcccttccagaccccgggtaccgaaaccgcctggcacgatcaagccctgggtgtccttcaaaagttcggctacattgtcttcagtaatgtcttcagcctggatcttttcaacttcgatcttgctgttgtacaggtagccggcgtgctgcaaagcgtcagttacggaaatgtaggcatcttccaattcgacgtacttgccgaccagggtgatcttggtcttgtacttcaagttcttggcccgttcgtccatccggcgccattcgtccatgtcggcaaccggcttcgggctgtcgatgtggaggaagtcaacgaccttctgatcaacgccttgttcctggtaggacaacggcacgtcaaacagagatggcgcgtccaaagattccacgatgtagtcgactggaacgtcggtgaaagtggagatcttgtccttcatttcctgcggaactggcatttctgaacgaagagccagcatgtttggctggatcccgattgaccgcagcatggaaactgactgctgggtcggcttgctcttcagttccttggctgcccgcaggtaaggaacgaaggtaacgtgcacgtacatgacgttttctgagccgacttcccgccgcatttgccggatggcttccatgaacggagttgattccatgtcaccgaccgtaccgccgatttcggaaataaccacgtcagtgtcggtcatttgcgctgcccgcatgaccttttccttgatcatgttagttacatgcgggatcacctgtacagtgccgccgtggtagtcgccgcgccgttcgcgctgcaggacttcctggtagatcttgccagtcgtcacgttagagtacttgctggttctaacgtcgaccaatctttcatagtggcccaagtcaaggtcagcttccgtaccgtcgtcagtcacgaaaacttcaccgtgttggtaagggttcatcgtgccggggtcgatgttgatgtatgggtcgaacttctgcatggtaacttttaagccgcggttcttcagcaagcgaccaatgcttgatgcagtaatccctttccccaatgatgaaacaacgccgccagtcacaaagatatatttggtcattgagctctcctttgaaaaataataaaaaagctccctagcaattagggagctaaacgcacatagggtgcccacgcaaaataataacgacttttcagccgcaagtcaagggcaaaatcctattcttcgtccacatcgtcatcaaggtcgtcgtcatccatttgtgacagctgaccttcgatcccgtctggcaatgagtcgtcatcttcgtcgtcttcattgtcgtcgtaatcgtcatcgtaatcgtcgccggagttgtcgtcagcgtcatcttcgtcagcgtcactgtcgtcggacaagtcttcgtcttctgggtcatcgttttcgtagtcgatcacgtcgtcgccttcagtcgtggccaggaaggcgttgaccttcttgtggtgcttgcgagttgatgcttcgtcgccgtcgtcttctgggtggtcgacttcttcatcgacagcttcaaacttgaaccaggtccgcagggcccagacattttcacccatggaaatgaagcggccatcggtgtttatgtccgtgtaaaattgcggcaagcgctggcgaatttcttcgtcgctcttgttcaggtacttttgcatttcgttaacgatatcggcaaaagccattctttcgccacggtcttccaaaattgcgtgtgcaacttcaatcattgacaattcgttacgatccacgtctttaaaatcagctaatcccacagttgaacgtcctctctattcaatcttgtctattttacacgtcatttaagcaaaaatcaacgagacggcataactaccaattaagtctacaccactaaagaggtcatattcaacttcaagttgctgaccagcggcattttctttcaattccaggcgcttggtttccgacaagagatccagctgccggccctcaaccacgtacttgcactgccccttctcgcctaaaataaaatgcatttgggagaagttgctgtggtcagtcccccgccggattaagagctcctgctcttttacgagcatcttgaccggcaccttttccgactcataaaaaattcttttcaccgcgccgtcttcccgcaattcgccttctgcctgctggcggatggtttccgtttgctcgccctgggtaatcttgctcgtcaaatcgatcttaatcttgctcatctttataaaaaattcttctcctttaacagccgcaagcagcggcctctggcaacttttgctataatttctatagctagtcaagcacatcttactatgttttggcaaaaatataaaacaataagaatggaggatttacttttgacaaaatttgacagtcctaaactggcccgcgaagtcgtcgtccgtgacccggtccacggctatatccacctggacacccaagtggccctggaagtcgtccgctcgcaagaattccagcggatgcggcggatcaagcagctgggcccgacggccttcgtcttccccggcgccacccacacccgctttgagcacaacctgggcgtctacgaactggcccgacggatcagcaacctttttactgacaaataccctagtcaaagtaccggcgacggactctgggaccccagcgaaaacctgctggtgcagatggccggccttttgcatgacatcggccatggcccatactcgcacacctttgagcaccttttcggcaccaaccatgagcagatcggccagcagatcattctggatccttccactgaggtcaaccaggctttgagcaaggtcgacccggacttcccaaaggcggtggccagcgtgatcgccaagacctaccctaatccccaggtggtcaagctcatctccagccaggcggacgccgaccggatggactaccttttgcgggatgcctacttcacgggggcttcttatggggaattcgacctgtcccggatcttgcgggtcatccgcccttatgaaaaaggggtttgctttacggctaacgggatgcacgccgttgaagactatatcgtctcccgctaccagatgtaccagcagatctactaccaccgggtcaaccggtccatggaggtcatccttcaccaccttttgaagcgggcccagtacctctaccaggaaaaagaactgccggttacgccaagtttagccagatttttggccgggacctgggacttgcacgactacttgaagatggatgacggggtcatggagaccaacttcagcatgtggactgagtccagcgacccggttttagcggacctaaccaagcgctacctcttccggcggcctttagccagcgcgaagatcaacgaagaaagcaagcagcttttgccgcaattaaaggacttgatcaagaaggccggctttgacccggactactataccggagtagggtcagcctttgacgagccatatgacgcttataagccaagtggcaagaacgccaacagccagatcgagatcatgcaggaagacggcagcttgattgagttgtcccagctcagccccctggtcaaggccttaaacggaaccctgcagggcgatgagcgcttcttcttcccggttgccatgctcaagcaggcagattttcagcagtacctgaaaaacggggaattgcttacgaaaaaataaggcaaaagaataatttccaaaagaaaacaaccgttgcagaatttgcagcggctgtttttgcatacaggtccttacttgtccttgtacttgttagcgtcgtaacgagtgtcaaagagcggactcattgccttgtgttccatgatcagcttgatagcgtcacccatcaaaggcccaacggaaacgagaatcatcttgtcgaggttcttttcggctggctgttggattgagtcggtcaagaccaggctcttgattacggaattgttcaagcggtctacggctgggccggacaaaacggcgtgggtcgcgcaggcgtaaacttcggtagcaccggcgtccttcaaggcctgggcagccagggtgatagtgccggcagtgtcgatcatgtcgtcaatcaagatggcccgcttgcccttgacgtcaccgatgatgttcatgacttcggcaacgttggcctttggccggcgcttgtcgacgatggcgattgaagtgcccaggaattcagctaattttcttgcccgggtaacgccaccgtggtctggagaaacgacaacagcgtcttcttccaggtggttgctcaggaagtagtcagccaataaaggagcgcccatcaagttgtcgacagggatgtcgaagaaaccttggatttgcggagcgtgcaggtccagtgagaggacgcggtcagccccggcagcttgaatcatgtctgcgaccagtttagcagtgattggttctctggcccgggtcttccggtcttgacgagcgtagccgtagtaaggcaggacgatgtttacggaagcggcactggcccggcggacagcgtcgatcatgatcaaaagttccataaggttgtcgttgaccggcgcgctggtggattggatcaagaagacgtccttgccacggacagaatcgtcgatgtcgacttgaatttcaccgtcgctgaagcgaacgacgcttgaggttgaaagctttaaccccatctgcttagcgatcttttctgccaacggtttgtttgagttaagcgcaaaaagcttgatgttgtccttgtaagacataattccctccgaaaaaaacagcatttaccagttctattctaacaaaatccggcattcttttgttggaaaaaagggatttgtgttcagtttttaagcaaaaaattcctcttactcctattttgacctgaaaaaagagcaagaaagccttttatttttcaagcggatagaaaaaatcgtctgttttcgggcaaagaaaaaagctctgacaattgtcaaagcttcttctggattacttagatgcgattaccttaacggcgctggccttcaggtaggcgctgttgccgatgtagtagtacttgcttcccttgatggtgatagtcttggaaaccttgtacttggtccccttgtaagctacagtactcttccagccttggtaaacgtatgggctcttcttagtgaactttgaaccgtccttgtggtagaaaggagtggtcttcttagttacttgaatttgagttacagtcttctttgagctggtcttcttggaagaagagctgcttgaagttgagctggaagttgaactagtcttcttggagctggacttgcttgagcttgaagttgaactagtcttcttggaagtagtcttgcttgaactagtgcttgccttctttgcgcttgaagttgagctggacttaaccgtcttagttgcagttaccttgacgtcgctggccttcaggtaagcgtcgttgccgatgtagtagtacttagcacccttgatggttacagtcttaactacgttgtagctggtgttcttgtaagctacagtgctcttccagctgccgtaaacgtaaggcttcttcttggtgaacttagaaccgtccttgtggtaaaaaggagtggtcttcttagttaccttaaccttggttgcttgcttaaccgtggtggtcttggcaaaagccgcgttttgagtaagcagggcggctggagtagccatggtcaaagccaatgatgctgatgcaaaagcaattttcttagtaaacttcatcgatatgcaaacctttcttgcttctttttgtacattgcctagattatacaccctctgtttaaaaattgcttattaaagttctcaaaagaaaggcaattttcccttaaaagctactgtaaccggatgcattttacttattaaaaaaaggagccggagctccttttcgagattatttccattcttcgtcttcagacaaaggcagcttgtgccagtaggcttccttgttgacctgccggccccgggcgatggccatttcatacttgccaacgtccttggtaatggttgagtcagctgcgataaaggcatggtcggccacattaatcggagaaaccagggttgacccggccccgatgaaggacttatcaccaaccgtcgtgtggaacttcttgatcccgtcaaagttggagaagatgaccccgcagccgacattgatgtccttgcccaaagtagcatccccaacgtaagtcaggtgcccgaccttggtgttttcgccaatttccgccttcttgacttccacgaagttgcccaggtgggctccccgcttaatcaaagcctttggccgcaagtgggagtttggcccgatgtccgtgttgtcttccatgattgattcttcaatcgtggaagaagttaccgtcacgccgttgccgatctggctgtcaacgattcttgacccggaagtgatcaagcagtctgacccgatcacggtgtggcctttaattgtcacgccgccttcaatcaccgtgtcattaccgatttccacgtcagcgtcaatgtaagccgtggcggggtcgataaaggtaaccccgtcccgcatgtgcccttcattgattcttctttgcatgatccgggtggcttcagccagggcgatccggtcgtttacccccaggctttcgctgaagtccggcatcttgtaagccccgaccttcttgccggccttgcgtaaaatttccaaaacgtcagtcaagtagtactcgccttgagagttgtcgttgccgacttgcttcaaagcagcccacaagtcctggttgtcaaagcagaagaccccggtgttgatttccttgaccttcagttcttccggcttgccgtccttttgttccacgatccgcaaaacattgccctggtcatctctgatgatccgcccgtagccaaaaggattcggagcttcagccgtcaaaaccgtggccgcgttgccttcttcttcatggtaggcgaagagcttttcgaaagtttcactggtaaaaagcggggtatccccggttacgaccagcgttgccccttccaaagcagccagctggccttccgcctgcataaccgcgtggccggtgcccagctgctcttcctgcatggcaaattcagacttgcccgccaagactttctccacgtcttctgccccgtggccgacaatggtcacgatcttgcttggcttgaccgctctggcggcatcaacgacatgttcaaccatggccttgccgcaaacctggtgcaaaaccttgtaaagcttggatttcattctggtgcccttgccggcagccaaaactatgacatattttcccatctgtttgtaaccttctaaatcaaaataagctagccttcatggctagcttatattgtaacatttagaaacggtcgaagttagttctagtcaaaaagttgcccggctgagccaggatgatttccttttcgctgtcgatctggtcaatgttgaccagggaaacgtagtccttgatcttgcgttcctcttcatattcagtttcgcaaagaacacagacgccggccacctggcagtcaaattccttgaccagttgccgcatcccgtccagagtgccgccgcccttcatgaagtcgtccacaatcagaacgttcgtatccttgtccagggcccgggtcggcaactccatcttggctacccgggaagttgaagaggacatgtagttaacggacacagtagccccttccgtcaccttggaccgcttgcgggcggttaccgctgggacgttcaagtagctggccacggcattggccaaagaaatccccttggtttccaccgtcatgacggcttcgatattggcgtaagcatagcgggtggcgatcagcttgccgatcatctccaggtcatatggcccgcccaaaatatctgacaggtagacaaagccgcccggcagaatccggctggagtcctggatgcggcctgccaggtccttgaggtacttctcagccggcttctggcctaagaacggaatatagcggaccccgccggctgccccggcaacggtctccaggatcccatcctcgttgctggccagggtgtgcttcaaaatggccaagtcttcagagattgatgacttcgctgccccgtagcgcttggcaaaaaagggcagagcaatcaaagtatgcgggcgctccatcaaaaacttggtcatatctactaatctttcagaacgtttcattctctttccttcctaatgtctgtttttgtacttatactaatatactctaaagggcaaaaaaaatcactaacattttcaagaaatgttagtgcaaaaattcgtatttttactctgcatcgctttcatcatcaaattccagcaggatgttcttggtcaaaacatcagtgtagctgtatgatgcgtgttcaaaattattactgtcctggtccagagccactacaaacacggcaggaaacgtgttcttcaaaatgccgcggcgtctggttaccttcttacggcccgcttgggcaacgattgtcagctcttcgcctaggtgggtatctaacttctgcttaatgtcttgaatattgattggcaattatgacactcctttatcggaatattataacataatttcctattcaaatcaagattgaattatttattcatttccgctatagcctggctgattctgatgaaatcgccgatggccagttgttccggccgctggcgcgggtccaggtccaggtcgtccagcagcttttcccggtcttccttgtctggaagcaaggtcttcaagttgttggccagggtcttgcgccgctgggcaaagcagagcttaaccacccggttgaactgcttgcggtcgccaacgtcagctggcttttccaaaggcgttaaaaccactacggctgagtcaacctttggctggggcatgaaggaagcgtgcccaacttccaaggccaggtccacgctcatttgagtctgcacggcaatggacagggggccataggccttagagcccggctgggcagccagacgctcagccacttccttttgcatcatcaaggtcaggctggtaaagtccaggctggattccagcaggttgaaaataatcggcgtggtgatgtagtaaggcaagttggccacaaccttgacgggcttgcttaagtcaaaaaagcccgccagatcagttgcaaagtacgccttcaaaacgtccttcatgatcagcttgaagcgctggtccaggtcttggccgtccaccttttccagcagttcgatggccaggatttccggcaggctctggtcgacttcataagccgccaccttgcctccggctaaaagcagctgttcagtcaaagagccgatccccgggccgacttccactacctggtcgccgggctcaatcccggctgcccggacgatcccctggacggcatccaggtcaaccaggaagttctggcccaggttcttcttggcgtgcacaaagtaacgattgacgatggccgccgtccttaccggactagcgattggaattctgttggtcattttccgcctcctctactgcctgcttgagttcagccaaactgatgccaaaagtctgcaggcgctggtaaaaacgcttggaattggcatagccgatccccagcttgatcccgactgcctcccgtaattgccgggactggcggcccatagccaggcccaagtcgacatagtccccgtagtcaaagtcagccttttgggcttggacctcgcgtaagtcgctcaaggcccgctctaaagcttcctttgaagcgtgctctacccccaggctcccctttttttgcggttcgccttctttgcgggtaataaaggcctgcttggccgttggcacggcttcggtcactatccggcggatccgctcgccattgacgtcaggatcggtaaaaacaataatctcgcggctttgggccagcttcttcagcttggccaggaccgcatcagaaacggccgagccattcgtctcgaccgtctcaattcctggaaaaaactgctttaagcgcatcgtatcgtccttgccttccacgacaacgacggcgttaaaattcttctgcatttaatccgtaaatcctcattgtattagcataagttgcttccgcaacttcggccagatctagccccttcaagtccgcgaccgcctgggcaacgtagcggacatagccaggctcgttttgccggccccggtaaggcaccggagtcaaaaacggcgcgtcagtttcaaccaaaagccggtccaaaggaaccagcttggctgactcatgcacttccgcggccttcttgaaggaaacgaccccggagaaagaaaagttcacgttcaagtccaggaacttttccgtccattccgggcccccgttgtagctgtgcaaaaccgccccgtattccaggtctgcttctttcaagatctgccagcagtccgcgaaggcgtccctggtatggatatttaccggcaattgcaaatcgcgggcaacttcaatctgccgggcaaaaactttcctttgcacatcccggggagactcatcccagtagtagtccaggccgatttccccgatagcgactacctggccgcctttaacttgctcaaccagcaggtcttcagctgcctggtcatagtctttagccacgtccgggcagtagccgatgatggccttgacattggcaaagcgcttagctaattccagggcgcccaggttcatttccgggtcctggcccacgcagttcatcccaaccacgtccaagtccctggctttttggatataatcggcttctttgccggcaaaaggcttgtcgtttaagtgggtatggttgtcgtagatcttcattagcccagttcagcccctaccgggtgttcgtcgccgaccagggccagcttgacatcgccgtcagcttcgctggacaaaagcatgccctggctttcgtgtcccagcatcttgcgcggcttcaagttggttacagccagaaccttcttgcccaaaaggatgctttcatctgggtagaacttgcggatcccgctcaagatctgccgctcgccggtcttgccaaagtctagcttgaacatcaagagcttgcttgatcccttgactggttcaacagacaggatcttgccgacctggatcttgaccttggcaaagtcgtcgatcgtgatctgcttttcttcctgcttttgttctcttcttgactgtttctttggcttggccttcttcatttcttccttgatgtaggccacttcttcgtcattcttcaagcgtgggaagatcggagttggcttggcaacgacgtttacgtcccaggcaaagccgccaaactgcaagtccttctggctttcgtcttcccagtccaggcccagctgggcaaacatcttgcctggagtttcggtcataaccggagcgatcatgatggctaccaggcgcaggctttccgccaggttgctcatgactctggaaagttcttcagtcttgccttccttgttcaaaacccatggggtagtttcatcgatgtacttgttggcccgggaaatcagctgccagacattttccaaagcgttggagaagtgcatcttgtccatgttgccgtagtagtcgctgatggccttggcagcaacggcagccaggtcttggccgtacttgtcctgttcctggtcaaccggggcaaccaggcccttttggtactggttgatcatggaaacagtccggttcaagaggttgcccaggtcgttggctaggtcaaaattggtccgttcaacgaagtcttccggggtaaaggaaccgtcagccccaaatgggatggcccgcatcaagtagtagcggaccgggtccaggccgtagcgggaaatcaaggattccgggtaaacggcgttacccttggacttggacatcttgtccttgtagatcaagacccagccgtggccgaagacctgcttaggcagcggcaagtccagggccatcagcatgattggccagtaaatggtgtggaaacggacgatttccttgccgaccaggtggacgtcagctggccagtacttcttgaagagggagtcatcttctgacccatagcccaaggcagtgatatagttggccaaggcgtcgatccaaacgtaaacaacgtgcttcgggtcgcttggcaccgggatcccccagtcaaccgtggtccgggtaactgacaagtcttccaggcccggcttgatgaagttgttcaccatttccttttcccgggagtttggctggatgaattccgggtggtccttgtagtactggagaagccggtcagcgtacttgctcatcttgaagaagtaggatggttccttgaccaattgaacttcgtggccagatggggcgatcccgccgacaacgttgccctggtcgtctttgaagacttccttcagctgggattcagtgaagtattcttcgtcttcaactgagtaccagccggtgtattcacccaggtagatgtcacctgaggccttcagcttttcaaaaatcttctggacagccttgacatgttcttcatcagtggtccggatgaacttgtcgtagttgatgtccagcttcttccacagttccttgatgtccttgaccatgccgtccaggtaagcctttggcttcatgcccagcttttcggccttttgttcgatcttcaagccgtgttcgtcggtcccggtcaagaagaaggtgtcatagccgcgggccttcttgtagcgggtcatggtgtccgctgctaccgtcgtgtaggcgttgccgatggtcaaacggccagacggatagtagattggcgtggtaatgtaaaaagttttcttgttatctgccatagtgcttgatctcctcaaaaattctatactctctatcatacaacaaaaagccttagcttataaagcctatcggcgatttaacgggctttcgggcaaaaaagaacggtctttttactaaagaccgttctttttcagttaaatcaagaatttttccttcttcatgtagaagtgcttgacgactgtcgtcaaaagcaggtagcagaccaggaggccagccacgatccacaggaattcttcgttcaagtggacgaacttcatggctccggccaattttgaaaatggcaggaaggtcccgaagatagcagccccgaaagtagcaagcatgactgggcttgatgcccgctgctggataagtggcagacgttcgtcgcgcaaggcatggatgaccatttcctgggtccagagggattccacgaaccagccggtgtggaagatggccatgaaggccagctgccctgccggtcctaaggaagcgtagctgccgccagtaagggccgggcagattacaaagaagaggacggcaaaggtgatgacgtcaaaaattgatgacgtcggcccaaagtataacatgaacttcggcatgttcttggttgaccattcccgcggcacgtgcaggtagtcttcagacacgctatcaaagggcaaagccaggcagctggttccgtagagcaggtccaaaatcaagagctgcagcggcagcattggcaagaacggcaggaagactgaggcgaccatgatggacaagatgttcccgaagttggaagacagggtgatcttgatgtacttcatggtgttggtcaaggtcttgcggccgatccggaccgcgtgctccaggacgctcaagtccttctgcaaaaggatgatgtccgctgattccttggccacgtcgacagctgagtcaactgagatagagacgtccgcctgcttcatggccggggcatcgttgatcccatcacccatgtagccgaccgtgtggccgtttttctgcagggcatcgatgatcttggtcttccattccggtgacagcttgacgaagatgtcgcattcttcaacgatcttggccagttcctcatcgctcttgccgaccaggtccttttgcccgtaaaccgtatcgatgttaagaccgaccttcaaggccacggcccgggtaacggcttcattgtccccggttaaaatcttaacggtaatgccgtcccggttgaggctagccagggcatttttggcgctttcctttggcggatccaggaaggtcaagaagccgatcacgatcaagtctctttcatcatcaaccgtgaatttgccgactggagacgggtcaaccttgtaggccaagacgataacccgcatcccgtcactgttcaagtcgtcgatatctttaaaaatctgcttttttctttcttcagtcaaaggcaggatctggccgccgatttccacctggctggagacggccagcatttcttcagctgcccccttggtaactaggaggtgctcgccgtgcttttggtcagagttggcaaccaccacgctcatccgccggcgctggaagtcaaaaggaatttcgtcgatcttgtggtagtcccgctggatttcgctggtgtccaggtcgtcatcagccacgtcaatgactgcctggtcgatcaggtccttcatcccagtttggtagtaagagttcaggtaggccatcttcaaaacccggtcggtttcctgcatttccaggttatagtgcttttccaggatgacctggccctgggtcaaggtcccggtcttgtcagtgcagaggatgtcggctgaaccgaagttctggatggagttcatcttcttgacgatggtctggtgcttgctcatttccaagctgccccggaccaggttggtggtcacgatgactggcaacatttccggcgtcaggcccaccgccgtagcgatggcgaagatcaaagcatcagtccagttgcccttggtcaagccgttgaccacgagaaccagaggcgtgatgatggccgtcatggtcaagagcagcttggagacgttcttgatcccggtgtcaaaagtcgtctccttcatttcggtgtcggcgatctgagctgcaatcttgccgaacacggtgtgctcgccagtggcgaagaccaccccgcggccggagccggagacaatagtcgtgcctttaaaaaggatgtttgggtagtccaggtagttttccatcttgtccggggttgggacaaagttggcattcttttccgtcggcgttgattccccgttcaaggaactggctgagcagaacaggtcagtgctggacaaaagcttcatgtcagctggaaccatgtccccggctgaaacgttgatgatgtcgccgaccaccacgtccttggtcgggatttcctggtccttgccgtcccggcgcacgttggtcgtgacagaaaccatcttcaaaagggaccggacggcgttggaagtgcggacgttctggatgaaggacgtaatcccggaaaccagaaccatgaccaccatgatgataacggtgctgaggtccttttccccttgcggggcgaagatgtagttggtgaacaaggacatcgtcgccaaaatgagcaggaccagggtaaacggagtcaggaaagcttcgaccaggaagtggagcttgctggcttggttgctgctcgcgatctcgttggttccggtcttttcccggatattggctgcttcttcagtgctgaggccgttgctgctggtatgcaattgggccaaagtcacgctccgcttttccagggcaattcttgcaacccgctttgcgtcatcgctggcagctttgttcattgtcttgttgagcataatagttctcccctctatgacaacttcgcaaacgaaccaaaaagtcccccttacaaaccgtaagggggaccttgcaaaatagggccacgccattaactaatcgctcagctttaacactacgtgacgtaagcacatgctagctacctggaaagtgccttatttcgacaatttctatttaacccgttggcatctctggatgtttctgggcgatagcgtgtgttcacgtaggagtctcacctaacagttcatttgctctctttttaactttacatagaagactatacacgcttaaagcaggcttgtaaaccacctatatgtaaagttagcgtttttatttgttttttctgtgaaaaagctttattttctagcctgccgtcttatcgtaaagcgcaggaagatgatcacggccgcgatcaagaccaacagggccagcatgatcggaattctgaggtcagctggcttgatcacccggttaacttcctcgctggacagatcaagggagtcctttttaaagccgaggctttggtcgatcaaggtcacggaaatcttgaacagctcctgcaccccttcattgaaggcgatcgggtcatcagccgtgattttggaagccgtgtggctgaggatgttggcccggacctgggcggtaaactggctgtgcaggtcgctgctgctgtaaagataggccttcttagtcccgtccttttgcacgttgatcacaatatagagggttctgcttgccttgctcaagccggccggctgggtctttttggcattttgcagggtctcgacgatcacgatcgggtgctggtcagacttctggtacttggcattcttttggtcaaccattttccaggtgtcggaattgatgatgccggcattgtcctggacgaaaaagctgctggccccggtcaccaggggaaaaaggcagactaaggccaggagccaggccagcctagtcgctgctgtcttcaagtttgtgtgccagttcttcgacgaattggcggtcaagcttaatttgttcataaggtactccactatcacgcagcagctgaatggccaaaggactgtcgtgataatcataataatagttgatcttggtcaccccggcctgcagcaggtgcttggtgcagttgtagcatgggaagtgagtcacgtagatttccgtgttgtcggttgagaccccgtttttcgcgcaggaaatcagactgttcatttcagagtgaatcgtccgcacgcagtggccatcgaccagctggtggcccacgtcatcgcagtggtcctggccggaaactgacccgttgtagccagtgctgaggatccgcttgtccttgaccaggacgctgccgaccagggcccggtcacaggttgaccgctgggcgatcaccagggcctgcatcataaagtactgtttccagggaattcgtttgcgcgtcatattagcctcggttcttgaagtagttgaagccgatcgcgtcacggacttcctgcaaggtttggtcagccacctggttggccttttgtgacccttggtagagcatgtcgtaaacggcatccaggttttcagcgtacttttgccggcgttctctgattggggccagttcagcttccaggaccttgtttaagtagcgcttgatcttgacgtcacctaacccgcccttttggtagtcttccttaagttgggcaacagtatccttatccgggtcaaagacgtccaggtaagtgaagacggtgttgccttcaacctggcctgggtcctccacgtggatgtggttagggtcggtgtacatggacataaccttcttcttgaccatttccgcgtcatcagacaggtagatggcgttgcccagggacttggacatcttggcgttgccgtccaggcctggcaggcggccctggcccttaggcgggaagtagccctttggttcaaccaggacgtcgacattgtaggtccggttaaagctgcggacgatttcccgggtttgttccagcattggttcctggtcatcgccgactgggactaaggtcgccttgaaggcagtgatgtcagcggcttgggcaaccgggtaggtcaagaagccgactggcagggagtcaccgaagcccttttgcttgatttccgtcttaacagtagggtttctttccagccgggacagggttaccaggtccatgtagtcagtggtcagttcaaacagggccgggatttgggactggacaaagatggttgacttttccggatccaagccaacagccaggtagtccagggcaacttcgatcagggagttgcggatcttttccgggttgcgggcattgtcagtcaatgcctgggtgtcagcaatcataatataagagtcatacttgccggtgttttggagcatgacccggttcttcaaggagccgatgtagtggccgatgtgcagcttgccggttggccggtcgccagtcaaaataatttctttcgtcattcttcgctttcctttgctaaattctttgttaaattgtttctatcgggcgttattattatcattttagcaaaaataacaaatagattaaaccactcccgccgggccggaagaatctttttgaaaaaaagttgccaaaaggacttggcgaaagtttttttccatgctatacttaaaatatcttgcgggtatagttcaatggtagaacgctagcttcccaagctagagatgagggttcgattcactctatccgctttttttataccataaattaacaaagaaataagcgaggccaaacggccccgcttattttttactctcttcagttaaacggcgatggtcacaaccgtcaagaccccgtttaaagcagccaggtaaagaggcagccagatggtctgggtgctgaggtagctccaggcgaaaagcatgccaaaggcaaagttgaaggcaaagattgccggagtgaactggaaggtcaagatagcgtaaaagagacccgagcagattatgccgacgtaggccacgccctttttctcagttctgaaccagtagttgaacaagaaaccggtgcagaggtactcttccaggatcggcaagactaacccattggctagcatcatgaaccagtataaggcgctggtggaatgagaggcataggccagctgcagacccgaggcaggcatgcctttgtagagctgcaggtaggaaatcccgatccggccggcggcaaccacgaagcttaagagcaaggtgaagttgaaactgctcagccaggggacattgaagcgtgaatcgaagaagcgctgttcacggttgtagcggtaaatgtaaaaaagcaggcacatggccgccagaaccaggaacaggatcacgttccagatgctgatggacgggctcttgatcgccaggttatcggccagggccgtgaaaacaaaaactacaaaatagacgaggtaacggacaaagttaccttcgcgtgatcgtggcgtattcatcttattccactcactcctccgtgaaacatttgtaattatcttattataccaaagaaatcgggccctttttggcctttgtatgaatatttttggttacttttgccttacaatgtttcatgctttttacctggagggatgaaaaaagtgccgccaaagccggaatatctggctcaagcagcactttgcttgtgattgcatctgaatttattacaaatgtctctggatctgctaaaaaattaccaacaataatagaaccactttgaagctctttatttttttaaattctattgacatatgtatgttttctttctaaaatgtgttttacattaatttctcatgagattattttatcgtttattggaattacaataagtataactttcgaaaaagagcagtctaactttagaggaaatagaaaatgattattgctgatagtctaaatattggttataaagataaagttgttgttcacgatttatctttctccctggataaaggaatgtttatcgctttaatcggcgctaatggtgccgggaaatctaccttgattaacagcttgattggcgtcattccaccagtgtcgggtcagatttcatggaaactgaaaactgatcgggttaatcctttcaacgatgttggcttcagtccccaaagccagctgattgattggtataccagtgtctctgacaatgtgtatcaaggaccgcttctcgctggctttaagcctaaggaagcccaaaaaacaaccaagcaggccttaaaactcttgggtattagtgatttaagtgctaagccggttgatcatatttctggtggccagcagcaacgagtacaaatcgccagagaaattgcccgtgagccacaagtctacatactagatgagcccacaaccgggctcgatgtggaaacttcggaaaaactatttacctacttaaagcaaaaagttgatgctggaagtattgtattaacttcttcacatgacttaactctgctggaaagctacgcgagtcacgttcttttcttagacgatcatgaacaaaaatactttggtccgcttactgattttttggacagtggtacgagcttgcgagaaaaataccttaacgaacggaaggcgatagaaaaatgaatccgcaacattttagaaatatatctttgggattacggtcgatcagaattgttgccaacaatgagtggcgggctttcgtgcataataaaggcttgctcttatcaatgttcatgcaaccgcttattacttatggtttgttggtcatggcattgaatcaaaatttagcttccgttcactacgaatcactaattttgccctacaagcagtatgcattgaccggtgttttgagttttttcatgaccacccagatgtcgcaagcaatgtaccgggcgacagttgataaagaatatggtttactggctattaaatttacgaatggtgttcaaccatggcactacctaactggaatgagcttcttcccaattgccggtctcttatttcaaagtgctgtattgattgttcttggacttgctacaggtggtgtgtacaatttagggttattgctactatctctgcttgtattaatcatctcacttgaattctggtccacgttgggaatcgttcttagcacacggatttcttcttaccagcaacgagacattatcatgaccttgattttctcaccagttgcatatgctgcgccaacgctttatgtcttcagcaataattctccactgatcattaaagtgttggcctatatcaatccgctatcctaccaattaaaggcgctcagaactgtagcctttggcatatttaacattaacgatttgttaattgctctagcacttacaattataatgattatttttgcccagataattttacgtagaatgccattaagtctggctgaaagatagtatgcgtaaaatagttgaatatattttctgtcgcgactgtaagaaagtctatttttacttgcatggaggtcccttatttacccttagaaattggcaagaagaccctttcgcaactatgctctacaatgagcaacggaattttattttggtgaactaccctattgtttatgatgacggtggaattagtgactaccaatttttaaaagaatatttttgggagtataaaagacaacatccaaatacagaaatggttttactaggagaaagctgcggcggatacctagccagtctgtttgcagccgaatatatattcagaaaaattatagcaataagcgcgttcaccagtattgcttatcaagagttgttttcatctgagcgatcttggcttaaggactatctttcagaaaatgcgcttgatttttacactctatgtcgggacaataaggtaaatactcgaactatttttataaacggctctagagattcaagagttccctatcagcaaattttagcgctaccattcatgaagaaattcaaagttaatatactacctggatttactcacagagaaagcgggacgaggcttgaatatgttgtctcgttaatcaaacaagaattgtaaactaaatagatatacccccatatttcaattttgggggtattgtttatgcctaaataaactatagatagcagaaaaaagtgccgccaaagctggaatatctggcttaagtagcactttgctttttctattttagtccataatcgcgcagctcatggcaaagtagaccagacccaggcaggaaaagaaaatgacgactggccagacagctttagcgacgtttttttgccggatgccgctgacaaccagatagatcaccaagccaagcaaggttaaaaggcctagagccacgattaagaggtggtgccacagccagaaaatcacactgttgccgacaacaagaaaaactcgttcccaaaacggaaggcgtgaagcttggtacatagcgactcctccttagagatcaaatatcatacctattctgctttagttgcgataattgtagcaccaatcatgagaaaagcgtagcagttttttactttttgctcagaataaattaataagtgctgttgaagaaggaataccaagcttcagcagcacttattttaatatgattaatttttcagtagattacttcagaactacgccattagcaccaactgcagagtagcgggccaaatccagttgcaagctagtaacggcctttggcagttcgttttcagcgaagttggaccgcaattgggtgtccaggttagacgcaattgagcggattgattctgacttttcagtcttcttaacagctgcttcaagcagcttgctcaaagccgcgtttgccttgactgccggatcatttgcgacagtttccaattgcttcttgaacgcttcttctgcttcgttttctttcttgttaaaaaacatcgtacagcctcctataaataaaaaattaaacaatatttttcgcttacattctagcactgtttgtaattggtggaagaacttttccttatcagctcttgccatcattctatattttttacttcattttttataaaagggaccaattctgttgttatcgagactgatcctgttcttctccaagtgctgcgatctgcttcttcttatctctcgagaagtaaactatatctccgtttggaaaagttacgtatcttttagccaaatctacgctaacaacattatccggattgattacgcatgactgtgaaacttttagcaaaaaatcattttcttcatccagcttagaaatgttgttcttaaattcgctgtcaccatttgctgctactaaatgaactttgtgttgcatcgtgctgttttcgatatagtaaatttcagaagcgctgactctttgtaagtgccggccgcacttgtagctaaaatactgatggtttacgtgacttaaaaggtccaggttatcaaaggctgcttgtagagtttcctttagccgttgcataaaggcggcagagggcagttccttgttgatgtaatcaattgcgccaattcgccgacgataggtcaatggggcgtatttatcatacgctgtcacaaagattatctgcgcgttgggatcacgacttcgaataaactcagccaagtcaatgcctgtcttaatccccttgttcaattcaatgtctaaaaaataaagtgcattagtcgtttcgttagctaccaaatagccagctacctcttcaaaactgttggcaaccaatgctaagtccaccttgctctgccggtaattttcgttgtcatctgacaaattctcgctggcataaactatcctttgagcaaggctttcagccaaagacgcatcgtcatcacacacgataaccttatattccaacttactcatcctcttcttgatcaatcgttaagtaaaggtcaaaacagccatccgaaacattgtatgagatatctaattccgaatacttttgttcgatatcttgcaaatttgccaaccctagcccttgatgtcctgttttcgttgtaaagcctttagttgctagatttgtatgctgtcttttatccggaacgatcttgtttcggatttcaaactccaaactatctgttgtttcttggtaaagcatcgcctgtatctctggatgaccatttttttctgaaagagattgactctcctctaatgcattgtcaaaggcaatcccaattactctaactaagtcaagttcatcaacattgcctgggattgacgcaattgtctgccgacattcaaaatcataaggaatgcctgcttgatatatggcattcagcttcgtgataatgaggctcttaagagttttaacttgaatatggtttgtgtctttgtacttaagaagagcctgagaatcgaggttttcagcagaatagcgttccaatttatctaacagctcttgaacattcccttcagctgcactgacttttagagaattcagcagattccggtaatcgtgcctaaatgcccggagattatcttcactttgttcaaggtagttggcatattcctccagctctttttgcttttgctgctgtaattgggctttaaaacgtgcatcctctgcccttcgcaaagcataataaacgatccagctaaaagctgcttgcccaattgacaggtaagaataaacaataacagaaggtttggcctcatcaagaaaaatattgatcaaattaactaccatcaatgagcagaatgaatacgctaataaactccaaaatatttttcggtattggtcttccaatctttgcagtagccattgtcgaaaatgcttaatcaacaaaatacatagaggatagtaaaacatactaacctagtgttggatgattactcgacggagtagtcgttcaacactttttcttttactatgtaaagtggagatgaagccaatgccgtgagctctttggacacacgatgtcgtaagtaaaacgggcagcttcaccattcaattgagaatctcgtctaagtatgttggctgttaaagtcctgttgagaaaattagatctgattgaattgggtgaaggcagctcatctccgagtaaagcggaggtttattcttatggatttattgaaaactgt

SEQ ID NO: 2166 - DNA, 69121 bp, Unknown
  gut microbiota DNA sequence
aaactaacctaaacactctgagtacttctaagagttgtcgatcttacgtgtaatgtgttgggtggcccccagattcctgcgactttagtcgtaggaggttcaattggttagcggtaactgcttgcatccgcgcttgtttttcctatactaaacttgtagaaaaaaatgacagcgcttcagatgaatttagatgagagtttgaggaaataaaatgacagcagaaaagcaagaaccatggtggaagcaggccgtgatctaccagatctatcccaagtccttccaggacacaaacggcgacggggtcggcgacctgcgggggatcatcaagcggctggactacctgcaagacctgggcatcgacgccatctggctctgcccggtctacaagtcaccaggcgtggacaacggctatgacatcgccgactacgaagccatcgacccccagtatgggaccatggcggacatggaagaattaatcagtgaggccaagaagcgggggatccgcatcgtgatggacctggtggtcaaccacacctctgaccagcacccttggtttatcgaagcccggaaaaatccttcctctccggaacacgactactatgtctgggcggacaaggccaatgagctcaagtcggctttttccggcagcgcctgggaatatgacggccaggttggccagtactacctccacctttttgccaaagagcagccggacctcaactggaagaacccggccctaaggcagaaggtctacgacctgatgaacttctggatcgacaaggggatcgggggcttccggatggacgtgatcgaactgatcggcaaggtcccggaagaagagattaccgctaacggccctaagctgcacgactacctgcaggagatgcaccgggagacttttggcgaccgggactttttgacggtcggggaaacctggggggcaactttagacaacgctcctctgtacagcgacccggacagaaaagaactgtccatggtcttccagtttgaattcacggaactggacaagcaggccggcaaggaaaagtgggacaccaagccccttgactacggcgacttgaagaatgtcctggccaagtggcagaagctggactttaaccacagctggaacagcctcttttggaacaaccacgacctgccccggatcgtgtcccgcttcggcaatgaccagcagtaccgcgagcgcagcgctaagatgctggcccttctcctgcatggcttgcggggaaccccgtacatctaccaaggtgaggaaatcgggatgaccaactgcccggtttcggctatcgacgaggtagaagacatcgaagcccggcggatgtaccaggagcggctggcagagggctggaagaaggaggacctgatcaaggccatcaatgcccagggccgggacaatgcccggaccccaatgcagtgggatgcttcagcttccgccggctttaccagcggccggccatggctggcggttaaccctaactgccaggaaataaacgtaaaaaatgcattgaatgaccaggattcaatttattatttctataagaagctgattgccctccgccaccaggaacggattttgaccgatgggtcctttgaacttttggacacggcagatgccgtcatggcctaccaccgggaaaacgcggaagacaagtggctagttgtctgcaacttgactggcaaggagcaggaagtctccctgccggataaggtcaaggaagtccttctggctaacgggcctgtcccggaagacctgtcggctgctgtcctgccagcttacgcggcctttctctgccgggtgaaaaaataaatagattagttaatatgtaaaaagataatcttatttttgaaagcgaattctttaacttacaaaaaatatattattttgtgttagaatctagcataggaagtgaagaaggaaaagtttaaactaggaatccttgatgggaggaaatttgcttgaagagaaccgctactttagaagatgtggctcgtaaggctcatgtgtcgaagatgaccgtttcccgggtgatcaaccaccccgaactggttgcttcggaactgcaggtcgttgttgaagacgccatgcacaaattgaattatcaccccaacaacgcggcccgggccctggccaagaaccagaccagcgtggtgaagttcgtgattttagaagacgtcgacgataccgacccttactttaccaatgtcttatttggcatggcgacggagttgaagaagcagaactattccctccagctgctcttgaaggggagccagctggaccagggggcagctgacggctatgtgatcaccggagctaggactgatgattacccccaattgaacgagcttaagcagcctttcgtcctgtttggcgagaaccggggcggctacgactttgtcgacaccaacaacctgctgggtgagaccatggcgaccaagtatgccttgaaggcaggctaccggaatgtggtctttatcggcatcgatgtccgtgaggcttttgaattttccagagaagctggttatgtcaacaccatgcagcaaaataagaagattcccagcgtcttccgggtggaaaacagcttagccgcggcccgggaatttatccaggaccacttgggcgaatttcccaagaacacctgctttgcctgtgccagcgaccggattgccatgggggtcatccaggccctggtggaggcggaagccaagattccggaagactttggcgtgatcggctatgacggggtccttttagaccgggtgtcatcgccgacgatcacgaccgtcaagcaaaacctctggctgatcggtgagaagctggcggaactcattttaagaaaaattgcccaaaacggcgcgccgcaaggtgagatctttatcgaaccgaccttgagcgaggccgaatcaaccaaatagcagctgaagcatcctcagggatgcttttttgcttggcttttgttaccgataacaggcaggccagtcttgtaagcgctaacccccatatggttaaatttttactggaggaaaaagaaacatgactaagcaggatgcatggcaaaagaatgccattatttaccagatttacccgaaatcatttcaagacagcaacggcgacggcatcggcgacttaaacggtgtccgccagcggatcccttacttaaagcagctgggcatcaccgccgtttggctgaatccgatctaccagtcaccgggcattgacaacggctatgacgtcagcgactactacaagattgacccggtcatggggaccatggcagactttgaagcacttgtcaccgatttgcaccaggccgggatcaagctgatcatggacttcgtcttaaaccacacgtctgaccagcacccttggttcaaggccgcggtcagtgacccggccagcccttaccgggactactacatttttgccggtaaaaacggtgtccggccgaacaattggggcagcttctttggcggcagctgctgggcagcagacccggccggaacgggccagtcttatttccacctttttgccaaggaaatgccggatttgaactggaaggatccggctgtccgcgaggaaatgttcaaggcggctgagttctggctcaaaaagggggttgacggcctgcggctggatgccttcatccacatcgccaaggccgacctgcgccagtcctacccaagtgaggacgataagccggttatcgcggaagactttttcgccaaccggccggaagtgcaggaatggctggcgcctttctgtgcccgcctgcgggaagaatttccggacctcctgcttttgggggaagcagccagcgccagcatcaacctggcggtcgactacactgatcctaagcgaaatttgatggactcagtcattaccttccgctactttacggaaaaagaagattccgttaacccggccttcagcggtcaataccaaccaaaagagtttgactggctggcctttaagcaaaaccaaaccgtctggcagcagaccttgtcagccgcgccgaccctgtactggagcaaccatgacatggcccgcctggccacccgggtcgccaagaccccggtccagcagcggtctttggccatggccatgtacctggagcgggggatcccggtgatttactacggggaagaattaggcctgcacaatctggaatttgataatgcagaccagtttgccgatgagacggtggctgacttcgtcaaggaagctggcgaggccggggtagacgaaaagacggccctggaaatggccagccagacccacaaattgccggcccgggggccaatgccttgggacgacagccagtatggcggctttagcactgctgagccttggctgacgggcagaagccgggacaaggtcagcgtggccagcgaagacgcggacccagccagcatgctcaacttctaccggcagctgttgaaattgaagcagacgcctttgtttaccaagggcagctactacctgctggataccaaagcagacctcctggtctaccagcgggatttaggggatgaccgggctttagtggtcgtttccctcagcgccaagaaggagcacttgaccctgccagaagaactgactccggtcttaaccgccggcagcatcaacctgcagggcaaggaactgaccctgatgccttttgccggggtagttttgcaaaagaaaaaataagcaataaaacaagtaacaagtaataactaacgtgataattttttagcgaggaaacagaaaaatgcaaacagcagcagttagacacagacctgaaagcgaagattgctacctggtgacgacggagaccatgaagctgcgcctgcacacgggccgcgacgtcaaggcagtctacgttcactattgcgacgtccacgaacccttgacaaacttgaaaaagcaggccatggacctggccggccacggccaagtaaacgactactgggaaacgacggtgaccttgcctttgcaccgggcccagtacgtctttgaaattcacggtgaagacggcgaggaatgggtttatggtgaccggggcttcagaaagaacgaaaaggaaagctacgaggacccgaacaactacttcaagctcccttacttccacgcggtcgacatgaccaagagcccggactgggtcaaggaaacggtttggtaccagatcttcccggaacgctttgccaacggggacaagagaaatgacccggagggcgttaaggactggaatccaagcgaccacccaggccgggaagactactacggcggtgacctgcaaggggtgctggaccacttggactacttgcaggacttgggaattaatggcctgtacttctgcccgatcttcaaggccagctccaaccacaagtacgacacgatcgactacctggaaatcgacccggactttggagacaagcagctttttgcccgcttggtcaacgaagcccacgcccgggggatgaaggtcatgctggacgcggtcttcaaccacatgggcgactcctccatgcagtggcaggatgtcgtgaaaaacggccctaattcccgctttgccaactggttccacatcaaccgcttcccggttgaaccgtatgacccagccgatccaagctacgagacttttgcctttgaaaagcacatgccgaaattgaataccgccaacccggaagtcgtggactaccttttgacgatcgcgacctactgggtcaaggaattcgatatcgatgcctggcggcttgacgtggctgacgaagtcgaccaccaattctggaagaagttcaaggccgctgttacggctattaagccggacttctacgtcctgggcgaatcctggcactccagccagtcctggctgaacggggatgaattctccggtaccatgaactacccattcaccggccagattgctgaccacttccttaaggggacgcaggacgccaagaccatgaccgaattattgactgaccagctcttcttatacagagagcagagcaattcagccatgctgaacgttttggactcccatgacactgcccggatcaagacggtggccggtgaagatgaagacaaggccctgcaggctctggccttcaccttcatgcaaaccggttctccgtgcatctactacgggacggaaatgggcatgagcggggacaacgaccctgactgccgcaagccaatggactggagccaggcaggcagtccggtctggcaggcagttcaagcgatcatcgccttccgccgccagcactgggaaagcctgagcaaggggcagacctggctggaagttgaagaaaacggtttgatccatgttaagcggaccggcaaggaaacgatcgaaggctggttcaacacgaccgggcaagccgtcagcttaagcgcggaagccactttgagccggggctatgaagccggccagctggcaagcaagggctatgttctgagtgtgaaatagaagctgttaacggtaacataaaaataaagcttgttagcgtttgcatgttagccgacaatgattacagaatgatttgagcgaggaagaacagtgatgaaaagaatttttgaaattgatccctggaaattgaccagtcataccttttcaaaagaagacaagcgtcttcaagaaagtatgacttcaattggcaacgaatacatgggcctgcgcggcaactttgaagaaggttacagcggcgacagcctgcaaggcacctactacgccggcgtctggtttccggacaagacccgggtcggctggtggaagaacggttacccggactacttcggcaagactttgaacgccccaagcttcattgacctgccagtgaccatcaacggccacaagctggacctggcaactgataaaatcagtgacttcagcttgagcctggacatgcatcaaggtttgctcacaagaagttttatttatgaaggcaaggactgccgggttcaatttactttcacccgcttccttagttccgtcatcaaggaagctgccttgatcaaggtcaaggccactgtcctcagtggtgaggctgacctgcagattgccagccacttgaacgggaacgtggtcaacgaagacagcaactacgaagaaggcttctgggatgccttaaatgaagacgctaacggccgcagcatccagctgcggaccaagccaaacaacttcggcactccgcaattcacggttctcttgaaggaagttacccgggaagacggggaagtcatttccggtgacgtgacgaccgccagcggtgaagtcagcgaactgttcgctaagactttgaccagcggccaaagctgggaactggaaaaggacgtcatcgtcatcaccagccgggacgtggctgatgaagaacaagccgccaaggctgacgaattgatggccaaattgaccagcaagacttttgcccagaacctgtccgaccatgaagctgtctgggacaagcgctgggcaagctgtgacgtgacgattgacggtgacccggccgctcagcaggggatccgcttcaacatcctccagctcttcatgacctactacggccgtgacccgcgccttaatatcgggccgaagggctttaccggtgaaaagtacggcggtgctacttactgggatactgaagccttcatcgtgccaatgtacctggccgtagcgcctaaggaagttaccaagtccctcttggaataccggcacgaacaattgccgggtgccttccataacgcccgccagcaaggcttgaagggtgccctcttcccaatggttaccttcaacgggattgaatgccacaacgagtgggaaatcacttttgaagaaatccaccggaacgcggacattccattcgctatctaccaatacacccgctacacgggcgacgactcctacgtcaaggatgaaggcatggatgtcctggtttcaaccgcccgcttctgggctgaccgggtccacttctccaagcgcaagggccagtacatgatccacggggtaaccggtcctaacgaatacgaaaacaacgttaacaacaactggtttaccaacaccatggccaagtggcttctgggctacaccctggaacgctggccactggccactgaagcagccaagaagcgcctgcaggtaactgacgaagaactggccaagtggcaagacatcgtcgaccggatgtacctgccggaagacaaggagctgggcatcttcgtccaacacgacacttacttggataaggacctcagaagcaaggacaccatcccggctgaccaattgccactgaaccagcactggtcctgggacaagatcctgcggtcaccgttcatcaagcaagccgacgttttgcaagggatctacttcttgaacgaccaatacaccaaggaagaaaaggaaagaaactacgacttctacgaaccaatgacggttcacgaaagttccttgagcccgtcaattcacgccatcctggctgctgaactgggcaagcaggacaaggcggttgaattttacgaacggactgcccgcttggacctggacaactacaacaacgacacggttgacggcctgcacatcacttccatgagcgggagctggctggccatcgtgcaaggctttgccggcatgcgctacaacgaagacggcatcagctttgccccattcctgccgaagaagtggtccagctacagctttaagatcaactaccgcggccgcatcttggccctggaggttgaaaaggacaaggaagtcaagctgacccttctctctggtgaagacttgccagtcaaggtttgggaccaagaagtaactctgaaagaaggacaaagccaatgcttaaaggattaatttttgacctggacggggtcatcactgactcagcagtctaccacctcaaggcttggcaagacctggcccgcggtatcgggatcgaactgccggaagaattcggtgacaagctgcgcggcttgtccagaatggattccctggaaatcatcctggaatacgggcacaaggaaaatgactacagccaggaagaaaaagaagccctggcagccaagaagaacgcggcttacgtgaacgcggtcaagaacatgacccgggccgacatcttgccaaagatggacgatctgctcaagcaggccaagggccaagggctgaagctggctctggcctcagcttccaagaacgctcctttgatcttgaagcagctgggacttgcagacatgtttgatgcccgggttgacccggctaccctcaagcacggcaagccggatccggaaatctacatccgggcccaggaactgcttggtttggagaagaatgaagtaatttcttttgaagacgcgccagcaggcgtagcggcaatcaaggcggccggccagttcgcggtcgggattggcgatccgatcgttttgaagggggccgactacatcgttggttcaaccagcgccttagatttgaccgagattgagaaagtttttgaagcagggaattaggtaagaaaaaatggtgaaaatcaacttaaatcacatctacaagaagtatccaaacgcggatgactactcagtttcagactttgacctgcacattggcgaccatgaattcatcgtctttgtcggcccgtctggctgtggtaagtcaacgaccttgcggatgattgccggcttggaagacatcactgaagggactttggaaatcggcggcaaggtcatgaacgatgtggctccccgcgaccgccacatcgccatggttttccagaactacgccctttacccgcatatgacggtttacgacaacatggcattcagcttgaagctgcgccactacgacaaggccgacatcgacaagcgggtcaagaacgctgctgaagtcctgggcctggcccacttgctggaacggcgtccagccgacttgtccggtggtcaaagacagcgggttgccttggggagagcgatcgtgcgtgacgccccgatcttcctgatggacgaacctctgtccaaccttgacgccaagctccgtgtctccacgcgggcggaaatcgccaagttgcaccagaaattgaagacgaccaccatctatgttacccacgaccaaactgaagccatgactctggctgaccggatcgttgtcatgaacgccggccggatccagcagatcgggacgccgaaggaagtctacaacaagccagccaaccgattcgttgccggcttcatcgggtcaccgcagatgaacttcttcaacgtgacctacaaggacggttacatcgacgacggccagggcatcaagctcgaggtgccggaaggccgggccaaggttctggatgccaagggctacaacggcaaggctattgtgatgggcctgcggccggaagacatccacatggaagaagccttcctggaaacctggccggaagcagtcgtttccgccaaggttgtcgtttccgaattgctgggtgcaaccagccagctctacatgaacgttgacaagaccgaattcgtcggcgttgtcaacgcccgtgatttccacaagccaggtgacagcgtcaaggcaggtttcaacctgaacaacgcccacttctttgacaaggaaacgcaagtaacgattaccgattaattccatcaaatatcggacgcttaagaaaaattaattcagctaatcaacttgcagctaaaggctgcaaggtgatgtaaaaaataaacaattgtttgtttaggaggaaaaaaatgagtttctttaaaaaggctgctttgagcagcgcggcagtattggctgccttgagtttgtcagcatgctccaagagcagcagtagttcatcatcaactgccgacaagaaggcatcattgactttgtgggtagacactgaacaagtaccctactacaaggacattgttaaggacttccacaagaagtatccaaacattaccgttaaggttacccaaagtcctaacggttccgctaacgccaagactgacgttggtaaggatgcttccaaagcagccgacgtctttgaagttccaaacgaccaattaggccaaatggcaaacgctggttacatcaacccgctatcaccaagtgacactgccaacatcaagaagaactatgtcagccaggcttccaagggtgttacctggaagggcaaggtttacgcttacccatacgctcaacaagccgacacgatttactacaacaagtccaagctgtcagctaatgatgttaaggactgggacactttgacttccaagggtgttctggctactgacttcaccaacgcttacaccatgtggccaatcttcttctcagctggcactaccctgtacggggaaaacggtgaaagcctaaaggggtcaactttcaacagccaaaacggtgtcaacgctttgacttggattgccaagcaaaagagcaacaagggcgtaatgcaaacttcaaacgctttgaaccaattgaagaagggcaatgctgacgccatcatggacggcccatggaacgctgccaacatcaagaagatcttgggcaagaacttcgctgttgccaagtacccaactgtaactgtcggcggcaagaagaagcaattggaagccttcctaggtatcgaaggtttcgcggttaactcccacacttcaaacgccaaggccgcttcagaattgggtgcttacatcaccaacaagaagtcacaattgatcgcccacgaaaaggctggtcaaatcccagttttgaagagcgctgttaactcaagtgccgtgcaaaacgacccagttgccaaggccgttatcgaaatggcgcaaccaggcaactcagttctgcaaccaaagctgccgcaaatggcaaccttctgggacggtgcagctcctctgatcagcggtacttacgacggtaagatcaagcccagccaatacaaggcgcaacttgccaagttctcaaagaagatttctcaaaagtaatttaattaagcagcaacaactttaattaagcttgagaaggagagtaatgaaaaatgtttaaaagaaaaggacatgttcctccgacagccagctacaaagaagtctggtcaaagggggacgcggctgacaagctgtccttcttcttcatgggcgccagcgccctgaagaataagcagtgggccaagggtctcagcctgctgatcagtgaaattgttttcctggtctggtttatctttagcggggtcagtgccctcagcatgctgagcaaccttggggaaaacaagaccaagaaggttgtctttgaccaagcgcaaggcgtttacgtgaccaaacagccagacaactcagtcttgatcctcctcttcgggatcatggccctcttcctggtcatcggtttcatctgcctctatgtcgccaacttgcgctcaaccccgggccaactacatcaagaagcgtgatggcaagcacattgccaccaacaaggaagaactggccagcctgctggactcccgcctgcacgcggccttaatgttcattcctatgctggggattcttttcttcactgttttgccaactgtcttcatgatttccatggcctttactaactacgaccgccaacacccgatcggcttctcctggactggtttccaggccttcggcaatgttttgagcggggacctggccgggactttcttccctgtcctgggctggaccctgatctgggccgtagctgccacggcaaccaccttcttaggtggggttctcctggccctcttgattgaatccaaggggatcaagcaccggaaagtatggcggacgatcttcatcgtggtttacgccgtaccgcaattcgtttccttgctgctgatcgcgcaattcctggacgcgcaggggcctttgaacaccctgttgcaaaactggggctggatctcagggccgcttcacttcatcgacaatgaagctgccccttgggtagcccggctgacggttatcatcgtcaacatgtggattggtattccggtttccatgctggtttccatggcgattatccaaaacctgccacaagaccagattgaagccgcgagaatcgacggggctaacgtcttccagattttccacaacattaccttcccgcagatcctctttgtcatgggtccgtccttgatccagcaattcatcggcaatatcaacaacttcaacgttatcttcctgttgactggtggtaagccaatgaacaacaactacaacggtgccggctcaaccgaccttctggtcaactggctctataacctgaccttcggtcagcagcagcgctacaacgcctcagccgttctgggcatcttgatcttcatcttgagtgcgacgatttccttgatcgcttatcgtcacaccactgcgtttaaggagggataaaattgaagtcttactctaaccagagaaaagtatcccttttcttcagatatttattgctgacgattttagcaattttgtggctgatccccatcctctggatcgttttggccagcttctcatacaacgatactggctttatctcaactttcttccctgaaaaatggaccttccagaactatatcgggatctttacaaactcccagttcccatacctgcactggattatcaacactttgctcgtggccatcatttccgccactctgtcaaccttcatccaaatcacggttgcttacgtcctgtcccgcttacgcttcagactccgcaagccattcttgcaaattgccctggttttgggcatgttccctggtttcatgtccatgatcgccctttactacatattgaaggggctgaacatgctgaacctgggcggcttgatcctggtctacgtcggtggtgccggccttggcttctacgttgccaagggtttcttcgacacaatcccgcggtcactggatgaagcagctgaactggatggtgcaaccaaatggcaggtcttcactaagatcggcctgccgctctccaagccaatgatcgtctacacagctttaacgactttcatggcaccatgggtagacttcatcttctccgggatcatcctctcaacttcaggtgacccaaagacctacacgatcgcgtatggtctgtacaacatgctttcttcttcaaaggggagcgcgacggcctacttcgcccaattcgtggccggctgtgtcgtcatcgctatcccaatcacgatcctcttcatcatcatgcagaagttctacgtcagtgggattactgtaggtgctgacaagggttaacgcacaaacccgaacaacattttatttaattcttgccttctcagcgaaaagaatctgagaatatctcggattcgattaaagaaaaacagtggaagcttccttacgaagctttccactgtttttttgtctaaaaatatcaaaaaattacggcttatttaaggggccggtagaagtcgatgccactggcggcagcgtaatcgccggtcgtttccagaatgctgaggcggacagccttggcgctgacccctctgaggccgataaccttgttcttgcagtcgctgttaaactggtaatcagtcccgtagctggtgaagttttccccatcggtggagatttccacccgcatccgcaaaggccggccatcccggctgctggctcttggcacgtagatcagcttgtttaattctgtttggtccgggaagctgaaggtcaaagtcagcggctggtcttcgcttggtttgcccgtgctttgccagtcggttgccattctccggtccaggaggtttttcagctggtggccgcttgcgctttcctggctggaagtgactttgacattggagatgataaagtcctgcgggtcccgctttgtcttgacctgcaagaggtcggaccattcggataccttgtagccagcttcatagcgcaggcgcaaccggtagccagtgttggcggccaggtcggtaaaggtgaagatgttcccgctgatcccggtgtagagcagtccgttcaattcaatctggacactaggcgtccgctgggcccacttgaccgtcaaagagtgggcactgatcttgtcccggtcgacttcaaccttgcccggcaggggcagcgcggcgtcggttatctggtgaaccagctgctcattggcgaagcggaagttgttgaccaggatttccagcttttcctgcttgatgtcccgctcctgcaatttgatgatcaaagccgggcgaggagttgcgcccaagtccttgaagccttccggccagcagaacttgttgtcgtagtagaagccttccttggctctttgcagggtttccggcgtgccgtattcagtcaaggtaacgacttcctcgtcgccggcccggagctggatttcatctgggtgctggtcacagtatatataaaagaaggtttgctctttaatggccatgttcgggtagtagccggtggtcggttcgatgatcacgcgcagcttgctgtcggccacatgggtgcggatgacggtttgggcgctgttgtgcttgtagtcgctttggtcgttgtcgctgtaggtgctgatggtggcgtcgccttgcgggtagagaacgaagcgccggctacccagatcgaagatgctgccgcctctgacgaagacgggcaattgccaaagggggtacttgcgctggttgtagacccggccgcccatcaagcggtcgccggtaaagaggtcgatccagacagtctgcttgtcgggcaggtagatccggtcgcggacgctcatgccttgattgtcagacttgccgttgacgattggcgcgacaagcaattggtcgcctagcatgaattcatcagcaaagtcccggccgtagccaacctgttcatgcggaaaggccataagcaggggccggaccagaggcaggccatcctgggcctggcggctgagggcataaaggtaaggcttcagctgctcacgcaggccgaggtaggccttcatgatccgggagaccttgttgttgaaggcgaaaggcgtcttgctgagggggctttggtcgtcaatgacgaagaaaagcggggtaaatgtcttccattctaggtcgcggacggcaacttgggcattttccgggccgtgcttgccgccggcagcggccccgatgaagggcaggccagacaaaccagcacctaataaggtagagatttgcgttttgatgctggaccagtcaccactgacatcgccgaaggccagggcagcctggctttggtgaggaaggaggctgtcgcggaccagggtaaggggcttggctttcggattttccttagccaggtcggaattgacggcggtcaagttgctgcttgggtcgtcgaccgcggcaaattcgctgtggtgggctaaaggctggcccttttcactccagaagcctggatggcagttgcggctttggacatagccggcaaaggcggcaaagtcatcgggcttagcggcagcttggctttcgtagttggggatgatccaggataacgggaagccccagcgctggtagcggtccagcatggcccgggcggagaactggtagtccttttccccgtttaagcttggcaggcgaccgctgttttccgtctttcttgagtagtagcggttgtcttcaaagcggactgcttcatggcccttgccgtcagcttcttgccaggagccgtcaaggaagttgccgaggtggccgaaggagagggcgtagctgggcagcatgaagggcttgccggtcaaataatagaagctggacagcaattcttgcggagagtttcctattatatagtagctgtcaaagaccggggtccggtggctgaggatggtgagctgggaattttgccggccgaagtcatagtggccagtcgcggtcgtgttgcgcagttcggcaaagccggcgttggtccagaagaaaggcacggcagctagaacgccgtcagccccggtgataccgtcggtcttgatggtgattttttcacccttgtggctgaagtggccgttttggaccccgccgccgtagtagtattcgttttgcccttgcttcaggatttcgatgctgtgcttgctgctcagttcgagggcggaagcttggaccatccgcggccggtggacagactcgtcaaagatgctgaagctgccggttttctgctggaaaatcaacttgcagctgccagtggtgatgatgaacatgtcgctggtcgcgtgagccgtggcccgggcgaaacattgcgggtcgggctcaatgtctttgaccagcatgtcgtcagtttcggcaaattcttgacttggatccagccagtagcggaagataccattagcaatcaagtagacgcgggcgatctcgccggtcgtgtaatgaagctcatagtaattttcacgcttattgacgccaaccagtcttcctaattgatgtcttgaattttgcaggtctgcagtcataatctttttcctttatgtcatgaaatatctaatctaattatagccaaaaagccggtaaattggaaaaaatagcctataccagtttgggtaaccaggagacagacaattaccttgtagaaaagaagtagtttattgctccttaaattatctggctaacaaatattatgaagtcttaaattgctacgattttcaagaattatattatagtaatgctaaaagacgtgctggattactactggtgtaaacaaaaatgtgatacaaatggtgtaatggcacgatataaatggtgtaactaactacggaagagctggctgatcatcctgtttttgattttgattcgacggggctcttgcctatgcttatctttgggttagatgaagacctggtccggtcgcagggctttttcttcaaagaatccaatagctgatctttaactgcctgaaacgggcagttttatttttgctcattttttagcaaagcattgactaaagggcttacagagttaagaataatagaaggaaaagattgttttactaaggagaaaaaatgcgctattacattcatgctgatcagttttacctgccaaatggccgggaaaaaggcggctatttagagattgttgatggtaaattcgggacctacctgccagaaggcagccaagtgccggacgcggtggactatactggctttagcgtggcaccgggctatgtcgacacccacatccacggttctgttaaagaagacgtgatgaagagcgactgggaggggatcaaccgcctgtctgaagccttgctgagcgccggggtaaccagctggctgccaacgacggtgaccgcgtccagtgagcaattggctgaagtctgccggatgctggctgctcaccagggagaagagagcggggctaagattcaagggatccattttgaaggcccatttttcacggaagaacacgcgggggcggaaaatccaaaatacatgatggatccaagcccggcagaactggacaagtggctggaagcgtcaaaggggatgctgaagaagatctctcttgccccagaacgtccaggaacgccagctttcgtaagctacgctgtcagccggggagtcaaggtggccctgggccactctagtgccagctatgaccagactaaggcagctgcacaggctggggcaacgatttttacccacacctttaacgggatgccggacttctctcacaaccagccaaacattgccaacgcggccatggcactggagaacatggacaacgaactgattgctgatggtcaccacgtcacgcctagcgccatcaaggccctgctggcggctaaaggcaaggaccatattgttttgatcactgattgcatggaagccgggatgatgccggatggcgactacatgctgggggaactgccggtgtacgtcaaggacgggatggcacgcctgaaggagggcgacaacctggccggcagcgtcttgcaactgaaggacggggtgaggaacctggttgactggggattggctggcaaggaagaggctgtgttgatggccagctataacccggcccgcagccaaggcctgctggacaagtgcggggcgattcgtccaggcctgccagctgacttcttgattttgaaagatgacatgtccctggcgaagacctacttgaatggggaagttcgctgggaagaataatatcgaagctcgctgctggtcagcgggcttttttattgccattcaccggcacagacgaccattcatcggcatttgcggttttggaactgcttttagggatagaattgctgtgttgaaacgaaggaggattaaataaaatgagaagaaaattgaagagaaatattgtagttgtcttaggtgttctactgttgcttcaattcaagggtacggttaaagcagatgttggaactagtaatagtgataatgagtttgtgaaagcgcattctatcgggcgcagtaaaggaattcttacagacgataatatgacggaatcagattttgtcaacctgtgcaagaatacagtttatccacgatatctaaagtatagctatgaatatccgggtatgtcttttgaagattacttggctgaagataattatgaagttcctgttcaaacaactgaagataaacctattgttatcaatcataaatcttcaacggcctcaactaataaaattggtttgttgggtgtatccgcaaatagagattataagatgaaggctggcgatatcttggtttgttatgggactagttcttctagtaattcaattccaaatcatgttggccatgctgccattgctagctcttctagccatattttagagatgccaaatatttggtcacatgcgactcatgtaggaaaggcgagttggtttgctaagcatacaaaaggaaaagattatgttgcggtttaccgagtgaagaaacatccgcattatgctgaagatgcagctggatacgcataccatgatatgtatattaacaataatcctaaatacctactttcccctaatttatatgatagaacaacgagctactgttccaagtatgtctactgtgcatggtattatggtgcaactaaggattctgtaaagcattacaatacaggacattatgttttgcctcacagtttcagtggtaattggaaaggttctttcgtagcatcatatgtttataaggtaactgagtactaaggtgacaaaaatgaaaaagagaagtttcttactacaaaatattgtacttattctgatgagtgtgtattcaattatgatgtcgatagtggcaattaatagcaattattataatggacaaaagctacttagcctagcggcatatataccattgcttttatttgtacttgtggacattactgccttttttgaagaaaaaattccttttaaatggttgtttttgttggctactttaaatcttatatcagtatttagctttaccggtgcaaaaataacgacctttttcagctctccgtctctactttcttatttggttaatagtgtttccatcttttgcttatatttgttagaaaagccagcatattttggaaatgatagtaaagcaaatttacgatatatttgttggtcaatgcctgtacttgatctggtcataaatatttttattatctgctttgggtaggaagaaaaaatcgcgctattggtcagctagcttttttgccattcaacggcgcagacgaccattcatcggcatttgcggtggcgcagacgaccattcatcggcatttgcggttttggaactgctttttgggatagaattgcggtgttgaaataaaggaggattcaacataataaagaaaaagtttttagtaagcactgtgttggtcagtgcgatttcctttatgtcagtatcaccggtattcgcggctacggctgttgacagtgatgtgatcaaggagaatatttcagttgacaatgagaattggactcaaggaatggttgaagagcaatggacagaaacccattcatcaccattgtttccagcactttatttgtctattggtaagcatgttcgctatcctgctgaagggggtaagtggacgtatggattttggaatgcaaaagtacactctgaatacaaggtaaacaagaagcatgggtcaacagttgtgtatattgatagaaaaggaaaaaagcacgaacagcggtcaattaatacagctgctggcaagacatccattgccgaagtttgggcaattaatctgccaaagactgttgaccgatactattaccgaatagtcaaatagtaaaagtctggaagcatcttcttaaagtaactagatgtttccagtttttatttaggaggatgtagcgcaatgagaggaataagcgtttctgccgatcaaattacggcgcaagcaggagacaagctgctgtttcaagatttatcttttcaagcagttgccctaattggtcagtccggcgctggtaaaaccactctgctcaacctgctcggcttgttaagcttgccaagcaagggaaaaattctgatcaatggtgagaatgccagcaactggccagaagggaaaagggagagattttggcgggaaaaggcggcctttctctaccaagatgctggaatcatcgatgaagaaagcctgctgtacaacgtttctttgactaaggcgaaaaagagccaggaacaagccttgcattgcttaaaaatgcttggcttaacgcaagctcatgaaaaagccgccgtgctttctggcggggaaaagcggcgtctgggtctggcccgccttttatacaaacagggtcaggtggtctacgcagatgagccgaccgcttctttggatgcagccaaccgccagctggttactgatttgcttttaaagcaggcacaggcaggcgcgctcgtctttatcgccacccacgatgaaaagctggcgcaaaagtgtgacgcgcgaatttgcctgggggaatgaccatgcgtaataaaataagtattgctgcttccagtttgctcttctcccttgtctttctgtattctcttggccccggccgcaatgcagtagaccgactgcccttgatctgcagcctgcttttatacatcacaagcctgcttttgcctttgcagcttggctatcgtaaagatgccattcgcctgctggccggaatcagcaggttggaaatctgcctggataattttacctgtctctttgtttggagccttgctggcagcctgcttggcgttttgttgtttggcctgatttttcgtaaaaaagtattttaggcaattctgctcttttactgttgattgaactggtcttgattttttgttcactcctgctgatgaagctgccgggcaaatttcgtgtcagccgcggttctggaaaaaagcaaggaaaaatcgccctgcgctgcctgcaggtctcagccttgctgctgttagcctggtccctgccgcaagcggccttgctggccaagagtgcctatgaaaattaccagtcaaaggaaaaatggcagcaagttccagccgcagtcagttttgatgatgacggccgcttggaccggagagagcattacccggctgaactcgcgctcatcaaagatgaagagcggcaaggcaatgcggttttgtccttgatcatggatgaccagatgcaaacgtcaaaagctgaattagggggatatgaccacattgttttcgtcaatgaccaggctttaaaactggccggtatcagccaccaggacctaaaggaagttgccctggccgacttgccagcagaaagccggaatttcttgcgcagaatcttgccacttaataccgcaaagcggcaaaccgtgccgaaagggatgcacttgttgatcagccggaaaaagctggccgctttaaatgaaacgcaagattttcaaatttgccgcaagcccttgctcatctacagcaaacggcccagtgagatttatgacatgcatggctttttatatccagctttgtcgacaggcaatctcttctttatccggtcagataagcttattcctgccttaaagcggcgcggcttgacaaaaatttactcgccagagcccttccgcttgaagcagctcgcccaaagcaagctagagctggccaagctctacttaaagagctgcttgtggcagctgctgaactgcatcttactcttgtttttgctagccagcatcttaaactatcaagctggcgcctgggttcagctcaaccggtccaaggttttcgccttgtttaccagtgggcataagtggagaataatttttccgcctgccgcggtggcggctgccttagcgctgcttgtttgtcttctggtcacggccatcttgcttgtcctttacgctgaaagtcctgccggcctgctgatctgccagttttcctttatcctgctgtatactttggtatatggaaagctcttgagcaaaaagagcaaaacagaagttaaacggacgattggccggaaaggatagatgagggatgaaagaggaactgggcctgcggatagcggtttgcgacgatgaggaaaaagaacgcgcgagtttgcggcagttgctggtcatggagttaaacgccgcacatgtcgactgctacgcgagtggggatgacctgcttgaagcagggaaaaagtacaacttgatcttcctggacatcgaaatgcctggcacaagcggcatggagacggcccgccgcctgcgccgtgacaagcgcggcgatttgctggtctttttaactgcttatgaccgctatatgccttccgccttcgaagtcaaggccttccgctacttgctcaagccttggaagagggaggacatcgcctcggttttgcgggctgcttaccaggaaatcctggacaggcagctcttggcagttccattgccggacaaagcaatgaccgctctgcccttaaatgaaatccgtctgctggaaagtttgggcgaccagagctgcatctatacggctgaccaaaaagtaatcagcccggaacccttgaagtattgggaaaagcaactggacagtgccttgtttggccgggtgagcaggcaatacatcgtggcttaccagcatatcagtgatttgaagcataaccagctctaccttgctggtctaaagcagccaatcctgcttccccgccgccaggtcaaggctgtagaagctgcctggcttgactacctgcgcttttatgcccagccgctgtgattttggaggaaatatgaatttgtctatcgatgccgtgacgcttttgaacacagcttttatcctgctgcagttcagcaagctctatctggcttttgcctatctctttgccgagaaaatcaagccggcctggctgctggggatttacgtttttggtctggcggcctactgcctggccggtccccagctgggcctgttgaatgaggctttgatctatgccttgcttgctttgggctggactttgctaggaccattgaaggaagaagacctcagccagctgggcagctatgcgattttaagcctgctggatctgagtctgaagcagctgctccgccggcaagaagtgggcgcggctgatcttatttttgaagctgccatcgccttgaccttcgtttacctgtttttggcgcctaaggtcgaaaatgtttttgccagctggccggacaaggctaaatggctgcttgtgttcctggaaattctggctttgggcgcggcgagtctgacagccggccgctttcaagcctatctccgcctgcaaaagcagctgccagtgctagaggcctgcctggccggggctgccgtctggctggacatggctcttttgcaaggacagtttagggtttggaaattaaaaggcgagatgagtgaacaagagcaattgctccaagctgaggaaaactattatgagtcgcttttggcccgggagaaagagaccaagaagttccgccacgatgcccgccagcacttggtcagcctgcagggcttggctcatgccggccagtaccaggaactgacggcctatattgacgacctggttggtagcagccagatgactcggcaattgatcgatactggcaacagcggaatcaatgccgtgattggtgacctggccgcccggtatccgcaggttgaaatcagctggaccggggtgattcccggcaacttagccttgcggcagcttgatctgtgcatcattgccggcaatcttttgaaaaatgcctgccaggcagcctcactggcggcagaccaccaggttaaggcagggctgaagttttccgggaaaaccatgcttttaaccgtgcttaatcaaacggataagggggtcaaggtcggaccaaaaggggacagtgttgtggcaaacagccggacagggattggcttaggaaaggtcaaatcctttctggagccttaccatggccgcctgtggttaacttttagcccacaagcgctcgccagcggcgggggagaattcagagcggaagtctttgtgcccaatgctttagaagccccccgggagttttagaaaaaagcgcaaaataaaagcctgtcttccaaaattgcggaaggcaggctttttgttagatatagttgtttttagtatacggcaccttcgtagaagtcgaagcgcggcttgttgaagttgaagtccttcagctggctcatcttgatcacgttgtcgctgacgccccagctcatgaggttgatcggcttgccgtagtcttcgtccgggatgaccaaaaggacgtacttgccttggcttaaggcgtaacccagttccatgcccaggccgacgtcttcttcgtcaggaatgtagacgcctagcatgacgtcgttggtcttgatcccgttcaagtcgttgttgtaggtggccgtagcccaaaccttgtcgtgcaggtattccgggtgttcgtcaacccggatgcccttgtactggttgtccaggggaacgtagctgttttccaggtcaaccgttgggttttccttgagggcttccatggcttccttgtaggctttgttttggcggtcagtgaaccagccggcaccgaagtagatcgtcttttttggcatatcttgtattcctttcatgtccgttgcgagatattgtgtttctttttctagaataactttaccattttccgccctggctgactagtcaaaaattaagcatcagtcaagttgcccagcggcagaaagtttataataaaagtagttgtatttttgaaaaaaggggtggactaaaaatgacggaagaactcttaaaagcggaaagctgttttgttttgcgggccgaagaccgggccgacatgtttgcccaagtctacaaaaagctgctggagcaagggctggtagcggccggctttttagaccaggtggtggacagagaagaggactttccgaccggcctggccagctgcaatctggccccgggtctccccaacctggcttttccgcacacggaaggctgcttcgtcaagcagcagcgggtcgttcccattaagctgctggccccggtcagcttcaagagcatggtcgatcccagccgcgaattgccagttggcttttgcttcatgctgctggaccaaaaggtggacggccaggctgaacttttagccagaaccatgaccttcctcagccaggctgaaccagcagccctcagccggatttttgcccagactgatcctgccggcttgtactctgccctgcgggaagagggattttaattctggcgcttatttctccaagtatatcgtccgcaaatccaacaggtcagcattagagaggccgatctgctggtgaaggtaggcgttgatgctgccatagtcccggttgatgacatccagcaggtacttgaagtaggccggctgtacagtctgcaaatcgcggaaggtcgccaggaggctgtcatcagctccggcggccttttccttggccaaaagctggctgacgaagtccttgattacttcattagtgaagaggtagtctttttcaatggttttcatcggtacgcccaaggccgtcagaatcaagattgccccgaaaccggtccggtctttcccggccgtgcagtggaaaagcacgctctcgccgtctttctcattagccaggagaacttcaaacaggtgctggtaggccttgttggcgttcttcccggttgccatgttcttgtaggcccacagcatccgctggtagccccagcctggatcctggctttctctcgccatgtcggaaatgctcatggtggagttggtcaagtcctcatcgaaaaccgggtcggcgaagtactcaacgcccgcgatcttacggtctggctgcttgtttctttcgaaactggtccggaggtcgatatcgtacttgagcccgtagcggcgcaggtattcctggtcttccttgagcaggtcggccaagtgcccgctccggatcatcttgtgcattttgatctttttgccggaaacggtctggtagccgcccagttcacggaagttccggccgccttttacgtccagcaattgctgttttaatgaagtcatttgtcgaatcctttcttatttatttgtctgtattttctttttatgttgtctagcggttgattttttcatcccgcttaaaaaatgcttccctgcaagtttaagatgtaacaattttgcgaaagcgcattgctaaactgtgacttatgttaaaatatagataagcgaaatacgtagatagtacgggagatgagcactatgactgaagaaaaaatcaaaattttagtacctgtcgatggatctgaatccgctgaacgtgcttttgacaaggccgtgaagatcgccgtcaacaacggctaccacgttgatgttttgaacgtgatcgacacccggcagttcatgggcgaaatgcaggacaccttgatctcaggcgacacgatctatcaaatgacccaagactcagaggaatacctcaagagcctcaagcaatgggctcacgacaacctggcctttgacgacattgactaccacatccgttatggcagcccgaagagaatcatctcttacgacttcgtcaaggaccacggcaacaacctgatcgtgatgggcgccaccggtttgaacgccgttgagcggatgctgatggggtcagttaccgaatacgtcaaccagcacgccatggccgatgtcttgatcgtcagaactgacgtcaacaacatgcctgccaagtaagctggctgataaaagtatatcttaaaaagaagacgtttggaacaatttccaaacgttcttttatttcccgtttatttaacttgaattttacttttgttcggatttcagccaattaagttagtagtttgtgtaatttttcgctatttcattaaccttttgctggcaaaattggaccggatcaattagtttgggtaaaaaaaccgaaaaacgcttgctaaaacccgaatatttctggtagaattgttccagaacacagaagcgagattcgccttgctgtcgttccgatgagatgtatgagcgtgagagccggcccgttaaggaagcttttgtgtggacttttctctggctgctttcaagcgcatcccttatgctgctgttgtactattttaactttcattaaccatttttcagggggaaataatgaaaaagttcaagaaagcattgtttggtgctttaactgttgctgctgccgtgctggcaactgcttgctcttcaagcaagtcatcttcttcatcaaagggctacactccatcaaagtcacaccctttgacgatccagtttgttcctagtcaagctgcttccactttggaagccaaggctaagccgcttgaaaagatcctttccaagaagcttggcgttccggttaagatctcaatgtcaactgactacaacacggttgtcgaagccatgaagtcaaagaaggttgacgtcggcttcctgccaccggatggttacgttctggcccacaagcaaaaggctgctgacgttctgttgcaagctctccgttacggggtaaagcaaccaggcggtaaggcaaccaacaagctggttaagttctaccggtcagaaatcctggttaagaaggggtcaaagatcaagagctggaaggacttgaagggcaagaagattgccgttcaaaacgctacttcttcagccggctacattttcccaatcgctgaattgaaggaaaaaggcctggacttgactaagaagggcaacgccaacctggtaactgtaactggccacgaccaagccgtgcttgacgttcttaacggggacgttgatgctgccttcactttcgaagacgcacgtaacactgttttggccgaccaaccaaacatcatgaagaaggttgttccaatctacttcactacgggcatccctaacgacactatctcagttcgttcagacatgagcagctccttccgcaagaagctgtccaaggccttcgaatctctgcgcaaggacaagaagagtttgaagatcattgaaagcatctacagccacgaaggctacaccccttcaaaggactcagacttcaacatcgtccgcaagtacgacaagatggctgctaccaagtagtcattgatatcacaaagattatcaactgaatactaatagtgaaatcgtgccccgctttaacgtaggacacgattttcaatgaaaaagcaaatttaggtatttaaggagttattattcatggcagaacagccgatgatcgaaatgaagaacgttaccaaggtctacgacaatggtaccgttggtttgaagaacatcaacctgaaaatcaacaagggtgagttcgtggtaatcgttggtctttccggtgccggcaagtccactctgctccgggcaatcaaccgcctgcacgacatttctgaaggcgacatcttgattgacggtgagtcaatcaccaaggccaagagcaagaacctgcgcctcatgcggcgcaagatcgggatgatcttccaaagcttcaacctggtcaagcgctccagcgttttgcggaacgttttggctggccgcctggcttactacccaacctggaagactactttcaacctcttcactgacgaagacaagcaaagaacttatgaagccctacaaagcgtcggcatggctgaaaaggtctactcccgggctgacgaattgtctggtggtcagcagcagcgggtggctatcgcccgggtgctgacccaaagaccggaaatcattctggccgacgaaccaactgcttctttggacccgaagacttcccgccaggttatggaagacttgaagatgctgaacgaaaagtttgacatgacggtcgtagccaacctgcactcaattgaactggccaaggaattcggccaccgggtcatcggtgtccgggccggggaaatcgtttatgacggcaagatggaagacacgccgcaaagcgtcttcgacaacatctacaacggcggcaagggtaaggaggaagactaacaatgtcagcaactgaccgcgacatgttaaaacttccaaaaaagaagtttaagatgtggaactgggtctgggtcatcttgatggtcctgggtctggttttatctgttaacaacacgcagaccagtctgccggaatttttcgccaactttgaccagttcgcggaaatcttcgtgcagatggctcagccggactggtcatatgccggcactgccattccttacctggtggaaacgatcaagatggccatcatcagtacggttatcgggtccctcttggccttcgtttactcacttttgattgccagaaacattgtccataaccgggcaattaccggcgttctgcgcttcatcatgaacatcatcagaacgattcctgacctgctcttgggttcaatcttcgttgctgtcgttggtatcggcccggttgccggtatcctggccttgactgtcttcaccttcggtgttgtggtcaagctcttctacgaagccatcgaaactattgatccaggtccaagtgaagccatcaaggcagtcgggggcaacgggatgaacaatatcatgtttgccgttatgccgcagattctgccttacttcatcagctacgccctgtacgcttttgaaatcaacgtccgggcatccacgatcctcggttacatcggtgccggtggtatcggtctgcagctgaagaacactttggacatgttcaactacaaccaaacggggatgatcatcctggttgtctttctggttgttttggtcatcgactttgtttcaactaaagcaagggaggctttgatgcgctaatggatacgacaatgaagaaattaccaccaaaaccagtgacggccaagtccagagctattaagtggggcggctggattatttccatcgccatcattatttggtcctgcacgggcatcgacttcggcgggatcaagccaactgccggccagattaccggggcgatcttcaatggtcttttccacccggactggtcatacgtttataacggcagcggggaagacctggtttcccaattgtggcagaccttgtgtattgccttcctggggacttttatctccgccatcatttcagttccttttgccttctgggcagccaacacccggcacaagaagttctgggtatctgaaagcgggaagatcgttttgactttcatcagatccttcccggaaatcgttctggccttgatgtttattaaggccgttggcccgggcgctccagctggtgccctggccttgggtctgcactcagtcgggatgctggccatgctgttctcagaagcgattgaaagtttggatgatggtccagctgaagcgattacggcggccggcgggtctaagttcaacgttgctgttttcgcgaccatgcctgacttgatgccagccatcgtttccaataccctttaccgttttgacgtgtccgtccggtccgcttctgttttgggtctggttggggccggtggtatcggctatcctttgatcatcgccttgaactaccggcaatggagccgggttgggatcatccttttggggatcatcgttatggttgtggtcatcgactggatctctggcgccatccggaagaagttggtctaaaaatatatttgaataataactctttgaaaagctgtggcggttgccacggcttttttcttttttaagagaggtcaacaatcaagccatcgactttaatcatggcgctattactttgacagtgacaatcatcattacttgcttcttactattgttgccttccttaggcaaaagaaagaggctcgcgtaagccgcgagcctcttttctttattctagtctgttgtctattgtttgttgtctgtcgctattgctgcttgttacttcaggtaagcgtacttgaagctgtagtttgccccggcgccgttgtagatcacgcccttaacgctcggcttgaccatccaggcttcgattgggtggtacagtggagtaaccccttgttctgccagcaggacttgttcagccttggccagatccttgaagcggtcgctggttgaactggtcgtcttagaagcggcaacgtacttgtcgtaagtcttgtttgaccacttgccgtagttgtatgaagcgccagtagtctgcaggtcaaggaaggaaattgggtcggagaagtcggcgttccagccagttgaaacgacgtcaaaattgccgttcatcattctggtcagccgggtcttcttcgggatgctttgcacttgcacatcgatgcccaagttgttttccagttggctttgaacgaattcagctgccttcttggccgtgtcatcgtcgtcgcccagcagggtgaaggagatcttcttgccggtttctttcaatgcttgcttgtaaagcttcttggcttccttaacgttgtaagttgcggccttttcagttgcggcattcttgaccgtgtccgcgtagtcctggccattgaccgtcgtcatgccttctggatcaaaggttgtagctggcgttgcagccccgcccagagttgaagcaagttccttgcggttgatggccatggagatggcgagacgcaggttcttgttcttgaattctgggtgcttcttgaggttgtaggacaggtattgggtcgtggacatcttgcgttgggtgtagccggtcttgcccttcaaagacttggtggcttgggcgtccaggaaggcagcgtcaagcttgccgctttggtaaaggttgtagtcggttgaaggggtcttttgaacgctgaacttgaccgtgtccagcttgacgctcttcttgtcccagtaggttgggttcttgaccagcttccagctcaagttggacccggtccagccaacttgcttgaatggaccgttgtaaaccatgtacttggatgaggtcgcgtacttggagccgaacttcttgacggcatgttcattttgcgggaagaagagcgggaaggccatcaacagcttgaagtatgggatccgcttttccaaagtaacggtcagcttgtacttgccgtcagccttgatgcccaaagctgctggcttcttcttgccggaaacgatcgcgtcggcattcttgatgccgctgaacaaataggcatattcagaggcggtcttcgggtcgatggttctgcgccatgaatagacgaagtccttggcagttaccggatcaccgttggaccacttggcgtcctttctgatggtgaaagtccaggtcttgccgtcggcactgttcttggtggaagtggccaaagcattttggaccttggcgttcttgcccagaaggtaaagcccttcttccacgttgttgatttgttcatatgatgcctggtcggttgccttggatgcatccaaggtcgtcatttcagcggtattcatccaggtaagggtctgcttcttggcactgctttgtgagctgtttgacccgcaggcggctaaagtggccgcgctagctaagattatggctgagctggctaaaagtttcttgcttctcatattgtttgccttctttttcttgtaaaactcatatattacgacacagcttgatagatgcaactaaactgctgacctaagagatattactaattatagcaaataaattaaaaaataccaggtgaactttaatctttttgtcattagccgtgaactttacccattatatggaaaaaagcgctttgcccaagtaaaaaaagctattccagaccgactttttgctataattagggtaagattgcaaggaggacaacatggaaaaattaactaccatggagctggctgacgagttagctgaagctcaagacaagattcttaacggtgaagcaaagctggataccggccgggtttaccaggccatcgatgatttgggcgtcttgaacgatcccatcagcaattacttcgaccggaccgaagatgaatactatgaaactgaaagtgaccactacctggctttgactaatctgactggcaagctgggcgacctgcacgaccgcatcttgaccaaccacgttgacggtttcgttgacaaggacgaaatcaacctgacctacaaccacgaaaatgcctacgtggaagacaattacgtgccaagaaccgacctgcacgttttggtctacgggcttaaggtgatcggggcggttgaagccatcgccgctgccgacctgcgcaacgtcttgtccaaggatgccgtgctttccttgggcctggcggcacacgcattagcagaaaatctataattgagagccgggggaggcccggctctttgtgattttaggctttttggaagggtagaaatggacctgtttaaatacacaaagggaattattgacaaggcagttggggcttccaagctgcacgccgtgcaaaagaatgccggcgagctcctggatcccatgcagaagtatctgacggtaggggagtaccatgtcgatgctcgcgacgccacgcctgacggccggccgtttaccttgacggtctaccaagatgaccagggcatcctgcaccaggcgctcagtccggaaagcaccgacagcctggccgctgaatacgaccggaaattcgtgccggaactgaaccgcttcaaggctttccgcaaccgggaaacgggccggcgctatgtcgtggaagactacctggcccgctttgccagcgacgtgaaaaaggaaatccgggaaggagacgactctgtcaatatcggggtcattaccgacacccacttcaagaacgttgacagcctggacttctatggctggaacggcttgatgcatgtcaaagagttttcctacctggaccagctggatattttggacctcaaatgccacttgggcgactggatcgacggctctgacgccggcctcatcagcgaaagcgaactgatgaagctgcgggactcctttaagtccagcaaggtgccttacctcatgatcaagggcaaccatgacgaaaatgacaagtttgacgagcaccatgacttgaaggccagcttcccggagcgggagtttgagaagatcatgtggccggagatgtaccggcaacgggaattgggctatgtttcccgccagcacggggtggcctggtttgaccagggccatgtccgggtgatcagtctgaatacgtcagacattccctacattttgaatgaaaaagggcagaaaaagtacgatgttaaattgaccctgggggtacgggaagaccaggtgcaggaactgatcgaaatcctacagcagtcaagcggcaagcaggttatcctgctcagccacgccaacccgatcaaccggaagggcggcaatgccttgaagtacaacgggcgatccctgcatgaactcttggtggccttcaaccagaaggaaaagggccggatgcactccagcaaggacgtgccggcggaattccgcttgagcaacgactttgacttcaccaatgtcaaggacgcccggatcatcgcctacttctgcggccaccggcatgtggaagaccagtaccggatcaacggcatccagtacgttctgttcaactgctcagccttgatgggacccaaccaccagctgacgaccaagtataacaagaacttaaaccggaagatggaccaccagaatgaatttgccggctatgtcgtcaacgtggaccttttccggcggcggatcaaggtctttggctatggggccgcgaccagacggagaatttttttcatttaagtaaagattaacaaggactctgtaaacattagagcccttgttttataataagaagttgactttatagaaactaactagaattaaggaagagaaaacatgtgcggaattgtcgccttttacgatccagaaatcaatgacaagcaggcggccatcggcaagatgatggctaccatccaacaccggggaccaagcagtgacgggatgtacaccaacgacaaggtggcccttggtttcagaagactgtcgattatcgacctgcggggcggtagtcagccaatctacaacgaagaccgcagccgggcgatcattttcaacggggaaatctacaacttcaagcccttaagagaggaactgatcaaggcgggccacaccttctccaccaaggccgacactgaagtcatcctgcacggctatgaagaatgggggatggacgggatccttaagcgggtccgggggatgttcgccttcatcatctgggacgacaatacccagaccatgtacggggcccgggacttcttcgggatcaagccgatgtactaccaggacgtggacggtcaccttttggtcggctcagaattgaagagctttttgcccttccctcattttaaaaaggaactgaataccgaagccgtcaagccatacctgatgaaccagtacaacgaccttaaggaaaccttcttcaagggcgtctaccgcttccagccaggtcactggtttgaatacaaggacggcaagatgaagacccaccagtactgggatgccgaatacaaggacaacaacctttcctttgaagaaacagtcaagaagatcaacgaagacttgaaggaaacggttgacctttaccgcaacgccgacgttaaggtcggggccttccttagtgaaggggttgactccagcttcctgacggcccttttggacccggatgaagtcttctccatcggctttgacgacaacacctacgatgaagcttccaaggccaaggccctggccgacatcaacggctggcacttctacgctgacaaggtctactcagaagaagccatgcgggacttcccggaaatgcagtaccacatggacgaaccagacgccaacccgtcaatcattcctttgtggtacctgtgcaaattggccagaaagcacgtgactgttgccctgtccggggaaggggccgatgagctttttgccggctatgtcaactacgggatgcacacccacaacaatgtcatcaaggtctttaccgacaagctgaagaagctgccaaagggcaagcgggttaagctggctcataagatcaagaagatgccaaacttcccgggcaaggtgcacctttacaccaacctggctgaaccaagcgaattctacgtgggccagtcagtcatctacgacatggactacccgaccatcttcacttctaaggacgctaacgctgtcttgcagccgagctaccggaacaagctgacggttaacggcaactaccaggaagacttcaagaaggtcaaggacctggacaatgtcaagcagatgcagtacatcgacctgcaccacttcatgctcaacgacatcgagcagaaggctgacaagatttccatggcccactccctggaactccgggtgccttacctggacgtgaagatcgccaaactggccaactctattccaagcaagtacctggtcaacaaatatgacaccaagtacgccctgcgtaaggcttcagaacaggtcctgccggatgaatgggccaagcggccgaagctgggcttcccgacgccaattaagcaatggctgcaggaagagcgtttctacaagcaggtcagagacctcttcagcgaagacttcgtcaatgatatttttgaacaaaagaagatcctggacctgctggatgagaactacaatggggacggttctcaccgccggcagatctgggcaatctacaccttcctggtttggtacaagctcttcttcgttgactacgaggaaaccgtgcgcaagtaccagcacgtgcagccggaagtggccagcttgatcgcccagggcaagctgctctaatccaaaaagaagagaaagagaatttaattactaatggctaaatttacaccaattttgcttggcagcgacatcaacgtctacgggatggcgcggtcttttaacgaagcatacggcatcaaggtccaggcttgggcggcaacgcaattggcggccacccgctattccaagatcgtggacgttgaagtgcaccctggtttttccgaagacccgggcttcatggaagtcatgcaggaaaaaatcaaggaataccagaatcatgaagagccagtcattctgatcgcttgtggggacggctatgcagaacttttggctaagcacaagcaagaactggaagggaccttcgtcgttccttacatcgactaccagcttttggaaaagctgatctctaaggagggcttctacgaagtctgtgaagaatacggcctgccttacccgaagaccaagatcatcaagctggctgactaccaggatgggtcatacgccgacgtgccttttgccttcccggttgccttgaagccggaagacccggtttcctggctggatgtccagtttgaagggcggaagaaggcttttgtcatcaaggacctggctgaattcaaggacattgtgggcaagatctacaccaatggctacaaggaagacttgattctgcaggacttcatcccgggcgacgactccaacatgcgggtcttgaacgcctacgtggacaagaaccaccaggtcaagatgatgtgcctgggccacccgcttttggaagacccgactccgcagtcaatcgggaactacatggctattttgccggcctatgatgaaaagctttacgagaccgtccagaccttcctggagaagatcaactatgtcggcatggccaacttcgacatcaagtacgatgcccgcgacggccagtacaaattctttgaaatcaacctccgccaaggccggtccagcttctacgtgaccttgaacggctacaacctggccaagtggtacgttgacgactacgctgaagactccttggccggccaggagaccgtctatgccaacaagctggagagcagccacatgctctggctgggcgtgccggagaagatcttcaaggaatacgcggtcgacaacgaggccaagcaggcggccttgaaactgatcgatgccggccaggtggggacgaccgtcttctacgaccaggacagctcctttaagcgctggctcttgatgaagtacatgttccacaactactacaagcgcttcaagacctacttccaggtcaacaagggccagtacttcgataaatagccaatacttttataagctcttgatgaaaatcaagggctttttttatctttttcaaatttttgaaggactttggcaaaaggctaaaaatatttgctcaagcaaaatattctttttttaaaaatatacgggttccaagtcccgtgacagctgaattctctcctgtcatttaacagaaatgggtctttgtatagaccgcaatatctggtattttgtgctatgcttatctcatgaactaaacaagatgtggtggttatccacacttaatccacaagatagtctagttcttgtgagtaactcgcttaaacagccccagaggctggatgtaaaaaggcaaggtatttttgagagataagaggttgattgtcatgttaaagccggcagcagaaactgtgagcctgaatttcgctaacgcgccaaagaagttcatcaagcgcgacggcgccccatttaaatttgaacaattcaagttggaaatggttctggatgaacttggcctggaagacagcgaaatcaaggctgccgttttgagcaaggtttacgccaagctggccacctacacggttgacgccgttcaagtccacgctgccttcagagccagcttgaacgaactgggctatctgaatgaagccaaggaatacgaagccaagcggcaggaagacgaagccgactggcgggcagaaactgacaccaagcagcgtctggccaagctggtcgacaaggacccaagcatcgtccacgaaaatgccaacaaggactctgacgtctttgccacccagcgggacttgactgccgggactgtgggcaagacggttggtctgaccttgatgcctcagcacattgccaaggcccacctgcggggggacatccactggcacgacctggactacactcctctttcaccaatgtccaactgctgcctgattgactttgactacatgctcaaccacggcttcaagatcggcaacgccttcgtggaagtaccgaactccatccgggtggccaccagccaggtagcccagatcatcaccagcgtggcttccagccaatacggcggctgctcttttgaccgttgcgacgaagtcctggcgccttttgccgaaaaggactacaaaaagcacctggaagaagggcgtgagttcatcgacgacgaagacaaggtaaaggcttttgccaagaagcggacccaaaaggacatctacgacgctatgcagagcctggaatacgagatcaacaccatgttctccagccaggggcagactcctttcaccaccttgggcttcggcttagggaccaactggattgaaagagaaatccaaaaggacatcctgcaggtccggatcgaaggcctgggccgggaacaccggacggccatcttcccgaagctggtcttcagcttgaagaaggggcttaacctccacccaggcgacccgaactacgacatcaagaagctggccctggaatgtgctaccaagcggatgtacccagacgttttgagctacgacaagatcattgacatcactggctccttcaaggccccgatgggctgccggtccttcctgcaaggctggaaggatgaacagggccaggaagtcaactccgggcgaatgaacctgggcgtggttaccttaaacctgccaagaatcgccatggaaagccagggcgacatggaccgcttctgggaaatcttcaatgaccgcctggaactgggccggcaagcctgcgaatacaaggccaagaaggtcactgaagctaagccggtcaacgctccaaccctgtatgaatacggcgcctttggccaagggattggcgatgacggcgacgtcaacgacttcttcaagaacggccgggccacggtttccctgggctacatcggcctttatgaagtcggcacggtcttctacgggccagactgggaaaaggacccggaagccaaggccttcactttggaagtggtcaagaagatgcatgatgcctgcgccaagtgggaaaaggaagacccgaaccactaccactacagcgtctactccacccccagtgaaagtctgaccgaccgcttctgccgcctggacacggagaagttcggcaaggtcaaggacatcacggacaaggaatactacaccaactccttccactacgacgtccgcaagcacccgaccccatttgaaaaactggactttgaaaaggactacccatactacgctgccggtggtttcatccactactgcgaatacccgaacctgaagcaaaacccggccgccctggaagctgtctgggactgggcttacgacagagtcggctacctgggtaccaacaccccgatcgacaagtgctacgaatgcggctttgccggcgagttcaagtcaaccgccaagggctttgaatgtccgcaatgcggcaaccacaacccggaaacctgcgactgcgtcaagcggacttgcggctacctgggcaacccgctgaagcggccaatggtgcacggccggcatgaagaaatcgcccaccgggccaagcacatgagcttgggcatggtcagcgaggaagccagcctggaaaagcagaagaacagccaatactaaacgaaaagaattatactaataggcaggaatcattcctgcctattttttatcgaaagcaaaggagaagcgagatgccagagaaagacaagaatcagcaagaaggccctgacgtccgggacaacctgatccggatcagcgtcggcggggaaacggtctttgtggacgccaaccagtacaaggctaaaaatgccggccagacggccaagccacggaagatgaagcgccagcccaagaatcctaagccgggcgaatggatctcagaagactacagcaagcataagattgccgactacaagcccttcaacttcgttgacggggaaggggtccgctgctccttatacgtgtccggctgcctctttgactgcccgggctgctacaacctggccgcccagaacttcaactacggccgtccctacacccaggaattggaagaccagattatcgcggatatcggccagtcctatgttcaagggctgaccttgcttggcggggaaccctttttgaacacctgggtctgcaaccggatcatcgaccgggtccgggccgaatacggccacagcaaggacatctggtcctggtccggctatacctgggaggaactcttaaaggagaccccggacaaggtggaaatgctcaagaagctagacatcctggttgacggccgctttatggacaacttgaaggacctgaccctgcagttcagagggtccagcaaccagcggatcattgacgtgcagaagtccctcaagaccccggacctgcacccggtcatctgggacaagctgcagagatagtttttttagcgaggaaaaaatgaacgaagaaaaacgcgccttggttaaccaggtcatcggtcagctgcagaccgtcatcgacccggagctcctggtcaatgtggtcgacctgggcctcatctacggagtcgacatcgatgatgagggcaactgcctggtgaccatgaccttgaccacagccggctgccccttaaacgactaccttaaccgggaaatccgccaggcggtgggccagctggccgccatcaagcaggtggacatcaagctggtctggtacccggtctggaccccggaccgcttaagcgagcaggcgaaaaagcagctgggcatcaaggaagagccggctccggcggctaaggagatcaacctccaccagccgatcaagactttcgctgaccagtatccggaatttaccgaagatatgtccgagatcggcttcaaccggatcaagattccgggcatgctggacacggtgggccggctgatgaccctgccgatgggctgccgggccatgggctttgacctggaagaggtcaaggagaagctgcgcttgaagggatacgaggtgactgagtgatgaccatgtctttaaaggagaggcaggagaagctgctggagatcttgcgccttttgcgggacaagggggactttgaccgggccaaggccatgttcaacgaggctttttcttcagtctcagtcaaggaaatcacggaagctgagcgggccttgatcgccggtggcctcaacccccaggaaatccagaacttgtgcacggtccacgcggaagtcttccggggatcgatcggcgagcaggaagcaggggaggcttttgcccggcccggccacccggtccagaccttgaagcaggagaatgtcgttttgacctctctggttaacgatgcccttttaccagacctgaccaagtatgaagcaaagccagccccggaacttttggccaaaatcaagcaggagctggctgacctggcccaagtagacaagcactataccagaaaagaaatctccatgtttcccttgatgaccaagtacggcatcacggccccgccccaggtcatgtggggggtagacgatgatatccgggcctggatcaaggaggcccggcaggcggctgaaacgggcgaggcagaacttttggccaaaaaggtcaagcaggcggccaaggaagtcaccgaaatgatcttcaaggaagaggcgatcatgctgccgctcttgacggaagtggcgacgccggccgactggcttagggtcaaggaagacgagccccgggtgggctactgcttgattcccaatccgccagcctggcggccatccgcggccgaactggctgagaaaaaggcagccgacccggtggcgatcgcgaagtggaatgaccagatcggggcttttgccggccagctgggcggcaatgaagccgaaaactaccaaaagctggtggaagtcgagcaggcggaggaaaaagcccggccggccctgacggactcctttattgagttcgcggaaggcagcctcagctatgagcagctctcggccgtcctggaccttttgcccctggacctggtctttgtggacaaggacgacgtcatccgctactttggcggcagctgcggcttttatccccattcgaaaaacgacctgggcatgaacctgtttagcattcacatgccaaaaagcgtgcccaaggtcaaggccatcgtggatgacctgagaagcgggagaaaggacaagcatgccttctggtttgaagtccggggccgcttcgtctatatccaatacctggcggtcagaaacaaggccggggaatatctgggcgttttggaagtcttgcaggatattactgacctgcgcgcattgcaaggaaagaagaaagagttgtagaattataataaagagagaagccatggcttgctgagtcgtggttttcttattgcctggagtatttttagcaattaaatttagaaaaggaggaatggataaatgaaaactaaacacggacagagccagttgccggaaatcgcgctgccctggctagtcgtggccgaactggctacttggatcggggccagcttcatttggccactgacttccgtttacctaaacaagcggttggggatcagcctgtcggtaatcgggatcgtcctcttctgcaattgcgcggccaacatgctggggtcaaccatcagcggccggctttttgaccgtctcaatccttatcctttgattacgggcgggatgctgctggatgctttggtcctgttggccatggccttcttccacggctggccggtttactgggtctggctggtctgtacgggctttttagggggctggaacggggccctggtcaattccatcgccaccagcctgcgcaagtatccgggccggtatgtcttcaatattctctacttctcccagaacctgggggtggtaatcgggaccttgattgtcggctacctttacgactactcaattgagctgctctttaccattgccagctgccttttcttgatcgggactttagttgccttctgcaagtttaagccgatcgtggcctaccatgcccgccggcaggagcagaagaagactggccaaaccccgctgaaggcggaaaagatgccaaaggccaacttctggatgaccatgggcttcttcatcaccctgggggtgacctggctgatgtacatgaactgggagtccaacctgtccgtttacatggtcagcctggggattcctttccacctttactcaactttatggacgatcaacgccggcatcatcgtggtcgtgcagctgattttggcccgcttcccgcggatcttcaagagcatctaccagcagatctacttcgggatcttcatgtttgccgtgtcctggctgaccttgattttcgccaagacctacccgggcttcgtcttgtccatgtcgatcctgaccttgggtgaatcgacggccttttccgccattccggcctatgtcaacgacatgtcgccgtactccagcaagggcaagtaccaggggatgaccctggtggctagcggggtcggccgggccttcgggccgcttttcggcgggaccttgatcgacctcttcggctacaagaccatgtttgtagtcgccagctgcggcatcctcctttgccttttggccctcttgccgctgagaacaaagctgaaggaccaggtgcagttcttcaagtaggaatttttagcatttttttgcactttggttgaacagggaagcagttaacgggtaaaataagaggatagtgagaaaaggaggaaaacatgcttaaggtttacgggacaaaaatctgtccggactgcatcgcctgtgaggccagttttaaaaagtacggcatcggctacgaattcgttaatattttcgccaccatgccggatttcaaggaatttttgcgcttgcgggatgccagtcccgcctttgctcacgctaaggagcagggcagcgcggggattccggcctgcgtcaaggaagacggggaaatttttaccgactgggacggctttttaaaggaccagggcttagagccaatctgtcccgaagcagctgaccaggccaaggctgaaattgaagcccagtgcgacctgcgccagcacaactgctagttaaaaaacaaggaggaagaaatattgaacaataaatttgccgtccgcggcggcagcggcgacacgactgtcgttgacaagactgcccgcccgcaggacaacctgtatttggccgttaactctgactacctggatcagctggaaatcccggctgaccggtcccggatggggagctttgaccaaatcgctgaaaacgttgaaaagaccctgatggctgacttcgcggcttttgccagcggggaaaaggaagtgccaaacctgccgaacctggccaaggccgttgaactctacaagctggccaaggactttgacaagcggaacgctgacggggcagaaccaatccaggctgacttgaagaaactggaaggcttgaacagctggaatgacctgcaaggcgcggcagctgctttggccaaggaaggctttgaactcccattctccttctccgttgacgcggacatgaagaacaccaaggtcaacacggtttacttcggcggtccccacatctttttgccagatacgaccacttacgaaagcccggacgcggaaaaactcttgggcgtgttaaaagaacagaccctcaagctcttccaaatggccggggtaagtgaagaaaaagccgctgaatatgtagacggggccctggcttacgaccagcgcctggccaaggtagtcaagtccagcgaagaatgggctgactacccggccatgtacaacccgatttcattggcggacttcaagagcaagttcactagctttgacatgggccagttcctggcaggcttccttggtgaagaaccagaagttttgatcaacacggaaccccgctacctggaccaggcagaaggtcttttaaacgaagccagcttcagtgaaatcaagggctggatgctggttaagtttatcaatgacgtggcctcatctctgtcgcaagaattcagagaagccgccttcccgttcagccaggctttgaccggccagccgcaactggccagcgggattaagcaggcctaccggattgccaacagcactttcagcgaagttgtcggcgtctactacgggcagacctacttcggggccgccgccaaggaagacgttttgggcatgatcaagcggatgctgaaggtctacgaggaccggctggccaagaacgactggctctcccaggcgactaaggacaaggccatcaccaagctgcaggccttgatcttgaaggtcggctacccggacaagattgaagacatctacaaccgcctccaggttaccccggcagaagagggcggcagcctttacagcaacctgcaggccgccagccaggaaagcatcaagtacagcctggagaagctccaccagccggttgaccggactgtttggctgatgccaggcaacctggttaacgcctgctacgacccgcagagaaacgacatcaccttcccagcggccatcttgcaggcaccattctacagtgctgaccagagccgggcagccaactacggcgggatcggggccgtgatcgcccacgaagtttcccatgccttcgacaacaacggggcccagttcgatgaattcggcaacatgaagaactggtggaccgaagctgactacaaggaatttgctgaccggaccaaggcggaaatcgccctctttgacgggctcaagttcggcccgactactttgaacggcaagcagatcgtgtccgaaaacatcgctgaccagggcgggttgaccgcggccatgaccgcctgcaaggaagaaggtcatggcctggaagacttctacgccaactgggctagagtctgggcacaaaagtccctggaagcggccatcaagatgatcgtttccgttgacgtgcacgcgccaggccctctgcgggcgaatgtccaggcccagtgccaggacgaattctacgagacctttgacgtcaagccgggcgacgggatgtacctggctccggaagaccgggtcaagatctggtagtttttcataaaatttcataagcaacaaaaaagcagtcattctatcaatgactgcttttctgctgctgtgtgtttgtctaatatatgtgtgtaaaagaggaaaagaaaaaggaaaattaattcctataggagaagcaatttcttgcttctgactatggttatataataacggccctttgtaaaaaagctgtgatcaatctgctttgcttcaatgaaaaaaagtttgtaattttctagagtatttaagactttctaaaagcaaaaagggcaagcattcaatcgcttgccgtttctttatttgctaattacttctttttgtccttttgcttcttgtctagcaaggtgtcttgctgtagtcaaccggagcaacccgcttgattcttgcaggctcttgcttaccaaggatcaaaggcacgcgttcgatgaccgtgtccgcgaattctaggccgaaccattgagccgggttaggtgacaggttctgcagctggacgcgggccttgaccagccacttcttgtaagaagatagggtggtcgaaggtgagatgacgtcgttgacgatgacgaacttgaagtcgccgacgtcccggccaggagtagtcgtgtattcctgcggctgggcctcgatcgtgttgtccttgatcaagtcgtggacgatctggcgcaggtagacgttgacgctagtctgcttcttgaaaccaaggtagagctggatgttgatcacgttcttggtgccaaaagtgttgaccgcgtattcagcggtaaacggctcgttggtcacgttgaccgtgacgaaccagtaagcccgggcccgcttaggccgcttgtccaggattgagtagaggatttcccgcttgatgaacttgttgtacttgacgttggccatgtaaaccaggttgtcagcgtaggtcgggtagttgtcgtcgtggctgaggtcggtcagcatgtccgtgtattcatccaagcggacataggcattgccggcttcgttttggtcccggaccttgttgccgaagtaccaaacgaccatgacggaaacgatcaagagggtgatcaacagtgatacgtaaccgccgtgggtgaacttgctcagactggaccccatgaagaggatgttgatagtactgaagaagatcacgaagatcaggttggccaggttgtggcccttcttgagcaccatccattcatagcgcaggatggtggtcatcagcatggtaatggtgatggccaggccgtaggctgcttccatgtgggctgaggttctgaagaagagaaccagggcgatggtggtaatgcccagcatcttgttgatggccggaatgtaaatctgccctctttcatcagatgggtagaggatgttcatccgcggcaggaacttcaggttgattgattccgccaccagggtaaaggatccgctgatcagggcctgggaagcgatgatcgctgccagggtagccagaacgattgacgccagccggatgttttccggaatcatggcgtagaaggggttgatttcagtggctgagtgcaggttggtgttgtttaagatccaaaccccttgccctaaatagttcagggagaggcagacgaaaacaaatggccaggagccgatgatgttccccttgccgacgtggccgacgtcggcgtaaagggcttcagcccccgtggtggctaggaagatggaccctaagatcgctaagcccgccttgttgtaaggactaaagagcaatttgatcgcgtagtaagggttcaaggcctgcaggatccaccagttgccgccgatgttgatcaagcccatgacgcccaggaaggcgaaccagacaagcatgactggaccgaaagcctttccgatgatgctggtccccatccgctggatggagaaaagcactagcaaaataataatagtaatgaccaggaccgtggtctgggtgctgaccgggacgttgcccttgccgaattccagccccttcagcccttcaatggcagtggtaaccgtcacggccggggtcagagtcccgtcggccaggatagcggccccgccgatcagggctggccagaccagccaggcagccttatgtctgatcaaggtgtaaagggcgaagataccaccttcgccgtggttggttgccttcagggcgataatcacgttctgcaccgtcgtgagcatggtcacggtccacaggaccgcggaaatggttccgatgatcaagtcccggctgaccgtattgagcccgccgttgccgtcgattacggatttcatgacatacaggggactggtcccgatgtcgccgtagacaatcccaatcgcgatcaagaggccggcggccgtcatgcgatcgcgtttattttctacttccatagcacttatatactcctcaaactaaaaagtttgtgatacacaaaaataactgtaaagcttttgcttagatttaacaagtaaaaaaagaatgccaggagacattctctttactgtaattttcttatatttggagtaaagtttcaagccctttaggacaaactactttcaatcttcgcgcgaacgccttcgtaccagttgctccagtcttcgtaagtagtcatcgcttccgggtcaacgccggtttctgcggtcatcttgtcgaggatggcttggaaattgtgggcgtgatcgatcagcacatgcttgaccaggttcttgcgggagaatggctggttgagcaggaggtagtggttgatgttgaccatgttgtggtcttcgtcaaattcactgatgatttccaggtcgtcgcgttcgaaagaagaaacgtagaagttggcgaagttgaccaggtaagccggctggtcggcaacttcgcgtgctggcatggttacgcgttctggttcaggcatcacgatcttgaacatgtcttcattgctgcggattttcttttcttcttctgccaaagttgtagctcctttttaaataaaagtctataaagtcaatagtaattttaacggctttaaggccagaaagcaagcgccaggcccccataaatcaaggcctggcgctgaattatttcttatttgcccgactttaggtagccctcgacgtcatccttggtgatggagtcgatggtggtgtggccctgctggtaggcgtagttgaacaggttgatcaggtcctgcgggctccagccggccgtgctttcgcccaggttgtcaagctgggtgcggatctgctggacgtcccggctggtcacggtgctgccgccgaccttgtcattgttgctggtcccggacccttcagcctggttgctggaagagctggctgaactggaagcggcagaagatgagctggaactggattccttgctgctggacttgctggaagagtctgaggaggatgagctggagctttcagaactggagctggagtcttcctgcttgctcttggcttccttgagcaggtccttgacgttagaccggaccttggcgtagtaagccccgttgatgtaaggcaggtctaagatgctgctgtaggtggaaacggcgctgtcgtagtcgccgtcttccatggccttggctgccttgtttaagagcggcttgatttcactgtcgtagttgtccttgacggtcttgagctgtttaaccagctttttggcctggctggtcatgacactgtagccgccattttgctcctgggccttttgggccaggttcaaggcgctggcgtacttgacggtcgtcttggccagtttcacggagtcggccaggttttcggcctgggcctggtagtttttggcttgggcagttgccttagcctggtaggcctggtcaaattcgtcagcggcctggctgtacttcttggcttttacggcctctttgccggcctgcatgtggctggagtagctggaacttgccgtctgctcctggctctgcttttgctggctggagtagaagtaggcgccagccccgcccaaggcgagtacggccaccacaacgatggaccagatagtcgattttttcataaataacctcctcgttaatcttcccaattataccagatcagccacctgctttaggcagccagtccaacttgtaattgttccttaacaaaaagtggccgacatttgcttcttgaaacgttagtatcagtgcaggcccaaggcgccggggccggccggagcgaagcccgttgcttcgcggcaagattgattttttacagaaacaggagagaaaaaatgaacttcactttagctgaccaaagcattcaatacaccttcaaggccgaaaagtatgacaaggggcagatgcagcgcagcctgcaaaacgtcaagctggatgccagcccggaaagcctggtcaaggtgggccaggccatcagcaagctgcaaggcgatgaactggctgccttgaccctggtccaaaagcacaatttgaccttggcctaactctttgacgcggaaacttcagataaagaatttttgagtaagaaacaggagaaaaaatcatgactacgactaccgaattgcaattaacctttaagtccagtgccggcaaaaagaagagcctgaacctgccatacgcggtcaagggcttgagcgcggacgtggtccgggaggccgcggctgccatcgccggcgagggcgtgttcgtcaaggaaggggaggtcctctatgctgagccgctggctgcaaactatattgaacgtactgttacgggtgtgtttgacgatagtaatcattagacagatctggccgctttagccggatgcaaaatttatacccaagaggcggcctggccgcctcttttctttttatgttttatgcagctttgcccccgccttttggtattttctttcttagcttggaaagggggaaaagcagttttttcctataaaaattgtaattgcttaagaaaattgttacttttactttacagaatgcgcgttcgattgtaactagagcgctgagcgcataaaatagaggttacgattgaattattaggaggaaattaatgaagagaagatttttgactggacttgctaccgcagcgatgctgacttccgtcgccgttccagtgaccaacaacatgtttctctcaaatcaggcagttgaggcatcagctaccagcgatgcctttttaagcaaggtcagcctgcaggcgcagaagacgtccaagaagtacggcgtctacgcctctttgattctggcccagtccgccttggaatctggctgggggacttcaactctgtctacccaggccaacaacttctttgggatgaaggcagcaaacacttggaccggggcaacctataacgtcaagacggctgaacaggactcaaagggcaagacttactacatcacggctgccttcagaaagtacagcagctaccaggcatcttttgatgactacggcttgaagatgcggacgaccctgggcaattacggtagcttgcgctacagcaagacctggctggaaaatgcctcaagcgcctcagctgccgctaaagccatcaaggctgccggctacgcgactgacaagaactacgcgaccaagctgatcagccacatcgggacctacaacttgaccaagtatgacccggtttactccggcactaattacacggccaaggtagccaagtccggggcaacctacctctacccgactgactactctgtttcaccgaagaagtcttacgtgaccgccggccaaaccgtaacggttaccaagacctacacttactacaacggcaagaagcggatgtacctcaagggcctgggctggatcaacggcgaaagcctgaacactggcagctcccaagcgccaagtgctgacaatgccgccagcgtttccgggcaaatgaaggtgctgatgcactcagcagctatctacaccagtactggtgccaagagcacggctaagtcggtcaaggctggcaagagcgtgacgacttacgggtcagtcacgatcaacggggccaagtactaccgggtcaactccgccagcgctgaccagttcatcaaggcaagcaactttgatgggaccagccgcaagctcaagcgcaatgcctacatctacaacaatgcgggcaagcgggttggcaagaccaagtggctcaagggaagcacccacattgtctacggcggcagcgtgaagatcaagcacaagcagtactacatcgttggccttaaccagtatgtcaagaagggcaacttttaaaaagacagggaagaaactgaatgagatttaacaaaattttgacggcagcagccgtggccagccttggcctgacgtttgttttcagtcaagggaaggccgcggaggcctcaatcaacagtgaagccaagaccaagacttacagcggtaccaagtccctggagaccctgcttaaagccgcggggctgacttacaaccaattcaacagcgtggctaatggcaacaagtacggcagccgttttggctaccgcaatggggttggcaagcctgaaggggtggtcgtgcacgaaacggcgagcccaggtgccacggcctgggatgaaggccgctatttcaacaacaactggatgacggcctacacctatgttcacgccgtggtcgacaataaccagaccatccagctgatgtcaccggactatggggtctggggcgctggcccaattgccaacgtccgctacattcaagttgagctttgcgaagtttcgacccggtcccagttcgtgcaaagcgtggctaacgatgcctactatatcgccagccttttgcacagctacaatttgactccttcccgggccagccaggatgggtcagggacgatctggtctcataatgaagtctcccattacctgggcgggactgaccacggggacccagacggctactttgctaaatggggctactccatgagtgacttctacagcttgatcagctacttctacaacaagcagggagcaagtaccggcaccaacactggcaacactaatactggctctggttcaaatactgggaataccaatactggcagcaataccagttcaagcactgatagttccagccaagctccagctacccagccggtaacgaccaagaagctgcgcttgatgcggaatgcctacagctatgatgcctccggcaagaagctggcagtcaaggctttgaaggccgggcaatacttcaaggtctacgggtcagctgtaacgattggaagcagcaagtactacaagtacgctgatggcaagtatttcaaggctggcaacattgatgggatcagccggactttgactggcaatgcctggacctacactatttccggtagccgggaatggtccacggctaagctcttaaaggggagcaaggtcacgacctacggcagccaggttaagatcaagggcaaggcctactacatgactggctttaccagcaataacgtggccaagtatgtcaaggcagtcaatttccagcctaagtcagtggaagtcagcacgagcaagcgcttgatgcggaattcttacagttacagcgctgctggcaaaaagttgccagacagcatgctgaaggctgggcaatacctcaaggtctacgggtcagctgtaacgattggcaaggccaagtactacaagtacgctaacggcaagtatgtcaaggctggcaacatcgacgggaccagccggactctgacccacaacgcttacgtgtacacggtcaagggggcccggaactggaacgaagctaagcgccttaaaggcacggccgcagtaacttacggcagccgggtcaagcttagcggcaagtactactacatggtcggcttcttcggccaaaccgccctgtacatcaaggccggcaacttttaatcgaagataaggaacggatccaggcttagcctgggtccgtttttctttcttaatttggcgattattgtataattagaaaaactgtaattagtgaggagatactttttagcatggaaggactatcactgtttttaacggtcttcttggccctggtgattccgatcgtcatggcccgcttgcgggtgaccacggtgccgaccgccgtggccgagatcatcgtcgggatcttgatgggcaagagctgtttgaacctgattacccagacttcccagctgacttttttgtccaacctgggagtcattgtcttgatgtttttgtcagggatggaaatcgattttgacttgctgagcccgaaaaagcacacccgggcccggaagtcagagagcggcaagcaggtcaagcccatggtcgtggctgccttcgcctttggcggggtagcggtggcctcagttttgctggctttggggatgaaggccctgggtctctttaacgacgtggccctggcttcgatcatctttatgaccgtggccttaggcgtggtcattgctaccttaaaggaaaaagaaatcctgggccggccgatcgggcagacgatcttgctgacggcggtcatgggggaagttattcccctgctgcttttgaccatctattccaccgctaacggcggggatgcccgcaagctctggctgatcatcctcttgtttgtggccgcgatcatccttttgcgccgctttaagcggccttacctgtggtttgccaaggtgaccaaggccacaacccagttggacgtccgcctggccttcttcctgatttttgccctggtgacggtggcagagcaggttggggcggaaaacatcctgggggcctttttggccggggtggtcatgaagctgctggagccaacccaggcgaccaaggacaagctgacttccatcggctacggcttctttatcccgatcttcttcatccggaccggggtcaacctcaacttgaagctgctcttcgccaacccgcaagccttgatgctgctgccggttttggtcatctgcttcttcttagccaagctgccggttactttgacctacatgcgggtctttaacaagcggaatgcttttgccgggggcttcttaacggcaacgacgatcacgatcgttctgccgaccttgcaggtagcccggaagctgaacgccatcacggcgactcagtccagtgccttcattttggcggcggtcatcgtctgcatcgcctgcccgatcgtcttcaactcaacttttgccttgacgccggaagacaagatcaaggaaaaggtcgtgatcttcggcctcaatgccgtgaccatgaccgtctaccaggacctgcacgactcctggtattcagttcaggttctgacctgccggaaggaaaaatacgacacctacaagagcaaggtaaagaatttgaagcttttgcctgaccggaagctggatactttagaagcagccggggcctttgacaccgatatcttcgtggccaccttcactgacgaccaggccaatttggaagtgggccgggcagccaagcaggccggagtcaagcgggtcatcgtcagccagggcaaggtcgtggctgatacggtcgaccagctcagagaggaaggcatcgagctttttgccttcaacaacctgcatggggccatgctccgggccttgattgaatcaccagccgtctaccggatcatcacggacaccaacaatgccctgtacgacgtggtggtcagaaactcggcctacaccggccgccagctgatggactgggacttcgtcgaccagatcaccgtttcccggatccggcggggggacaagtggatttccccgcacgggtcaaccgtgatcgagccgggcgacgaactgatctacagcggcccttggcgggaagccgaccggattcaccagcttttgagccgggaatagaaaaaaatcgctctgtcagccggcaaagcgatttttcttgtttatttcccgagttctttaattctttatttttctgttttgctttttctgctttttccttaaggcatgcagtccctggctgcttccaggacggcgatgacatgcaggctgtgggcaaaggcccggtcagcagcggttttgtccttttggtcaaagatccggatgaattcagtgaattccgggatcatccggtgcaggtctgggtcaaagttcttggcggtctgcccgtctgccgtttccagccggtagcttctgatgtcacccgggctgccaataaagctgatcgcccctttttccccggcgatgagagaggggttgtgggcaaaggcctgggagtccttggccgcggtcaagctggcctgtttgtcgtcataagccaggactaaaacgccggaagtgtcgacgcccttttgcaggttagggaagtagtggacgtccaaaggcgccccaaataggctgacggctaagtggatgttgtagacgttcaagtccaagagggctccgccgcccagacaggggttgaaggccggggcgatgtcgccggccaggaagcggtcgtagcgggaagagtactgggtgtagttgaggctgaccacgtgaaccgggcctaaaagctgcaagtcactggccaaggacttaaaggctggcaggtagcggttggtgatggcctcggtaatgaggcagcccttctggtcggccagctgcttgagctctaaggcttcttcagtcgtgaagacgaagggcttttcacagatcacgttcttgccggctgccaaagagtccaggcacatttggtagtgcatggaggaaggggtggccacgtaaaccgtgtcaacttggtcatctttgagcatttccaggtagtcgtcgtagacccggctgatgccgtattggtcagccagttcctggccggtggctgctgaccgcttggtcgtggcgatagcagctaattttaagccgggcaggggaagggcagtgaggaagtctctaacgatcttgccgctgccgataataccgagttgcattttttgcctccttatttgtaccttacattttgtattttctgttttctatttattcagccggctgacgtcgacggaatttttgctgaccgtcttggggatggccagctttttctgctggttgaccttgagcatggacagcttggttgagctggtttgccccttgaccttgtacttggcatagatggccagaccggtcaactgctttttctggctgaagtcgatggtcatccttatctgctggagcttagccttggccatttggctgtcgctagacaggctggccaggccgttggtttccgtgatctcttgccagaggcgctggctcttgcccgtgtagctgagccgccagccattttttgtccggctgacggaaaaaagcttggcgctcttttggctgagggtcagggtgtccatgtccttgaccagctgctggaagtgggagatggtcgtgaactggctgagcttggccttgtaccaagcttcctgctggtctttatagtatttgacgtaggcatagcgctggcccacccacatcttgacgttttggtccccgctctgggttaagtccgcctgcatgacgaagggagaccgctggtagttgatctggccgtaaaaacggactggtttatttcccgtgtaataatgttcgtcgatcttcagctggaagttagcaatcttgctctgctgggcctttttgaccaggctctgggggctgggcttggcgcaggctgttaaaaagaggctggccagggccagaagggtgagcaggtgaattttctttttctttgacggcatagtatgaatcacatccttattcttcaattctaacaaattactgactaattgttagcgattccagtcagaaaaagtgctttttttgcctttaggactttgaaaaggccgcgagaggccgtataatagttagtgaaacgtttaatttgctaaaggagattttttaatgtctaaattagttttaattcgtcacggtcaaagtgaatggaacctttcaaaccaattcactggttgggttgacgttaacttgtcagacaagggtgttgaagaagctaagaaggctggtcgtttgatcaaggaagccggcttggaatttgaccaagcttacacttcagttttgacccgtgcgatcaagactttgcactttgctttggaagaaagcggccaactctgggttccagaaactaagtcctggagactgaacgaacgtcactacggcgctttgcaaggcttgaacaaggctgaaactgctgaaaagtacggcgacgaacaagttcacatttggcgtcgttcatacgacgttttgccaccagttttggctgacgactcagaattcagccaagctaacgaccgtcgttacgcaaacttggacccacacatcgttcctaaggcagaaaacctgaaggttactctggacagagttatgccattctgggaagaccacattgctccagaccttttggctggcaagaacgtgatcatcgctgctcatggtaactcactgcgtgccttgactaagtacatcgaaaacatctctgacgaagacatcatggatgttgaaatgaagactggtgaaccagtcgtttacactttcgacgacaagttgaacgttgtaagcaaggaaaagctggactaagtcctctttccctaattaaagcgaagctccggcttcgctttttttgttggactgattaaggattgacagatggcttgctaagatgatagcttagataggaaagttgtgcacagggatacttacgggaaaatatcgcgcgcccgctttgactgttttttacaatttcaataagaaaaggccgcaggcaaaagttggtggtgcttttttgctataatacagactaatgtcattttttaagtaggtatcaatttatgaagaaagaagacaagctaggcattcctgagaccaggcagcatgccagaaagcgcaagcataagcagatccgcaactggatcatcggcattttggcggttgtctgcgccattgcggccggagtgggcctgtatgccgcccatttgtacaagacggctgagcaggcggccaacaaggcttatgactcagaaaacgcggttaagacgacctatggcgaattcaacggcaagaagccttttgccgtcatgctcttagggaccgacaccggggccttggacagaacggaaaagcgcggcaatactgacacgatcatcgtcgtcgtggtcaatccgaagaagaagaactacacgatgatctcgattccgcgggacaccatggctgacatggttggcgatgattcaaacgacgtgcagaagatcaacgcggcctattcgatcggcggagccaagatggccatgaagactgtctctaacctcttgaacattccggtcaagtactacgccttggtcaacatgggcgggctgatgaagctggtcgattatgtcggcgggatttacgtgacgccgcctctgacctttacctacagcggatttcctttcaagaagcgggtccgccagcacttaaacgggcaggcggctctggcttacagccggatgcgctatgatgacccgcagggtgactacggccggcaaaagcggcaaagagaagtcatcaccaagctggtccagaagctggccacggcagactcactgacgaacttcagcaagatcgccaataacctgtcatcaaacgtgaagaccaacttaagcttccaggctttgaagtcgatcttggccaactactcagactgcacttcttccagcgacagcgactacctgcacggctacagtgcttatgttaacgacgcggcctaccaaatcgcgccaaccagtgaactgcagcggatttccaacaagatcagaaagctgctgggcttgaagacggcgaccgtctccaaccgggaaaccgagctgaataccttaaacgagactgccggctttaagtttggcagcggtgagacccagaactacacgatctatgatccgggcacgacggctgacagcgtcaagagcggcaagaaaagttcaaagtccagctccagcgctaaatccagcagccagacttccagcagtacagattactctggcaatactgcttattctggcagcacaaattacgatacgacttatagctacagttataattacaactacaataccaatccgttttcagggggctattaaaggtgcttagcaaatttttggcagtaattatcggctatttgtttggcaactttatcagcgccatgttcgtgggcaagtactacctgcacaaggatccgaccaagtacgggtcaggcaacccgggcacggccaacatgggggcggttttcggcaagaaggcggggattctgacctgcatcggcgacttgcttaagaccctgctggccatttgtctggtctatgccatctaccaccagcacttgctcacggcttatacgggcctgggcgtggtcttaggccactgcttcccggtctttaaccactttaaagggggcaaggcggtggccgtgacggccatggttacggttctctacgactggcgggcggggcttattgctcttttaatagccttggtcttgaccgcaatcatgcagaacctgactatcccgcctttggttttcatgctgtctttcagtatttaccagctgaccaagtcgcttgaacctggcctggtcttcttgatcatgacggcagtcatggccttcaagttccgctacgatatacgggactttttcacgggccatggcaagcgggtcgatattttatatacgatcaagaagaagttgggaatattgaaataatttcttggtctttttttaagaaaaactgagtataatggataatgaatttgcaaaagaaagagaataattccgatattgatgagtgaacaaacacaatccagaaaaattcataacctgctgaagtacggcttcctgctgttggcagctctggtgcttttgctgcaaatgtttaatttcaagagcagcatgctgaaaagctcaattacctacctgcgccacctgccaccaatcgtggaaagcgcgacctattggtttattccaatggtcttcggggccgtttacagcaagcgcaagctgcgctttaacgaaggctttagggcctgggctatcatggaagtaaccctcttggcctactatcttgtcttctttatctccaagccatggcacttaaatgtctggcgcttctggggtatcctcttcccgattctgacctcgacttccgtcttgatgacgggcctggtcttcggcctgctggtgcagccggtcatttatgactggcaggagaagttcagcaagaagcagagcttgatcattttgatcgccttgaccttgctgggctttaccctgtcagccgggacttacgagatgaactactccatctatggtctctacctggctctgccatttgcctgggggatgttcttagggaaggttgacttttccatcaagcaaacggccatctttattgtggctggtatcctttcccttggcctggtaatcgtcggggtagccggctttaacgccgtttactggtcacagatcatgtcctggcgggccaacccgtcatcatggaactaccagttcctgctcaacgtgacctcacccttcatctttattattgccttggccgcttttgcttttgcccggccggccatcaaggctttggaagtaaaggacctggacttcctggttccgctgatcatcttcatgcaggcaccagatgccaactcctttatgtcttcctttaagtacggtaccggcagccggcaattgaaccggatgatcacgattttgatcatgctggttattgctattgcctggcacaggctgattgaacgctacttgtggcgcttcaagccagttaagcggatcaaccgcttcttgtatgaaagcaagagcttcggggcagcggctgaaggggcctttaaccgcctttggggctggatgaagtaccaccaccaccggaccaaccttttgacttggaccttcttctttatcctgtcctttgcttccttcctggttgaatccgacaatatgcggatccagatcacgactgcttccaacgtcaacgccgtagtctggctggttgggaccaagctgggggccttgattttgacgacaatctttattgacgccttcttcaccatcctttacttcgtcacgaccagatactgggtttccctcatcacgacttccacggtcgtgatcgcttgggcggttgccaacaagatcaagcttgacctcaggggcgagccaatttacccaagtgaactgtctgaagtaaccaacgctgacagtttgctgagcatgattggggggcagaagaccttgatcatgatcctgctggctttggctgccgttattgccttgatggtcttctgcgaagtcaagttcaaggtcaagaagcgcggcaactggaagcggcgggggatgtgggccctggccagcctggccctcttcatgacgccgaagtggtttaaccaccaaggctcagctatttaccgcttgaaccgggcctttgacaacaagcagtccttccggaacccggaaagagatatccagattaacgggccaattttgaacttcctcaactacatcgacttgcagatcatggacaagccaagcaactactccaagagccagattcagaagctctatgagaagtaccaacaggtggctgaccagatcaacaagacccggactaacgatttgtccaagcagaccgtgatctttaacttgagtgaaagtttcatcgatccatataccttcccgacgatcaagttcgccaaggggaccaaggatccgatttcttacatccactcactgaagaagacgaccacttacggcagcatgcttagtgccggctacggtggtggtacggccaacatggaatgggaatcactgactggctttaacatgggctccttcaacacaactttgactccttacgtccaagtcgtgccgcagtaccagtactacccaaccattggggccaacttcaactactcttcagcagttcacccattcatcgggacttactactcaagaattgaagactacaagcgcttcaagttcaacaagtttgtttaccttggttccaagtacaagatcgtggaccaaaagaagctggggaccagttcctacaactccgacttcacgacttacgccaacggcttgcggcagatcaattcccgcaagggcggccagttcatcaacctgatttctattcagaaccacatgccgtacaacaactggtacccgaagaactactatgccggcaagatttccggtgatctttttgacgacggcagcatcagaacgcaagtggcgacctacatcatggggacccactacactgaccaggcggtcaagaagttcatcaagcagattgacaagatcaagaagccaattaccctggtcttctacggtgaccactacccgtcaatcgtttcccagtcatacacgtctaagtacccggtccaaatgcactcgacccgctacttcatctactccaacaagtacgcccgtcagcacggggctaaggctaaactgacttccaagaccaactacgtcaacaccagtgacttcatcgccatgatgctggaacaaaccaacagcaaggttacggcttaccaggcacttttaactgaagtgcacaagaagctgccagccttgacgatcagctacagtgatgacaccggctttaccctggttgaccagaagggcaaggaagttgacccgaagaccttgaccagctcacaacaagccctgctcaaggactacgaaatgatccaatacgacatgacagctggttcagcctatgccttgaagatcaagggtttctacactatgaagaaataatttgatttattgcaataaaagggactaaggaggattagtccctttttttgtcttttgaaataaaaaaagggggcaatgatggctcataagcagcgcgtcgcctatctcgattacctccgccttgtggcaatcttgggggtaatcactatccatgtggccacgtctctcaacttctaccggcaggattacgcgagcttaaactggcagatcctcaacttctgggacggcttgagccgcttttgcgtgccggtttttatcatgatttccggggctatttttctgaatccggattttgacttgagctgggaaaagctttttaaaaaatacctgcgccggatcgtagtcagctacttaatctggcagctgatttattgtggctggtactatttcgccaaggagggcgacctggtgaccgtggctaagttcctgatcggcagctatgaccacctgtggtatctgccgatgattgccggcctttacctggtgacgccgcttttgcggccgctggccagaagacggcagttgctcgaatactacctcttgctggccctgctctttgcctggcttttgccgaccggcctggacttaatccgcctttggccaaagccgcccaagcatatggctgacgcgcttgccgcttttaagcgcctgctgggcaagctggacctgcaaacggtaatgggctttgggggctactacatggctggctactactttagccaggcccacatgagcaagcgcaacctgtattttgtccaggccctgggcctgctgggggctggagcgacaatcggcttgtctggctggctgacggcgaaggccggccatttgcgcctgaccttgtacagctataattccttttttgtcctgctggagagcagcgcggtttttctcagcctgcagatgctcaagccccggctttggtcagaagaagttttaggggaattggccgggtctgtcatgggcatttacctgctgcacccgttattgatttactactggagtaagacgccggtctggcagctggcggcaagtaattctgcctggctgcctggcttggtaattttgatttttgccagcagtctggctatcgtctggctcttgcgcaggagcagatttttggcccgctggcttttataggcttgacccgaaggcgaattcatgttatttttataaaaacgcgacaatgaagtagctgcttggttcagcgttcagagaactagcggttggtgcgagctagacaggccaggcagacgaaatacagcgcggggaaggagaaccccgttaagaagctcccaagaggcactttgtgcgaacgtgggtggtaccacggctaagacagaatttagtcgtccctggatcttttgatctggggacttttttatttggaggcagaaatggctaattttgacattttggaagatttgaaatggcgcggcgccatcaaccaggaaactgacgaggaaggcttgcgggattacctggccaagcatgacgacctggccctttactgcgggactgacccgacgggtgactccctgcacatcggtcacttgattcccttcatgatcttgaagagattccagctggccggctacaagccagtcatcgttatcggcgggggcacggggtcaatcggtgacccatccggccggtcaactgaacgggtcctgcagtctgaagaaacgatcaagcacaatgaagaagctttgacggcgcagatggtgaagctctttggcacggaaaacttccgcatcgtcaacaaccgtgactggctgggcaagatgaccctgctggaattcctccgcgactacggcaagctattccaggtcaacaacatgctgaacaaggaagtcgtggccagccggctggaaaacgggatctccttcactgaattctcctaccaaatcctgcaagccatcgacttctacatcctgaaccgggactacggcgtccagatgcagatcggcggggctgaccaatggggcaacatcacggccgggatcgacttgatccaccgcctggaaggggcagaccggccagcctttggtttgaccatcccattgatgctgaaggccgacgggaccaagttcggcaagtccgccggcggtgctgtctggctggacccggaaaagaccagtccttacgaattctaccaattctggatcaaccaggacgaccgggacgtgatcaagtacctcaagtacttcaccttcctcaaccacgaagaaatcgacgccttggaagaaaaggtcaagactgaaccttggaagcgggaagcccaaaagcgcctggctgaagaagtaaccaagttcgttcacggcgaagaaggcttgaaggaagcccaaacggtcactgaggccctcttctccggcaacgtgaaggacttgaccaccaagcaggtagaaatcgccctggccaaggcgccaagcgctgagagcggggcagaaaagaagaacctggttgacttcctggttgacaccaagattgaatcatccaagcggcaggcacgagaagacgttaacaacggcgccatctatgtcaacggcgaccggatccaggacaccgactttgaagttgacccggcggctgcttttgacggcaagttcgtcatcatccgtaagggcaagaagaagtacaccctggtgcacatcaagggctaaaaaagatttttagaaagtttccagttggaaactttcttttttgtttactttttatccttttgccgaaaagaagccggcgtgttacaattaaggcgctgctgtagctcaggaggtagagcaccgccgtggtaaggaggaggtcgccagttcaaatctggctagcagcttaaaaaagcaactaattgatcagtaaaagtgataaaaatatttgtgtgtctgttcccaatcctactatactaaggattattagttaatatttaaacttcccataccaaaaagaactatgaagccttgaaaacttaatagtttagccagtaaatattcaattaagctgctagtgatggcgatatagcctcttgcatgtacttcgggaggcgtgaaatgaaagcgttggtgaacctttccatctgctcttctgtcggttggaagatctctttca

SEQ ID NO: 2167 - DNA, 72983 bp, Unknown
  gut microbiota DNA sequence
ttcatgtagtttattttaccatcattttcgtcattcttattgacttttggctatttttcccgtattctaatatgatttgcaggcaagctgcagatcttgaaaggaaaagacatgaagaaaacacacagacagttaattatctggccaattttgcttttgaccactctctttttagccggctgcgccaaggatgaacaaagttccaagagccagatcaagattgtaacttcgaccaacatttacgccgacatcgcgcaaaatatcgtcggcaagtatggtaaggctaccgccttgatcgccaacggcaactctgacccccatgactatgagccgacgaccaatgcggccaagacggtggctgacgccgacatcatcgttgccaacgggatgggctatgacagctggatgggcaacctggctgcctctaatggcaagaaagccgtcaaggtcggggaagacttgatgcagctggattccagcgccaacccccacatttggtacaacctaaatatgccaaaaaagtacgtcgcctacctggtcaagaagctcagcaagcttgacaaaaagcacgccagctactaccaggcccagggcaagaagtatttgcagaagatcgccaagatcgaaaaagttgctgacggaatcaagggcagcaaggccaagccggtcttcgtcagcgagccggtttttgactacgctttagagcggaccagtttcaagatcggcaataagaactttgaagaagctactgaaaaggaaaccgacccgagcgcggccgtgatcgcccagatgaatgaagccatcaagaaaaagcagattgccttcttcgtcaacaacacccaggccagctccgacacggtcaagtccttcatcaagaaggccaagaagcagggcatcccgatcgtggaagtccgtgaaaccatgccaaacaaggtcagctatgctgactggatgctggccaactaccagaagctggctaagttcggcgactaaaagaaaaagagaataaagaaaaagcacttaacaagtgcaaattaaaacggtggttgagccttagctcagtcaccgttttttgtgcttaatcttgtaaaaattccttcaaggccgccaattgccgcttggcatccctcacgccgacttggtagaccgccttaaggcggttgggatccttttccatggcgctgacgccgatgtcctggctgggccggaagacaaagaggcggccggctgcttcctctttggcgatataagccaggcaggcattatattccaaatgccgctgccttaggcgcgccacgacagccgggtactttttcaagacccggtcaacgactggctgcaaacgcgatggctctttttgatagccagccggctgggtcaaaatgaccactgccttgtcatagtccttgtccaaaagaaaacggaccgggatggagtcgctgacgcccccgtcccagtaagcgtggcccccgattttaaccggccgggcgaaaacgggaatcgaggccgaagcccggatccaggccacgtcccgccccttgccggtggtcaatttgtggtaggccggctgggccgtttccacatccgttgccacgcaccaaaagtccatggggtttctggcaaaggctgccgtgtcaaaaggatccagtacttccggcaaagtatagtagcaaaagtccgccccgtagagatccccggttttaagccaggaccgccagctcttaaactggggccggctgccatagcggaggttatagcgtaaaaccctcccgggctgcagggacttgtagttgcagccaaaggtcactccggctgaaacgccaactgccccgtcaaacttgatcccatatttcatgaggacgtccgtcaccccggccgtgtacaggccccgcatggcgccgccctccatcactaaacctttcttcatgcatcccccttatgcctacttgccccagtgctccttgataaactgggcccggccgccggcttcttcagccgcgtagcggcctggatgctttaaatagaactgctggtggtagtcttcagcctcgtaaaaaggcgctgccggttcgatcttggtcacgatcggatcatcaaagcggccgctttccgccagttcctgcttggacttttccgctgctgccttctgctctggtgaattgtaaaaaatcaccggccggtagttgtccccccggtcctggaactggccgctggcgtcagtcgggtccgtcacctgccagtagtagccaagcaagtcctcataagacatgaggtccgggtcaaagacgatcttgaccgcctccgtgtgaccagtcgtatggctgcaaacttgttcataagtcggattaggcacgtgcccgcccgtgtagcccgccgtgacgctctcaatacctggcaaagtatcaaaaggggccaccatgcaccagaagcagccgcccgcgaaaatcgcgctgtctaattttttctccataaaatcacctcgtcaaatttaacttgtctttcattgtactccaaagaaaacagataggaaatcttctgctcagaaaatattcgcccaggaaccgctatcatggttaaaaggctttttttctccttataagcactgtaaaatagattttgctttaaaaaagcttaataattgctagattggagatggaaatggtatcgctaaacaagtccccgggcctggcttcttgttagtacactttgtttaacaggaaggattttttatggacgaattagataaaaagggaaattatatttcctggcaaactttagccatgatggcctttgtcacggtcatcgggctggaagacatcatgtacaacttccaaaaccaagggatggcggtcatcacctcctgggttttgatgatgttcctttacgtggttccttacgctttgatcgttggccacttaggttcagttttcaaccatgaaggtggcggactctcctcttgggtcagagccactgacggtgaatttttaggctacttcacggcctggacctactgggccgcttcgattccttacgtggtcgacacggccaactgcctcttggttgacgttggctgggggttgactggaactgacgagtttgaggacccgaaattcctctcaacggccatgtttacggccatcacctttgtcatttttatccttttaaccctgctggaacacaaattctccaaatcaatggaagtcttgtccaacatcgggggctgggccatgttcatcatgaccatcctcttcgtgcttctggcctttgccggcctggccaagtccggcggcaagaccgcgacgccatttacctggaagaccatcatccccaagtttgaccttaaatacttctcaaccgtggggatgctgatctatgccgtcaacgggtctgagctggtcgccccatacgtgacccggatgaaggaccccaagcgggaattccctaaggccatgatcgccctggccctcatgacctgctttttgaccatcttcggctcaattgccctgggcatctacatcgatgccaaccacatgccaaacgacttgaagatgaacggtgaatactacgtcttcggcgccatgggcaagcaattcggcgtgggcaagctctttgtctacatctacgcctgggcctccttcttctacaatgtggccctcttgtccgtccttttggacgccatgaccagaatgctgatctccgacaccggggacaagtacatgccgaagttcctcaagaagaccaacaaggacggcctgccgatcaacggctacattctgactgtctttttgagcggcttcatcatggttctgggaattttcctgccagacatgaacgacatcttcaactggcttttgaacttgaacgggatcatctctccggccgttacctgctggattttctactccttcatgaaggtccgaggcaaaaactcctccaagtacccgtcagtttaccgctacattaaaaacgacaccttcgcctggtgggtcggctttgccctcctggccgtcacagctgtcgctacggtcttaggcttcatgccgcaagacgtcaaggaaggcagctgggtttggtggtatgaactctccatcaacatcgtggcctgcctggtcttgatcggcctgggcgggatcttcccaggcattcgcagaagagaagaagaatacggcctggcctttgacaagcagcaatggacctggatgattgcccttgttttggcctcaatcgtcttcaatgtctggctgggcgggagcactatcaagctgcgggccctctacattgtcattgaatcagtcattgccctcttggctgtctggctgattggccgccgactgccaaaaggggcaaaagccagcaagtaaaggcaataacggctaaaaaacaatatacaatatttttaaaccaaaaaggcctgcacgcgcgtgcaggcctttttctctgacttattttagtaaactggccggacgtaacccgccgtttccggctgggagatgccgacgctggcccgggagtactggcttggatcagccatgatctttaagaccaggtcagccacgctggctcttgaaacagaggtgccgacgaactcgtcatagcggccagtcaaggagtacttgacatctggccagtcggtcaaggcaggcattctgatcaaggtgtagtccaggtcagcttcttccaggcggtgggcagcctctctggctggcaaaaagcggccggaacccacccattcatcaacccaggtgccgaattccccaggaatttcatagtaaaggccggccaggcttaattcgataacccggtcaaagccgttttcctggcttgccttgaccaggttcttgctaatcaccgtgaacttcttgtcatcaaccttgcccaagaagaccaggtcagcatccttggtaactgccaggatcttgtccaagtccgttgccgctccttcagtcagcttgatccggtcgccctttgccaggtcggccaaaagttccggccgctgggtcaaaagctccagctccacatcgctgaactgggggtcagccagcaagtgcttgatgaccaggcgggagatccggccggtcgggtgcaaaatgacatactttttcataaacaaatccttactattgccataaacaattaaaaattttcttacaacttacacccttaattgtactcgctttaagcgttttcgtaaattcctcgcctaaagctggtctaacaggccccggcagccccggctgatctcttggaaggccaggtcaaagtcatttgtataccagggatcatcaatgtcagcatagctaccagcaaattggagcagcttgtactgctttctttccgggtcacccccgcagatctggttcatggccatgaagttctcactgtccatggcgatcaagtagtcatacttgtcatagtcttcccgggtcaaaagccgggcccggtgctggctaaatggcaccccgtttttggccagttcccgctgggcccgggggtccattggattgccaactccaccaatgatttcatcgccggtcacggccgcggaagcaacttcgacctggtcagccttgccggcttcagccaggagctgcttcatgatgaattcggccattggcgaccggcaaatgttgccatggcataaaaacaaaattttttgcatttttgtcacctttccctaaagtgtaagaaatattatagcatgcagcttttttaaagaaaaaagagacgccttggcgtctccttcttaatcttgcttagcagccgcgtagagctcggatttccgctcatttaaagcttggtccagctgcgcgttgatggtcataatcagtaaaaatggcaagagcaccatgaccgggtaagtaaacaggcgccagacatggtagtggccaaaaagcaccgtcagctgcatctcttcctgcatctgcaagacggcaaataaaatcgaggccactgagtagtaacccaggctgcgcttgaacgcgctggtcaaaggcgcgaagatggaaaaaagcagcagggtcaagcccatgacgacagaaacgatgcccagccctacccggagggcattctttctgacatagttggccagaaagcaggctgcaggcggtaagcttgccagccggctggtaaaagcccttcaaagctgtcctggttccggccccagaagctgacgatgcctaaagcaagcataattaaggccatgatcagcgaataaaacatggtacggttatttttttcatcactaaacctcttcctctttgctccagcatcaacggtagcgcttgtgcgatttgtaaaagtcgtttttctgccgccgcatcttccggtcggctctcttaactgcttcccgcaaataatgggagtccgggcaccattcagccccaattgagatcgatgggctggccggctgggttaaagctttctcaaaagcagcacaatgactttcgaattccgtctggctgctctggtcatccaaaaccacgaactcatccccgccgacccggtagacatagtcgcggccaaaagcctggctgatcaagtttccggccgcaatcagcattttatccccggcatcatgacccagttcatcattggcctttttcaagccgttcaagtccatgaaggccacgcccaccgttcttgaagtctgggacttctggtagaagttcagcttggccaggtaagggtggcggtcattcagcttggtcaagacatcagtgtctctttgctcttccaaatttttgccggctaccttggctccaacgaagtcggccgtcagttcaatcaagtcattgaagtccaggttcaaggccgggttgaggttttcaacagctaccaggcctctcaattctcctctttcgtagaatggtgccagcaagctgttgtttaactggtagttatccccatagcaggccacgagttgcggaaaagatgccgcgattgcttgaggatcggtcaaaaacaaactgtcctcattaaacaaatccagcttgcttaagctaactgttgcctttgcaagactgattgcctgctgcttggctgagaattcagcgactcctggccgctgccagctatgagtgcttctggccacatctccatggatttccattagggtgacccggtctgcttccaggtcctggcccagcttggccagagtctggttgatggccgtctcaaagtcggtattcttaacgttcaagatttctgaaagctggacgatttcattagttgtcgcctgcttgcgctggatttcccgctcgccccgcttctgttcatcaatattgatcaaggctaaagaataggtgtcgggcactgaagcgctggccgtgatgtattcataccagtggccggccttagaatggaaaattcccttctggattccgcggtctttagagccatataactccttaatccagaaagccagcttgtgcttgacaaaattcgacattctgttgcccagcagcttctcccggctctgttccatgatttcggcataagcctggttgacatagatgtactgcatgtcgaccacccgcttttcctggtaaaccggagccgcgatgataaatggcaggggcatatcccggtactggtcagcactcaagctgaaattggctgttacccccaggtcatcccgcgcctggtcctgataaacttggttggcattgtaggaagtcaaaacgtcaatcaaggcataggcatccgtatgcggattgtaggacaggatccgctgatagccctcaacgtaaaggttgttgggatagctgtgaacattgtaatgccactcagtcttgtgattcttccagtattcttcagcaatccagcccttgaggtccttgaaaaactgcgggccgacggatttgagctcagtggcgaagggatgctcttccatctcttctttggtgaccgacccgcaactgagcaggtagcgggtatagccctcgtttccccgcaagtagtaaagcttgccgtccctgtattccaaaaagcccagcggggtccccttgaagtagcggtccaaaaccgggtctggatcgtcaaaggtcaagtcgttgttgtaagtttcctggatgaagtggggccgctccaggctcatcatccccacgctattgtagtagtctgactcgctgaagcgctccaggttggcttccggaccctcgacccacttcttccaggcttggtcaaaaggcaggggctggccgaagtagtagccttgagccgccgcgcagccaatttcccttagggccagaagctggtcggtattttctaccccttcaacgattgtgtcgattcccaattcttccgccagttccaccatcttcttcaagacaatccttgaccgcttttggtcagggtccttgataaagctggcatcaaacttaatgcaggaaaccggggcattgtccttgatcaaaccaattgaggaatatctttcgccaaaattgtccacccagacggagaagccgttttgcttaaagagggcgatctgttcccgaatcttgtcggcattgagattgcggttgtcgttgctgatttcaattacgatgaattccggcgacaatccgctcttttttaccttcctggtaatctcttcagccatattgcactggtcaaattctgagctgaaaaggttgagggagacagcaagctcaagatggcccctctcctgcattttcttaagatcggcaatcaccttgtcagccatgtacaagtccagccggtaaaggatcccggcccggtccaaagtcgggattaactgctcatccagcagcatcccgttatctggcttgcgccagcgggccagggcctcccagttcccgctctgcccgttcaaaatgcggacaattggctggtagaagggctcgatccagtcctctcttaaagcctggtcaaaattagataaaatgtagttttctagttccagactctgccggttctggctggtgaagtaagtgatgtgtgccttaacgtccttgcggttgttattgcaggccaccatggcgtattcgcagaccttcttgatgtcttcataaaccaggctgccggcgtcataaaccccgatacggatggccaggttgcggccttcattgatctgccggctctctttgagaatatctttcagccgctcttctaaatggtcatgggccgtataagcataaaagttgtctttcgtgaagtggccgcaggcatcgccgctaaaatgccgcttgagcaggtcagcgaaggccaccaggagacggttgccttcaatataggaatagcggtggttgaagtgactgaagccgatcaagttgaaggccagcacgactggctgcttgcccgctttaaaaagcttccggcagccaagctcggccagttcgtaaaagtagactgctttaggcaggccggtcagatcgtcaagcagatgcttggtccgtcggtcagccatggtcaggtcctgcaggcggctggtcgacatttccgtataccagaccaggaagcagtctgtatcttctaagaacttcccctgggcctgcaacaaaacatagtcttcctggccgggcagcttgatccggtagatgctctggtagcccctggtgtcccggttcatgaaagaggtcaggtcggcctgtacgcctggttggtcgtcaggatgcagacccgcaaacaggtcctggtccagcagctgtttaagctcagccgccggcaagccatagagctcacacaggcccttagacacggctatggctttaatctgcttattttttgattgataaagtgctattggtacttcgctctgcgcgattttagccagctcagccttcttcgctctttttttcataaaaccactcctaataaacacggtttgcctgcaaactggcaaaaatctttaagcataaattaatttgtatttaaagatgcagaggtaggttggtgttaacacattctttatattatataaaagttgttataacagagcaagctgggactgctttcctataagaaagtgcggggcttttcccagcatgaaaaaagccaagactagccgccttgactcttaacatagttttttaattattattcgcttctttattcttattagcctttcccttcgcccgataacggcaaacatccagataaaaaaggtagccggccagggccagggccagaagaaagccggcccagctgccccaagaataggtgaatagcatcttggagtaaacttccttttggaccatttccgtcaaggtatgggtaataaagacctggaagccaaaggcactggccgctcccagcacaaaaggcagccaggaccagtaacggttgaagaggagcagggccacgcccagcaagtaaaggacgcagatgatccacaaggagagctggtagatttgcgtaatctgctgcaattccccttcatgcaccttcagttcactgttgatcaaatagaggatcaagtcatccataaaaagctggaccttgttcttggctggcagctttaaatcgctggactgcaggcgcttgttttgccggtagcgggaaaccagccggtagaggctgagatgggactcgctaatctccaccttgtctggcaattggtcaaccaggtcctgcttcaggcccgattctaccgcggctttggccgcgatcgacatggcgctgccatcgctttggttggcaaaagtgtcgatcaaactggacgcatagtccttgacctcatacattttaaaggtgacagggctgctcaaaagagcgaccagggaaattatggctgccaggctgcacaggctcttgcgcagaatcagttggctttttttcatagcagacttccaagataatatccacaagttaaaaggaccgccccgcccaaatagctggccagcaaatagcgcttgaggacgtgcttttgcccgttttcagccaaagagaccatttccgtgttcaaagtggaaaaagtcgtgtagccgcccaagacgccggtgcccaagaaggcatagacgctagccggcagccgcaaggcaaaggccaggcccaggaaaaagacccctgtcagattgatcaaaagagtcggccgaggacaggccgtcccctgcatccagtgcttcttgccataactggtcaaagcatagcgggctacagcccccaggctggcgccgaatccaaccgcaaaaatcatcttgttaccccctttccaaaagtttgcccgcggcgaagttggccgcctgcttgcctgcccaggcaaagaggaagccagccgcgatcgtgccggtaaagtaaagcaaagctccgaaattttgcccgccaagcagcagcttgaaggcatccaggttgaagctggagaaagtcgtaaaggctcccacgaagcccgtccccaggcctgtggtcagccaggcccggctattggacgttctcaggaaaaagtaggtcaggaaggccaggagaaagcagcccaaaaggttggcaatcaccgtcccgtaaaaggaaaatgcttccgttaagccatagcgggccaggccgccccaaaaggcgaaaaaagccacgctgagataattttttactgtatccattatttgcctctttttgtctcttccgagatcgttaattaacgcactaattataagattacatcagaaagcgcttcaaaagcaaacagaaaaatagaagcaccagcatggtacttctatttaaagccttattccattatttcataattgctctatcagcttttgcccgccccggcgatcttagtccagttcaacattaatgatgacagcaagactgagacggagctgaaagccatggccaaagccgccagttccgggctgaggctgactccgataaaggagaagaggccagccgcgaccggaatcccgatcaaattgtagatcaaggcccagaaaaggttcagcttgatccgcgtgaaggtctgcttggacaagtcaagcgcccgcaaaaccccggtcaagctgctggtcatcaagacgatgccgccggcttccttggccacgtcggtcccgctgcccatggcaatgccaacatcagctagtgacaaggccggtgcgtcgttgatgccgtcaccgacaaaggccacgggccctgattcttgcaatttggccaagcggtcagctttttccccgggcaaaagtcccgcttcgacctggtcaatgcccagctggcggccgattttttccgccagctgctggttgtcgccagttaacatgaccgtcttgattccgcgatttttaagctcactgaggacggcctttgcttctgggcggggagcatcctgcagggccaagaggccaatgacggaagaatctttttggacataaaccaccgtcttgccggcttccgccaagccttctgcctgctggcgccaagcgtctggggcgctgacgtagtcagcccggcccaccttaactaagtgaccagctaccttgccttctacccccttgccttcttcagccgaaaaatcgctgactggcaagagaggctggccgccttttttagcgctggtcacgatggcctgggccaaagggtgttctgaattggcttccagactggccgccaggctaaggcttgctttatcccccacctgatccaccagctggggctggccgaccgttaacgtcccggtcttgtcaaaaacaatagtcttgattttcgcggctgcttccaggatttccccgtccttgatcaaaacccccatccgggcgctgcggccgctggccaccatcaaggctgtcggggtagctaaacctaaggcacacgggcaggcgatcacgatgacggaaactgcgtagagcatcgctttaaccgggcccacgggactgaagacatcccaaatagcaaaggccaggatgctgacgatcaataccgccggcacgaagtagttagccaccttgtcagtcagtttttggatcggggcccgggagttctgggcctgcttgaccacttggacgatctgggccagcatggtctcttccccgacctgctcagccgccatcaaaaagctgccgcggccgttgatggttgccccgatcaccttgtcaccgggctttttcgcgactggcatgctctccccagtcaccatggcttcattgacgctgctttgcccggatacaagccggccgtcaactggcaccttgccgcccggccgcactttgattatgtcgccggccttgacctggtccaagggaagcttaacaaagtcttctccccgcttgacctcagcttcactggcctgaagttccagtaacttattcaaagaagctgctgcccggtcatgcattttttcttccagggcatcccccagcaagacaaaaatcaagataaaagccgcgctttcaaagtagaccggccggccagtgaagtaggcaaagagactgtagatataagtaacgctggtgccgatggcgattaggctgttcatgttggcctggtggcgtttcaaagctgcccaggcgctttgaatatagggtcctgccccaattagcataatcaagctggtggcaatcagcgaataggtcttgatccctggcagcatgattccccagatcatcaacagcatctgggccagcatgggcagggccaaaaacagggacagccaaaagcggcgccaattagtcaatttcattatctaaccacaatcttcccatgaaacatgtccatgccgcaggcatagtcgatctccccggccttgtcggtcgggatctggaccttggccagcttttccttgcttaggtccttgtcaacgcctaaagaagaaaagaccacatggctgaggcaggccgtcttgtcttccatcttaaaagttacttctgccggcactccctgctttaagtagagcacttccggctcatagccgcccttgacgactacctgcccttcctggcggccattggccagatccgcctgctggctgctcttttggaaattgccgaaaaaccaccagatgatcaagccgatcaaagcggccgcggccaaaattactaatccattaactaacattcccgttcaccttccatatgctcacaagtacttaaacaattgcaaccaactttttccggagccgtcttcgccttttcggccgcctttttggcaatcgcttcaaggtcgcttctgcttaaaggcaggtcatccagcagtcggaggagcatctcccccttgtgcatatcgcacattgcggcaaactcggccgtcaagctctcctgcatcgcttcgctttcatctttagccgcccggtatacgaagcggtgaccttgccggtcaaccagtaaaaagtccttcttttccaagcgccgcagcagggtcttgaccgttgacgggctccaggcacattttgccgctaattgctcaataatctcgctgctattggcctggcccagggtccagacgacccgcataacctgccattccgcgtctgaaatccggcaatcttcgttcatttccttcctcctctcctcgtttacatctgtaacctttacaaagactattttacagcatagtttacgtttgtcaacaatctactcttgtttttcttcccggtagccgccgccaaaaaaagtcttggccgcctgacggcgggccagcatccaggcctcgttgccccgcttggggtaaacggagctggccaaaatgaccagggcgcgcccattttcaaggtccaggcctaatcccggacccgtaaagccgctatgccagagaaagcggcagcccttttgccagcggatccaggccagggtccgctcaaagcagtcatagtcaaacaggccagccacaagcggactagctgtcgttaggtaaaaggagctgaagcgggccaggtcatctagagtggaaaagagaccggcatggccggccaatccgcccatttgccaggcggtttcgtcatggacattcccccagacctgccctctctccttagttatttctgttttgacaaagttgccccttttgcccttaagcaagaaaccagtctcccgcatccccaaaggggcaaaaatctcctcccgcaaaaagctgctcaagtcctgcccgctgacctgctctaaaattttgcccaagataatgaagttgaggtcggaatatattgactcctggccaggtaaaaaaaggggcttagtggctaaaaccgcctcccagacttcccccgggctttggtattgccagacatcatccaagtccgccggcaggccgctggtgtgcaggagcaggtcctttactgtaacagctgaacaagccgccgggaaaaagtttcccacccggtccttcaagctgattttccctgcagccatttccttaaaaatcccactggccgtccccaccaccttggtcaaggaggccaggtcatagaattgccccagctcagcctggcccaggtagtgccggctgaccccaccctggtcaaccaaagcataagagacgccatttacggtcttttgccggattgcctcctcaaaaattccggtgattttttcttcaatttctgccgtagtcatttttcctcctgaaaaagaaaaaaggcagatccgcagatctgtcctcttcgcttatagaactgatttccgcagggccttggcgatcccgtcgcgctcgttggtgtcggtgacgtagtcagccaggtccttgatctcgtcgatggcattacccatggccacccgcttgaagtcagggatttcaaacatggaccggtcattgccctggtcaccgaagatcatgacttcactgttcgacaggcccagtcttgaggccagttcgctaaccgcgtagccctttgaagcggccagtgacccgacttcaacgacttccggccagctgcggacaaccgcgtaggactggaagaaccagtccggcagccggttccagaggcggtcgacctggtccgggtcatcgcactggtagactgccttggcaaaggtaaagtccttcttgaagtcgcttctgtcttgaatccagagctggttcttggtttccgccccgtcaatctgcaggcggatggaaatcttcttgtccaaagtgtaaaaacggtccggggtttcaaagtccaggttgacgtcgctgagccgctgcatgtgcaggagggtgttgaaatcgccaaagtccatatcatgactgatcaggacccggccgtctaagttctgcactaccgccccgttgaagaggatcgcgtactcttcactgccgcttaagcctaattcttccgcgtagcccttgatgcccgacaagggccggccagaagtcagcacaatcttgatcccggctgctttcgcttcctgcagggccttgtaggtcccgggcagaatcgtcttgctgtcagttagcagggtaccatctaagtcgatggccagcattttaatcgccatattttcctcctatgtagtccaaagcctgttcttacttaattattgcaaaattttttccgcaaaaaaaggaaaaaatcagccaaaagaaaaggaaagctcaatttgaactttccttcttctcagctttacagctttttaacttgcttttttattcgcccatttccgtcgtaacgaccttgacgatccggtcaacgtattcctgggtgatttcctgggtcgggccttcagccataacccggagcagctcctgggtacctgaaggacggaccaggacccggccgtcgccagccatgtccttttcaacggagtcaatcgcttcaactactgcctggtggttcttccagctgttcttgtccttaactggaacgttgaccaaaacttgcgggtattccttgaagtcagccaaaagttcagttaaagacttgccagtcttcttcatgaccagcatcaggtggatcccggtcagcataccgtcaccagtgttgtggtagtcgctgatgatcacgtggccggattgttccccgcccagactgtagccgttggcccgcatttcttcagatacgtagcggtcaccgacttgggtgcggacattcttgataccccggcgctcaagagccttggtgaagcccagattgctcatgacggtcgtcacgatcgtgtccttcttcaagcggccatggtcagccaggtaagagccaatcacgtacatgatgtggtcgccgtcgacttcattgccgttttcgtcaaccgcgatgcagcggtcggcatccccgtcaaaggccaggcccagttgggcaccttgcttgacaacttcttcttgcaggcgggcagtgtgggtagccccgcagtggtcgttgatgttgagcccgtttgggtgggttgaaatagtggtaaagtcaacatccaggtcggcaaacaaacgggagatgaaggcgctggctgccccgttagccccgtcgattacgactttgatcccgctcaagtcttccggaatagtgttttccaagaattggatgtacttgttgctgccatcgcggaagtcggttaccgtgcccatgccctctgctgatggccgcggcagcatgtcctgcttagtgtcgatcagttcttcgatttcttcttccttggcgtcagacagcttcaagccatcgctgccgaagaacttgatcccgttgtcttcaaccgggttgtgggaagcagaaatctgcacgccggcatctgccccttgggcctggaccaggtaggacaggccaggtgtggtcatgaccccgcattccaaaacttcaatgccgactgacaaaaggcctgaaatcaaggcgtgttccagcatttcaccagaaatccgggtgtctcttgaaaccagaacccgggcctggccgccgtcttccttttccttggtcagcacgtagccgcccatccggcccagtttaaaggccatttccggggtcaaaaccttgttcgcttcaccgcggacaccgtcagtaccaaaatatttaagcatgttgcaaagaacctttcttttttctagttgttcgaatcgctgacttcgatctggacgtccacgctgcctggtgaaatccaggcaaccccgcttggaactggcaggcggaaggacttggtgaccgaagacttgatatcagtcagatcaacatccaaagtcagggaactgatctttttcagggcttccttttgcccatagagggtaactttttcctctttggcagtcaaggagtaaactttcttgcttgagccatggctggcattcaacttcagtttaaccgtcttcttagagaccgacaaaggcagggttacccgggccgttgccggactgatcaccacgttgagctggtggcccttggcatcgtatgcggctagaagaacgttccgccgcactgtctcggtgctgccgtttggcacgactagctgggcctgcacgtggtcgatcgcttttacttcgctctgggccccggtgacttcaaccgtctccgggctgactgtcggcgtgccgatgtcatagccttgagcaacagcattcttattataacctatttgaaccggcaaggtgcgggactttcgcttttggatgttgactttcacgcttttctgcgaaagtttgcaggaaacctggctgggcaagccgctaaccttaattagcacctggtggcttccaacacccagcttgctcaagtcaatgtagacccggaagttctgggtgttaacggcggaagtaaccagggcattcggtccttctagagtcaccttgaccttggatgggtagccggtgacatagtacttgtcagtgtccactgacacttgcaaggccatcttcaagctctgctcagtgcttgccgtttcttgcaccttggtttggttgtttgtattaacctgggtgttgtcaacgaaggcaactaagacgatggctaagagcagggaaaaaagcttgtagaaccatttttgctcaatcaatttgtgcattatttatccccccagttccagatgccccgggccaggcggattggccatggctgcttcttcttttcttcagtgaccagttcagcccgcaagtacttgaggtattcctgctggctgaggtcaaccatgaactggccgtttctggtgatagtcaccccgcccgtttcttcagaaacgaccacggtgatggcgtcggttacttcagagatcccgacggctgcccggtgtctggtccccaggctcttgggaatcatggcattgtcagacaggggcaggtaggcggaagccacctggacccggttgttcttgatgatgaccgccccgtcgtgcaaaggagtgttggggatgaagatattgatcagcaattccccggtaaccagggcatcgagcttgatcccggtttccacgtattcttccagaccggtcttttgttccaaagtaatcaaggccccgatccggcgcttggacatgtattggatcgccttgtccagctccttgaccagcttttcctgctgctcgcgcttgctgttttctgaatcagaaaacagggagacccggcccaggcgctccagcccccggcggatttccggctggaagatgacgataatcccgatgactgaccaggaaacaatctggtccaaaataaaagtaacggtcgtcagctgggcccagccggccaagacccgggccaccatgatcaaaatgatcccgttggccagctggacagccttggtccccttgatcaaatgggtcaggtggtagatgaaataccaggtgatcaagacgtccaggaccaccgacaaggtatgccaggtccacagacttgcaaaatcaaactgcatgaaattttccctttctaaaattttctgtcagctagttacgggcatacatcttgaactccaggaagaggtcattgtattcctgcaccttgctgcttggcagatcccgataaacttccaaattcttgaccgtcgacattggcgggtaaaactgcttgtcttcccggacggacttaggcaggagcttttgcgccgcggtattcggggtcgagtagccgatgtattcggcgttttgggccgcgttcttgggctctagcatgaagttgatgaacttataagcggcttccttgttcttgcaagtcttcgggataacgatattgtcaaaccacaagttggacccttgagccggcaccacgtaatggatgtgggagtcctggtccatcatcgtcgcggcttccccggaataggtaaccccgatccaggcctcattttgcaccatgtacatcttcagctcgtcagccacgattgccttgacgttcttgccgatcttgtctagcttggccttggcgaccttaaggtgggcagagttggtgtcgttcatggagtagcccatggaaaccagggacatgcccatgatatcgcgggctgagtcaaccagcaggatctgcccttggtactttttcttccagaggtcattccagctcttgatctcgccctttttgacatagcgatcattgtagacaatccccagggttccccagaagtaaggcactgagtactcgtttttctcatcaaaggacttgtgcaaaaattccttgccgatgtacttgaaattactcaagcggctggtatcgatcttgtccaaaagattgtcccggcgcagcttggtgatcatgtaatccgacggcacggctaaatcataggctgtcccgccctgcttgatcttagtatacatggcttcgtttgagtcaaaagtctcatagatgacatggtagcccgtctgcttttcaaacttggtaatcaaatccgggtcgatatagtccccccagttgtaaatgatcaagtctttcttacttgaggcagagccgccgctggagctgtccagctgctgggcgcccaggtaaaggcccaagctgaccaaaaggatggccagggccgcggaaaggatttttttcatcgcagaagccctcccagcttattagccttcttgccctgccgcttggtcaagaagtagtagaccccgaccaaaaggaggacaaagaagaagatgattgtgcttaaagcattcacttccaggtcgatcccctgccgggcccgggaatagatctcaacggacaaggtggtaaagccgttcccggtcacgaagaaggtaaccgcgaagtcgtccaaagagtaagtcagggccatgaagaagcctgacaggatccccggcgtaagggccggcaggaggacctggctaaagacctggtagttgttagcccccaggtcccgggccgcgtcgatcagggagttgtccatttccttcagcttaggcaggaccatcaagaccactatcggcactgaaaaggcgatgtggctgagcaagacggaggcaaagcccaggctgaagcccagggcggtaaaaagaatcaagaagctggccccgataataacgtcgggcgacacgatcaagatattgttaaaagagagcaggatcttgcggtaggcctccttactgcgctggatggcaatggccccaaaagtccccaggacggttgccgccaggctggacaaaagagccagcatgatcgtctccagcaagatagccaaaaggcgcttgtcagcaaacaaggtctggtagtgctcccaggtaaaatggcggaagtggtccatgctggagccgctggagaaagaaaagtagatcaggtagaaaatcggcaggtagaggatcagcagcaccaggccaaagtataccctgccccaaatggtctttttcataattcaatttccttcttgtgctgcttgcgtgaagtcagcagcattacaatcaacatcaaagcgatcaggataaccccgatcgttgcccccatattccagttcatcgtcgtcaagaaatactcttcaaccgccgtccccaaggtgatcacccggttgcccccgatcaagcgggtcaacatgaagagagacagagacgggatgaagatagcctggatgcccgattcaacgcctggccaggacaagggacagatcacgtagcggaaggtctgccagaagctggcccccaggtctgagctggcacttaaaagagccgggtcaatttccttcagcgagttgtagatgggcatgaccatgaagggaatttcgatataagtcgccacgaaaataaaggcgaagtcggtaaacatgatcccaactgggccgataccgaagaggcccaggaactggttgaccatcccgctccgggaaaaaatcccgatgaaggcgtaagccttaagcaaaaggttgatccaagtcggcaaaatgatcagcatcagccagaactgctggtttttcagcctggtcaaaaccagggctgccggataagagaccagcaggcagaaaaaggtgatcaagagggcataccaaaaggaattggccatcatccgcaaaaaggtgccgccagagaaaaaggcggcgaagttttgcagggtcagatgactgtgggcatcagtcagtgaatagcccagaatcaagaccaggggggcgatgacgaagaggccgatccacagcaggtaaggcaaaagaaataaaagccggttctttttcatggctagtcctcaccttcataagtttccaggcgggcgtcgaattcttcttcggtttcgcccagccgcatgacgtggatgtcttccgggtcaaagaagatgccgacttcctggccgatctggaccccgttggtggaatgaatcagccattcaaagccgtcctggccgatggccttgatttcaaagtggtcgcccaggaaaagctggctctgcaccgttaccaggagcttgccagcagctggagccgtaatatccaaatcttctggccgcaaaacgacttcgactttttcccccggggtgatcccggcgtcggcacattcaaagtccttgccggcaaattccacggcaaagtcccggatcatccggccggataaaatgttggagtccccgataaagcgggcaacgaagtcgttgatcggctcatcgtaaatgtctaccggtgacccgctctgctggatctccccgtcgtttaagacgaaaatttcgtcactcatggccagggcttcttcctgatcgtgggtgacaaaaataaaggtgatgcccagcttcttctggatggcccggagttcaaactgcatttcttttcgcaggcgcttgtccaaagctgacaggcattcatccaaaagcagcaccttaggttcattgatgatcgcccgggcgatcgccacccgctgctgctggcccccggagagttcggaaatttcccggttggcgtagccgtccaggcggacggtgtggagggcatccttgaccttttcccggatttcgctttccggccgccggcgcagcttcaaggcaaaagcaacattttcatagacattcaagtgcggaaaaagagcgtaattctgaaaaaccgtattgatatgccgttttgaggcgtcaagattggtgatgtcctgaccgtcaaaataaaccttgccagctgacgcttccgtaaagccggcaatgatccgcaaaatcgttgttttacccgagcctgatggccccagcaaagagtagaacttgccggactcaagctcaaggttgatgtccttcaaggctacaaagccatcatcatactgcttggtgatgtgatctaacttaataatttccatttgccgttcccatttttctttttctcttaatcctaagccattattcttcgccaattatgcggacttccgtctgcaaagcaataccatccttttccttgatcgtcttttggatatagtggatcaaattaaggtagtcggttgccgtggccccgcccttgttgacaataaagcctgcgtgcttggttgacacctgggccccgccgatctgcttgccctgcaggccggccttgatgagcatcgggccgacaaagtggccggtcggccgcttgaagactgaaccgcaggacgggtattccaggggctgcttgtagcttctgagcgcgttcaagtagttcatctggtccaaaatagttgccttatcaccggcctttaaggcaaaagttgccgcgatgacgatctcgtcattttcctgaaaaagggaatgccggtaggaaaaatgcagctcagcgttcgtgtaggtcttgacctcaccgtctctggtgatgaccgtggcgctttccaggcagtctttagtttcaccgccgtaagccccggcattcatgaagaccgccccgccgactgagccggggatgcccgcggcaaattccaggccagacaggccggcttccccagccgcgaaggaagtatcgatgattctggccccggcttgggcgtggaccttgtcagcttcaaccttgatctctttcatttccgttaaaatgatcaccaggcccttgatccccttgtcgcggataatcaagttggacgcgttgccgatcaccgtaattggcagctggtcctccttggccgcggccaagagttctttcaattctgccaaagtcttggggaaagccaggtattctgccggtcccccggtttgggtaaaagtatagcggctcaaaggaatgttttcttgcaaatcaagtccttgcgcttttaagtcatacagcttcaattaaaattgcctcctctaaatcttccttttgatattttaccgcattcacgctgtgttatactagcttggatcaagtttgcttggcttaatttgacttacgcgcaatacggaggcttttgcttatgatgaatttcgtcgccatggactttgaaactgccaaccagcacccggccagcgcctgctctttggccttggttttagtgcgggagagcaagattatcgaccgcttttacacggtcatcaacccccagatggcttttgacgcccagcaggtcaaggtccacgacattacggctgaagacgtggcgggagccccgaccatggccgaggtctggcccaagatccagcccctttttcagccggggatgctggtggcggcccacaatgcccgctttgactgcaatgtaatgaagcagtccctggcccgctacgggattgccgagccccactacctggttttagacagcctcaaggtcagccgagaattggagccgggcctggataactaccagctcaacactgtctctgaccttttgggcgtggagctttggcaccaccacaatgccttaagcgacagcgaagcctgcgccggtatcctcttaaaagaagaggagaagcggggcagcgagcttttgaaaaagtttgtctaccaagtctaggcaaaaaatggatcagcagcaagctgatccatttttcttttgtttttacttttacttctgcttttgtttttttgctttactgcttttcctggtagaggcggcaggcgttttctgcccaggcagctgctctttgcccatgcgggacgagctcaagcaagcgcttggttgaatcccaggaatcgtccacccgggtcaaaaccagctctaaaaagtcactgggcaggtcatcctggatcacctggggccattcgatgatgaccacgccttcttcagccaggtagtcatttaagtcgattgaagccaggtcatcgccttccagccggtaaaagtccatgtggaaaaggggcagcttcccttcccggtattcccggaccagggtaaaggtcgggctcttgactggccgcttaatccccagagcccggccgaagccctgggtcagcgtggtcttgccggcccccaggtccccttttaagagcaaaaggtcatggggctgggcgctttgagccaaggcggcgccaaaggcctgcatgtcagaagcggaattgattgctaattctgtcatcgctttctttctacccttccataacggcttgagccgccgtcaaaatcccgatcttgtagacgtcatcagcgctgcagccccgggagaggtcgttgaccggcttggcaatcccctgcaaaaccggcccgatggccgtaaagttgcccaggcgctgggtaatcttgtaggcaatgttgcctgactgcagttccgggaagataaagacattagcccggccgccaacggctgaaccaggtgccttaagttcagcaactgccggcacgaaggccgcgtcaaactgcaaatcgccgtcggccgggatgtccgggtacttttccttgaacagcttggccgcttctgccaccttgtctacctgcgggcccttggctgagccgtgggttgagaagctgaggaaggccaccttggggtcaatcccgatcatcttggccgtagcagctgactgggccgcgaattcaaccagctggtcgctggtcgggtcgatggaaatcgcgcagtcagcaaagacatacttttcttcccctctttccatgatgaaggaaccggaaatccggtgcatccccggcttggtcttcaaaatgaagagggctggccggaccgtgtcggccgtcgagtgagccgccccggacaccatcccgtcggcctggccggtgtaaaccagcatggtcccgtagaagttggcgtcgcgcaaggcagcttccgcttcttccatggtctggaagtgcttgcccccggccatccgttcgtggaacttttccaccatctcgccaaagtccgggctgttttggtagtccacgatttcgatcccagtcatgtccaagccggctttttccgccaaagccaggacctggtccttttgccccaggacgatcggttcaaccaggtcatcttgctttaagcggctgaccgccgtcaggatccgcgggtcctccccttccgggaaaacaatccgctgcttgtctttttgcttaatcaattgctttaattgttcaaaaacttccatcaataatctcctcaaaaaaatcatgcttccgggtcaggcggcaattgccagtcgaccggagcccggccaaattcctttaaggccgcgttgcatcttgaaaatggccgggagccaaagaagccgcggttggccgaaaaaggacttgggtgggctgacttgataatgacattcttgtcctggtcgatcaggggtatcttattttgggcaaagcggccccacaggataaagactacctgcccccgctcgctcaaggccttaatagcggcgtctgtcaccatttcccagcccttgccctggtggccgttagcctggccatatggcacggtcaaaacggcgttgagcaagagaacgccctggtcggcccagcgtttaaggtagccgtggttgaccggctgggccccaacatcgtcatagagctccttatagacattgcgcaaggatggtggcaggggcgtgcccggcatgacagaaaaactcatgccgttagcctggccaggattgtggtaggggtcctggcccaaaatgacaaccttggtgtctttaaaaggggtcagcttgaaggccgtaaagatatggtacatgtccgggtagatctgcctggtctggtattcttttttcaaaaaatcatgcagcttgtgatattcatcactttcaaaaaccggggtaagcacctggtcccaatcatttccaataaaatgtttcatctgtaattcaccttagtcaatcttaccatgattgcctcttgatttaaaggaactagtgaaataattcacgacaacttttttcaaataaagaaacactttgtagtaatcaaacttcctcctttatgttattatgaaatcgataacaacaaggaggaaataacatgattaaactgatcgcctgtgacttggacgggaccctgctgaactcttctatggaaatttctgacgccaatgttcaagccattaaacgcgcccaagaaaacggcatcgaattcatggtggccagcggccgggcaccccatgaatcccagccaatgcttaaagaatacgggatcgactgcggctttattaacttaaacgggggcctggtctttgacacggccggcaacttgatcgtcaagaatcctttgaagctggaaactgccaagaagatctgccgcctgctcaagaaggaaggcttttacttcgaactggttaccagcaaccacgtctactcagaagacttgagccagcggattaccaacgtggcccacttaatggtggaactgaacccaatgctgaccttcaaggaggctgttttggtttcagccagcaagccggccatcgtcagcatccagcaggtgccaagctatgaggacttgatggacgaacctggcacggaagtaatgaagatcttggtctttgactcccggggccagtacgccttcaccgacgtcatcaagaaaattgaagagatcgacaagctttccatcacttccagcgcggccgacaatatcgaaatcaacgccgccggcgcccaaaagggccggtccctgctggactacgcggcggccaagggcatcaagcgcgaagaaatcgcagctatcggcgacaacctgaacgatgaaagcatgatccaggctgccggcaccggcgtggccatgggcaatgccattccgcagatcaagacgattgccagcttcgtcaccaagagcaacaatgaagacggggtagcctgggctatcgacaagatccttgccgacaatcaaaaagagcaggaccaatgatttacaccctttatctgacccaggaaggccgcacgggccagattccaatcaccgatgaggagggcaagccctttggctccatccgcggccggctggacaatcccaaccacaccctttacctgctggacaccagcggtaatgagatcggccgcctgttcagcgatggcaccggcttgatcgcttcttacaccctggatgtggttcaccactccctggtccatgtcaagaaggtcaacagcccccagaccaacttgttctacattacccggctcaactactgggtcaatggcagcatcaagcagggcagctattccttccgggacggttttaagaaggtggcttccgttgacacggtagtagccgataagggggtgaccttgacctgccagatcagccgggaggaagataccccctttattctgctgatcgcggtccttttcacccagtggcacgtcaccccgctcaagctgccggacctttttccaaatctcaaccggcggcagaccagcacggccagcttctttaaacttcttttaccatatggtcgtaaacacggtcgccaatagtcattgaattagttgttttgaaacccttgcgcaagtataattgctgtgcgcgagggttttctagatctacgtttaaactgaccttcttgtagccgtgcttcttggccagttttggggccagttccattaagcggctggcaatccccttcccccagtcccgcggagagacagctaaggcatcgatataccattcccccttctgggcttccttatcggtaaagatatcggtggtcattggcaggccgaccttggccatttcttttctgagcaccacgtcaataattccctgggccttgtccgggtacatgcagatcatcccccggacccggtcgttttcgtcagtctcaacccagatccggttgtaggaataacgatagttttctgagatgaaacccagccgtatcaagtcgtagaactggctctccggcaagcggttgatggtatccatgtccatctcgtcaaaaatctggcttaaaatcgggtaaaccgcttcaaagtcgctttttcttgccttacggatcatttcgccttttttctccttttccttgttatttttctatataaattgttttcctacaattcatgttactatagtcaggagaaaaaagacaattaagcgccctttccgggcaaacaaaaagttcctaacagttaatctactcacgtacttaaccgttaggaacttcttctatcttcaattgtcgactgcattttatggtggtctcagtcctttcccgagcctaatttagttatgctctgcgaatttaagctaaactttctagtggagtatcctccttgaatattaactcttttcttttgtttacacttatataataccacctttgtaagcgctgttagccaataggctgagatttttgggaaaatagttttaaaaagcaaaaaagcgaaaagtacaaaagaagacagaaaagtatcgaatagcagacaaagaaaaaacgctcccgaaggagcgttttttgatatgacagtcaaaaattagtcttggtagtttaccaaagccaggtatgagtctggtaccaatgatgcaccaccaaccaagccaccgtcgatgtttggcttagccatcaattccttgacgttggctggctttactgaaccgccgtattggatgcggacgttttcagcagtttcttcgttgtacaagtccttaacagtttcccggatagtcttgcacatttcttcagcttggtcgcttgaagcagtcttgccagtgccgatcgcccagattggttcgtaagcgatcaccagcttggaaacttgttcactagtcaagccttccaggccagccttgatttggttgacaacccattcgttttccttgccggcttcccgggtttccagtgattcaccgcagcaaaggattggagtcaagccgttggcaaagatagccttggccttcttgttgatgtcttcgtcagtttcgtggaagtactcacggcgttctgagtggccgatgatgacgtattgcacgcccatttccttcaaaactgctggagaagtttcaccagtgaaggcaccggagttttcccagtagcagttttctgcaccgacgtgcaggtttgagccttcggcagctttcagcaaggcgtccaagtcaactgctggtgcacaaatcactgattcaacctttgatgggtctggcaattggtccttaacagcgtttacgaactcaacagtttcctttgggttcatgttcagcttccagttaccagcaataattggggtacgtgacatttgaaaaatcctcctaaactacttgtctgaaacgcaagcgatacctggcaattccttaccttcaaggtattcaagagatgcaccaccaccagttgagatgtgagtcaacttaggagcgatccccaattgcttagcagcagcagttgagtcaccaccgccgacaatagtagtagcgtctggcaagtcagccaaagcacggccaacttccaaagtacccttggcgaagtttggcatttcgaagacgcccattggcccgttccaaacaacagtcttggcaccttcaagagtcttcttgaagagttcaatagtcttaggaccgatgtccaagcccatttcgttgtctgggatgtcttggccaacaacttctgaagcagcatcgttgttgaattcagttgcggctacgtggtcgattggcagaaccagcttgtcgccagccttttccagcaattccttggcaaattcaaccttgtcgtcttcaaccagggacttgccgatattgtggccttgagccttaaggaaggtgtaagccataccaccaccgatgatgatgtggtcagcctttggaatcaagttggtgataacgccgatcttgtcagaaaccttagccccgccaagaatagttacgaatgggtgaactgggttagcaacggcgttgcccaggaacttgatttccttttcaagcaggaaaccagcagctgctggcttgccggcagccttcatggccgtagcgataccaacgtttgaagcgtggcttctgtgagcagtaccgaaggcgtcgtttacgaaaacgtcacctaatgatgcccagtattcgcccagcttagggtcgttctttgattcacgcttgccgaagtcgttgtcgatgtcttggaaacgggtgttttccaaaacaactacgtcgccgtccttcatgttgttgatggcgtcttcaacttccttgccttcgtttgaaggtacgaaagttacaggcttttcaagcaattcacccaaacgtttggcaactggagccaggctcaagctcttcttgtcttcatcgctcttgatccggccaaggtgggaaagcaagatagccttgccgccgttttcgatgatgtacttgatagttggcaaagcggccacgatacggttgtcgtcgccgataacgccgtccttaatcggcacgttgaagtcaacgcgaaccaaaaccttcttgtccttaacgtctacgtcagaaacaatcaatttagccattgaaaaaatctcctatattcatcgaaaaaaggcggaaggaagaaatttccctccgccttctttcacactactaattcaatttagaaaactttaaattaaagagtagcaaagtgcaacaaagtacgaaccatttggcaagtgaatgagtattcgttgtcgtaccaagcaacagtcttaacaagttgcttgtcgcctgcagtgataacttgggtttgagttgggtcgaagattgaaccagcagtcatgcccaatacgtcagtagaaacgatttggtctgcgttgtaagcaaatgatgggctttcgtacttcttcatagctgcgttaacttcttcagcagttaccttcttgttcaagatagtaacaagttcagtttctgaaccgtccttaactgggacacgttgtgcgtgaccatcaagcttgccgttcaattctggcaatacaaggccgatggccttagcagcaccagttgagtgaggaatgatgttttcagcagcggcacgggcgttgcggaagttgttgcctctgtcaggaccatccaaaaccttttgagttgcagtgtaagcgtggatagtagtcatagtaccaacttcgataccgaattccttgttcaaagcgttagccattggagcaagtgagttggtagtgcatgagccagctgaaacgatagtgtcgtcagcagtcaaagtgtcttggtttactgagtaaacgatagtcttcaagtcgttgccggctggagctgagatcaagacacgctttgcaccagcgtcgaggtgggcttgtgacttagccttgctagtgtagaaaccagtacattcaagaacgaagtcaacgccgtcgttcttaacccacggaatgttttgagcttgtggttcagcgtatacgcggtacttcttgccgtctacaaccagtgagtcttcagtagctgaaacttcgtggtcgaaagtgccgtgagttgagtcatacttcaacaggtgagccaacatagctggagtagtcaagtcgttgatagcaacaacttcgatgtccttggtttcttcacccaagtccatgatacgacggaatgccaaacgaccaatacggccaaagccgttaataccaatcttaactgtcatattcgaaaagtcctccttaagaactataaaaaacattttattttaagcgggatgacccgtttaaaatctgatttgcggctgcctcatcagtaatcagccaggtttgatgaggagcgttgcgcatataggccttgatggccttggcctttctcgtgccaagggcaattgccagaatatgcgggacattcgttaggttctcgaactgcaatccaacctgtctgatgcgttcgacaacgtggccttcttcatcgaagaaacatccaaaacattcggtgacggccttgttttcccgcagacgtgccagagcaactgaatcgtagccccgcctcctggccatttcactagccaggccaatgccgtgaatcacgacatcgctttgggagatatcctgcaacaccccgctgatttccggatcccggaccaaagaccggtaagcgtccttggaaacatgttccggtaaaaagagggattcatagctgccgccggtcgcccgggccatttcttgaacgaccgcgttgctttccgtgttgacccggccgcccaatgcccctctgccagggacgaagatcaagctccggttctcactcaagctgcggttcagcttcttggccactttggctattgtcttgccgcccataacggtgacaatgcagtctgccaggggcaagagcagattcaaggctgaattcagctcttcgccagccaggtcataaacccggctctgcaggtccgcgtcgccagctacgataattgtccgatctattcctaaagcctgggccaaccatacttctgcttggctggcattaaaaagtcgatcaacaattggtgctgcatcttttacaacactctctcctttttcagtcaagaacatcccgaaattcttgatttcgatcagaccctggtcacgcaggtaatcagtttcggtccggatgttccgctcgctcagccccagctgcctggccaccgtccggcggccgattggagcatgcaagctgatctgttcaaggatgagatatctttgtcgaaagatctttaaagcatcgggaacaagcagttcgagcagggataaatccgtgttcaaagtaaccatccttctagcgggacgcttcccgaccacgctgttgtcgttttctgtcccacattgcttaaaaatataagagaaacaagacttcgcttcaatctccatttctctctcgacactcttagtataacagaattcgctccgtatgcaagtttttttctaaccctgcccgggcaaaaagcctgttttataactttcttgacctttttcgcagataccttacaagtttttacaatttttttgctttaaccccttcccattctctgaatctctgctataattaataactgtgattgggacccttagtgtaatggatcgcacgcaagattccggttcttgaaatctgggttcgactcccagggggtccatcatatgaaaaccgctgcttttcagcagcggttttctttttgtcttttttcgttttgtttttctgtctgctctgcctcttctttatcagtcaaacaaggcggctaagtcctgcagggtcaagtcctgcttggcctggccttgatagtcgtggctgatttgaccatggtctaaaaccaaaaggcggttgccatactttaaggcgtcttccatatggtgggtgatcatcaccgcggtgatcttcttggcccggatctgttcatcggttgcctccatcagcttgcggctggatctggggtcaagcgccgcggtatgctcgtctaaaagcagaagctccggcttattataggtagccatgacgaagctcaaggcctgccgctggccgcctgagagctggtcgaccggcaggtccagcttgccggccaggtcggggttgaccttctccagggcttctttgaaggccggaatgttttccttcagccggcgcagcttcagcccccgcttctgccctctttttgcggccaaaagcagattttcagccaccgtcatccggggggccgtccccagcttgggatcctggaagacccgggcgatgtagctgctgcgcttgacctcgctttccttgctgatgtctttgccggcgtggagaatttttccgctagtcggctggatggccccggccaaaacattgagcagggtgctcttgccggccccgttgccgcctagaaggcagatgaagtcccctggcttgatctttaagctgagcttgcccaggatcttgttttcctcgctagtaccgcggcctacgaccacttccaaatcggtcagttccagtaaattttgactagtcatgcttaaatcctttcataaatgtctgcttgaggcggagtttttcttcaacttgcggcagcatcatgcaggcggccagaactagtgaagaaatcaaattcaagttgtttgaagacaggcccacctggagaactgccaataagagcaggcggtagataatgctgcccaggctgaccgcgaataaccggctggccaggccaaggtttctgaagacgacctcactgatgatgatggaggccagtgcaataacgatcgtccccatccccatgttcacatctgcatagccgttgctttgggcgaccaccgccccgcagaggccaaccaggccgttggaaatcatgaggcccgccaccgtcatctgctgggggctgatcccctgagacttggccatctgcgggttgtcacccgtggcaataaaggcctggccaaagtcggttgacaagaaccagatcaagtcgcaggtgaccagaaccatcaagatggtgccggcaacgacgctgtcaaagtactggggcagcttttgcaaaaaggccagggagtagatggtctttttgcctaaaagggagatattagacttgcccataaccatcaagtcgatagagtagatcccggtcatggtcaaaatcccggctaaaaggctgggaatcttacccttggtgatcaaaagggccgtgaccaggccggctaaagcccccgccacaaaggcggccaaagtggctaaaaaggggttggtcccttgcacgatcaggctgacggaaacggccgcgcctaaagggaaggtcccttccacggtcatatccgtcgtattcatgattctgaagctgagaaagaggcccaggcccaggagcccccataagaagccctggccaattgccgatacgatcaaattcataaaaatcctccttgtaaactacttgtagatggttcccttagacttggcttctttcaagaagctggccggaaccttggtgcccagcttcttagcctccttgaggttaagatacggggtgccgtattcaacatagcggatggccatgttgcctggctttttgccctgcaagatctggacagtcatcttggccccgatcaagcccagctggtactggtccacgctgtaggtggccaggcccccgtctttaaccatggtgccggcagccgggaagaccggctttttagccgcgttggcgtttttgaccagggtctgcatggccccggcaatcgtgttgtcagtcggcacgatcaccgcgtcgacctgggtcagcatttgctgggagacctggtttaagtcattgctgttggaaatggagtaggccttgtagttgatccccatctgcttgcagtagctaacgatctgcttgtagccagacacggctgagctgtcgcttgaggtgtagatgatccccagggtcttcagcctgggcaaaaaacgctggatcaacttgagctgctgcttgatcggcgcccggtcgctgaccccggtgatgttgccgccgggacgcttgttgttcttcaccaggcccgcccccttagggtcagtcactgcccctaagacaatcggcttctttttggtcgcgttggccagggcctgggaagacggggtggtgatcccgaagaggacctggtcctggccgttgactagtttttccgccatggtcttcagattgctctggtcattgttggcattttggtagtcgatcttgaccttgtagcccgacttggccaggccggccttgtagccccggtagatttcgtccagggccgggtggcgcatcaaggtcaagacccccactctgacttccttgctcttttgggccgccggcttgatattgataaacagggcggctgccaaaaaaagataaattgcggcaaaggccgcgagcacctttttcattctgttacctcgcaaattaaagcaaaaactaaagtactgtaaatacagaaaaaataacaaactaaccgaaagcgaaataaaaaggaggatccgcctagatcctccttttctgtctctaaaagaaaaatccggatagatttatttactatccggaccctaatcaactttcagcaattcagacagcaattcaagccaaaacagattgaatcgccccgcgaaacaatctctacttgaattgccagctttcttttaccattgcttgaaagttcatcttttttacctctcggttaacatttaatttatttttaactaatcttactggaaagcctttcccctgtcaaggctatttttcggctttttaccagcggccggaaagaatttcccctctttgggccaattgagcatatagctggctgccgtcactggccagaccttcgatttcccggttggagacatgcctccaggtcttctggtaagtcccatcagtctgcaatttgaagatcaagttgttaaaggccaggtacatgttgctgccgcttacgctgaagccctggaccggagaactgccggcctgctgcttgacaaagtggctttgggtcgccgttacctgactgacctgccagcggttgttgaccaggttaaggcgccagaattcatagcggccaaaggccgcgttgtggaagaccccgtacatggtattgtcgccggcaaaagcggcgttgtagaagtagcggccagagctgccgacgtctacccggatgctccagaccttgttgatggtcaagtcgctcttcttcagctgcaggatttcttccgagtaaaaaccgttgcttgccccgcctggcagcttgttttcgttggccaggacatagatgtactttgaccttgcccccagtgactggccgtggcccaggcgcaggtaaggactcactttgacattttgggagtagctcttaaacttgccaaaactcagcttcttgtagaggtagctgcgcggtgacagatactgggcctggtacttgttcagcttcttcatgttgaaggccacgatgttgcccttaagctggtcgctggccgcggctgaccggtaccagctgctgtaagcccagccgccatttacggccaagccttccataaccggaccgacctgctgccagtcattggtctccaggctcaagttgcgcggctcccaaagctgggtggccagggtcaagccgccgctggtccagcggttgctgctagtctctgtgccgtagcggtgggcggcgttccagttcttggagctgccggagtgctttctcgtgctggccacttccttagggcccttcttcgcgctaacagccggcttaaggttccggttcgggttagccgtcttcaccaattcaacggtcgtcttggccttgccataagtaaaagtcagcttgtccccggacagactggccttaaccgcgccatttgccgggtccaccatggtcccgtgagcgtcggtcacatagctgatggcgtccttgtagttaaagcggttgtcatcttcgaccaggtagatttgcttggccgcggaaatcttgtttctgacaaaccacttttcactaacccagcctaaaggacggccgttggcatagatatgggcataagtccccttctcggtcttcttgctggccgttgactggatcttgctgtacttaaagtacttagtggtcgtcactttcttgctggcgcccttcttggttactttggcatagatccccatgtttttcgtgcccggcatcttgctgaccgtggccgcctgggccgtttgggcctggccaataaaggccgccgccagcaggagcgagcagagcagtttcttatccatttcttttccactttctatataaattagattctttccagctaaaaaagccctttcacacaaggacattatagtaccagtttattttttgaaaaagagtgcgccaagtttgacagacccggccaggagtgttttaattagcactgtatccaaatgagtgctaatccaatcactaggaggaaaattatgttagtacctacagttattgaacaaacggcccgcggcgaacgcgcttatgacatttactcccgcttgctgaaggaccggatcatcatgctgagtggtgaagttaacgaccaaatggccaactccatcattgcccagctgcttttccttgacgcgcaagacaatactaaagacatttacatgtacatcaactcaccaggcggtgtgatcacttccggcatggctatcgtggacaccatgaacttcatcaagtcaccagtttccaccattgccaccggtatggcagcttccatggcctcaatcattttggctgaaggcgaaaagggcaagcgttttgccctgccgcacgctactgtcctcatccaccagcctttgggcggggcgcaagggcaagccacggaaatccaaattgccgctgaagaaatcttgaagaccagaaagatgatcaatgaaatcttggccaaggactccggccaggacatcgaaaccatcaagcgcgacactgaacgcgaccactacatgaccgctcaggaagccaaggactacggcttgattgacgacatcatggtcaaccaaaacaagtaatccgcttatcgggaaaagaaaatccagacgactgaaatagccgtctggattttttgttgtcttattattagcggaggttttccgcgatctcatgcaatttcttcaagcggtggttaaccccggacttggaaatcggcccgtcgggaacctgctcagccagttccttgagggaaagttccgggtgctgcaggcggaagcgggccaggctggccagcttttccggcaaagactccaggccctgcttttggtcaatcaattcaatgtcttccacctgcttggcggccgcgccggccgtcttgcggaggttggccgtgtcgcagttgaccaggcggttgacggaattgcgcatgtcccgcatgatccgcaggtcctcaaaggccagcatggcattgaccgccccgaccacatggaggaagtcgccgattttttccgcttctttcaagtagacgatgctgccgcttctgcgggccgtcaccttggcattgaggtcaaagtacttgttcatgatctcctgcaaatcctggctgtggttggcataggtacagtagatttccaggtggtagcggctggtttccggattgttgacactgccgctggccaaaaaggccccccgcaggtaggacattgaccgctgctctgaatacttgatcttgtccggcaccccggtgatgaagccttttttcggggaatagatctctaaatccgccataatctcgctgaccatctgggccactctgaccaggtactggtggttcttcttcagcttcatcttccgggtcacgatcagctggggctcaaagccgtaggccgtcttgatcagggaaaaaatccgccgggcaatggccgggttttccgtcacgatgtccaggcttatctgcccgtcatgccggctcaaaaccgcgttcatccgcaaaaaggcggccagttccgccttggcatgctcgggatggacctcgattgaagtcagttctttttttacctcactggcataactcgccattaacttcctactttctcttaaacatttcctgcagggccaggtcaatgatttccctggccaccttgtcgccgtcatggaagaccaggccgcttcgctggtcgataaagtcatccgtaatcacccggcagttctgttcctgcaggccggcaaagtcgttggcgaccggctttaaatactcatcatagtcttccggatggaacttggtcatgtcgatctgggccccgttgaccagagcggtgtcgatataattgccgcccaggtgctggttgatgacccggacgtggtcggcatcgcttaagcccaccgtttccccggcctgggtcatgatgttgcagacgtaaaccacttcagccttagtctcccggactgcctggccaacattcgggatcatcaggttcggcagaatcgaggtaaacaaggaccccggccccaggacaatagcatcggcccgcataatggcctcgatcaccggactgggagctgccggctcaccgtcatcagctgttacccagacccgcttgatctgcttgtgctggctggtaatttccacttccccgctgctctggctgccgtccatgaattccgcgttcaaggtcaaaggttcgttagcagaaggataaatgtgaccatcaacctccatcatggctgataagttctgaacagcgtcaaaaatattcccctgcatctcgcttaaggccgcgatgatcaagttgccgatggcgtggccggagaaaaaggagtcctttgattcaaagcggtactggaagatctgctttttttcttgcgagaggtcgctcaaggaaaccaggacattgcggatgtcgcccgggggaacgacgttgatgtagttgcggatgatcccggatgacccgccgtcgtcagagacggtcacgatcgccgtgatctccgcgtcctgctttttcaaggcctgcaaaatgactggcaggccggtccccccgccgatgacgaccacccggggccggcggcgcttgatgatgcggatgatcttgttttctccaaaagacatgctgaattcctactttctgagataacggctgatttcccggtgggtaatgtcaaccggatatttttcagacaagtcgcgcgccagctgctgggcgatcgaaacgctgcggtgctgaccgcccgtgcagccgatggcgatcgtcagtttttccttgccttcgtcaatgtagccgggaattgctgtcaacaagaggtccagcagcttgccataaaagaccttggtttcatccttgtccatgacatagttgaagacccgcttgtccagccccgtgaagggacgcagttccggaatgtagaagggattaggcaaaaagcggacatccatgacgatgtcagcgtcaattggcattccatatttgaagccgaaggacataacctcaatcccgaattttggcttgtggagttccccgaatttgctctgcagcttctgcttcagttccttcgtcgtcatcttggaggtatccaaaatgtagttggaccggtttctgaccggagtcaaaatgcggcgttcatcccggatcccgtctaaaaggcggccgttttccgctaaaggcggcaggcggcgggtttccttgtaacgggccaccaaggtgtcgtcagaagcttccaaaaagacaatcgtggcctgggtctggccgctgtcttccagggagttgatttcgtcgattaggtccttgtagaaggacttgaccctgaggtcgatcaccacggcaactttttcaaagtcttccgaagtgttcatcaagtcccagaaattgcccagcaattccggaggcaggttgtcaaccacgaagtagccgacatcttctaatgagtgggcggcgaccgtcttgccggccccgctcatccccgtcaaaatcaacagctgtttcttatattttttatgcatgattccgtattgctcccataaaacgttaaactctatcataccgggcgtgccgcgtcttggcaattgttttgccctagctacattcctattctccactatttttataaaaaatcccctaagccgtagacccttctcccttgaaaaccggtcaaggtctcagcgtggaccaaggcactcaagaccgcttcttcgattgtctccgccccggcttcaaagaccgggtccagctggctgtccggcataaagctaaagctttccgcttctttagcgaaatggctgaccctttgcgccgtggaaaaagccagggcaatgtcgccagaaccatcgccgatatacgacccggttctggctaagccaaccgcgctccggcgggccaggcggcctagttgccggctggagagaggcaggtcggtggcgatcaccatcacgattgacccctggtctttttgatagcgggcataaagctggttattttctgctttcgcccgggccaaaacggcatcttttagttcctggcccaaaaggcggctgccagcccgcaacttgccaaaagccccgaaattggcgcagaccaggctggctacgtgatattttttcccgcccagttccaaaagccgtgaagctgacccgatgccgcccttaaagcctaaacagcgcataccggttccggcaccgacattaccttccagcaggggcggattaccctcagctaaagctaaagccgtcagagcatcgctctctttaaccggcagggacctaatatcattcaaatccccgtcgttacactccattacgaccgggttaaccgtcccggttgtgaggccgatctccgggttccggtccagcatgtagcgggtcaaggccgtccagcaagtccccacggccagggtgttggtcatgagaatcggagtctccaaagtacccagctcattgatctgaaccaggccggtagttttgccgaagccgttgatgacctggccgctggccagcattttttgcttaaaaatatcactcccgggcaagattgccgtgacgccggtattaaccccgccctttcgcagggtcacctggcccaccttgacccccggaacatcggttatgtcgtttttctctccggtttgataagcccggggcaaaaacagttctccttttaagcccatcttccacctcagatttccgtcatgaacattttcgccgtcaagagttccataatgctcttggcccggtaggaaacgatccgctcgcctgctcgctcagctcccgggtaaaaagaagcggctctggcccggcctgctgaagaaaagcagaattccagcaggtattcgtcagctaaaagcggcagaccaccgggccccgccaaggcttccttgatcccggtcgcgatgcccgctgcgacttcctgggggctcttattgacagtcgcgctgcccaccccctttttagtggcgcaggtcacgatgccggggcaaaagtcctcagcccgccggcaaattccggcatccccggccaggaaaagtgagggtaccccgtactgggccgcgcagaggctgttgaaggtaaattccgaggccaattccccgttcagcttgacccaggaataccagccatgttccactgtatggtccaagggcgtttcgctggagccggccggagagtggctgccgatatggattgccccggcatagtcggatgaaattcccgccatcatttcttctggtgaagagtcccagccctggatcagttccgtgcccgccggcaacagggccggatccaggttgatcccgtcctcatgcccgtctttgacggtcacctggtagccggcctgctggcaggccttgaccgcggccacggtttctcgggtcatctcttttaaagccaggtcatagcccttgtggccataatgggtttgctcccagctggtaacgccggcgcagccctccatgtcgcaggaaatataaatctttttctccattttccattgcctccctgctttttgctttttccttacacttttttactgcttactttcattttaccatcaaaaaaactgccaacacttaaacaatctgttaagtatcggcagtttaaaatgcttaacggtgcataaaggccaaagcaatctcatttatcccgaagatcatcaggtagatcgcgatcaagtagaccgtgctcatcaccgcgataatcggtctgagcagaagcataaccccgacgaccaggcccaggatgttcaagagcaggttgaagaagaaataccagctggtctcaaagaaacgcaggtgccaggcaaagacgatcccgatcaccgagtcgacgatgaaccagatagccaccaagatcgcgatcgtgtatgccccgaccttgttatcccacaggaagaagatcccgatcaaaatgtcaaagatccccgataaaagggtcgtccaagacgggccaaagataccgtgaaagccggcatacatggaaatccaagcgctcccctgcatgatcaacaagacggccagaacgatgaccaggccccgcaagcccttgccagggttggcaaagagaaaaatgcttaaaacgacggagatgaccccagcgatgaagacgccccagtcaaagccgcgtttttcgttgtagacagaatcaaacataaaaatcaccccttcacactgaagtaaaaattctgacaattatttggcttcagctttcattttacaatactttgctaaaaaaggtttagggcgtgattaagattctttttctttatttgcaagactgctttcagtcaaagctttgtcccggcccaaaactggcttgagatacttgccagtccaggactctgggcagtctgccacctcttccggcgtccccgtgcagaccacctggccgccccgctcgcccccgttagggcccaggtcgatcagccagtcagccgtcttgatcacgtccaagttgtgttcgatcaccaaaaccgtgttgccctggtccaccaggcgctggaggacttccaaaaggcgcttgatgtcgtcggtgtgcaggccagtagttggttcatccaggatgtagaagtttttcccagtcgataacttctgcagttcgctggccagtttcatccgctgggcttccccgccggacaaagtggtggctggctggcccagtttgacatagcccagaccaacgtcgacgatggtctgcagcttgcggtggatcttgggaatattaacgaagaagtcacaagcttcactgatcgtcatgtccaggacctgggcgatattcttttcccggtaagtcacttccaaagtttcagaattatagcgctggccatggcagacttcacaaggaacgtagacgtccggcaggaagttcatttcgatcttgaggatcccatccccgtggcaggtttcgcagcgcccgcccttgacgttgaaggagaagcgggccttggtgtagccccgcatcttggcttcattggtctgggcaaaaagggtccggatatcgtcaaagacgctggtgtaggtcgccgggttgctccgcggggtccggccgatcgggctttggtcgatgtcgatcactttttcaatattcttccagccggtcagcttgtcatacttgcccggcttggcggaattgtggttgagcttctgggccaggacccgctttaaaatctggttgaccagggtggacttgccggacccggaaaccccggtcacgaccacgaattcactcaaagggaattcgacgctgatattcttcaggttgttttccgccgccccggtcagcttcagcttcttgccgctgcccttgcgccgcttcaatggtaccgggatgaacttttctccccgcaggtactggccagtcaaagacttcggattggccatgacttcttccggcgttccggccgccataacctccccgccctggctgccggcccctggccccatgtcaatcaagtagtcagcagcccgcatagtttcatcgtcgtgttcaacgacaatcaaggagttgcccaggtcccgcatccgcttcaaagaagcgatcaagcggtcgttgtcccgctggtgcaggccgatagacggttcatccaagacatacataaccccggacaggttggacccgatctgggtggccaggcggatccgctgggcttccccgccggataaagtcccggctgatctggacagggtcaggtagtccaggccgacgctaaccaggaaattcaagcggtcgcagacttcttttaggatcggcttggcgatagcagcttcctgctcacttaagtcaactgccttaaaaaaggccaggccgtccttgattgacaagtcactggcttcagccaggttcttgccattgaccttaacggccagggccttctcattaagccgcttgccgccgcagacctcacaaggcaattcagtcatgtacttgcccatgacttcctgcatgaacttggacattggcttggcgtagcggcggtcgacattgttgatcaccccttcaaagggctgcttggtgtcgttgaccccgaagtccccttccaggtggaagtggatttcgttgtctgacccatttaagataatgtctctttgccgcttggtcagctttttaaaaggcttgtccatcgggatcttcaaagccgcgcaggcctgctccagcatccccatgtagtactttgaccctgcccaaggagccagggccccttcagccaagctcttgtccttgtccgggatcactaagtccgggtcaaccgccagcttcatccccaggccatcgcaggccgggcaggccccgaaaggcgcgttgaaagagaaaagtcggggctccatttccccgactgtaaagccgcaaagaggacaggcgtagtattcagaaaaactgagcttctcgcccccgatcacgtcaacgtccatgtagccctcagacaggcgcagggctgcttcagccgagtcaaagaggcgggaccggatcccgtctttgatgaccaggcggtcaaccacgatttcgatatcatggcgcttgtttttctctaaagcaaattcctcactggcgtcgtacagctcgccgtcaacgatcacccggacatagccggcccggcggattcgggcgaaaacctccttgtgctcgccccgcttgccccggatgaccggggacaaaagctggatcttgcttctttccggcaaatccaggatccgggtcaccatctggtcaaccgactgccgctggatcaaggtgccgtcgtttgggcagtaagggtggccgaccctggcccagagcaggcggaggtagtcgttgatttcagtaaccgtgccgaccgttgagcggggattgtgggaggtcgtcttctggtcgatggaaatggccgggttaaggccgtcgattgagtcgacgtcggccttgtccatttgccctaaaaactggcgggcatagctggacagagattcgacgtagcggcgccggccttcagcgtacagggtgtcaaaagccagtgagctcttgccagaacccgataagccagtaataacgaccagctggtctttaggaatgattacgtcgatgtcttttaaattgtgctcacgggcaccgcggatgacaatctttctatctgccattgaagtccttgcctttcttcttaatcggttttcttacagagccttccaattcgataatcgcgtcgcggaggttagccgcgctttcaaagtccaagcgcttggctgcgtcttgcatctgctctttcaagttggcgatcatctgcttcttctgcttggccgtcagctcgtcgaagttgaggtcggcgaaggagtctgacttttcggcttccttgtcggccttgaccacggagatcatgtcccggaccggcttgatgatggtctttggcacgatcccatgctcttcattgtacttcatctggatgacccggcggcggttcgtttcatcaatcgccagcttcatggaatcggtgatccggtcagcatacatgataacttcaccgttggcgttccgggccgcccggcccatggtctggatcagcggccggtaggcccgcaggaagccttccttgtccgcgtccagaatggccaccagggaaacttccggtacgtcgatcccttccctaagcaggttgatcccgatcaaaacatcaaacttgcccaagcggaggtcgcggatgatctgcattctttccagggttttaatgtccgagtgcaggtagcggaccttgatgcccaggtctttcaagtagtcggtcaagtcttcagccatctttttggtcaaagtagtgacaaaaacccgttcctttctttcaatccgcaggttgatttcagcaaccaggtcgtcgatctgcccttcaattggccggacctcgatcttcgggtccaaaaggccggtcggccggatgacctgttccacgatccggctagtctggtttaattcatagtcacccggggtggctgacacatacatgatctggttgacatgctgctcaaattcttccagctttaggggccggttgtccaaggctgatggcaggcggaagccatagtcaatcaaggtctgctttctgtttctgtccccgttgtacatggctcggatttccggcatggtggcgtgggattcgtcgattaaaatcagggaatccttggggaagaagtccaaaagggtgtatggcggctcaccggctttgcggttttccatctgccgggagtagttttcaatcccgttggtgtagccgacttctctcagcatttccaagtcgtaggtggtccgctgcttgattctttctgcctccagcagcttgccttctttttcaaacttcttgacctgctcgtccatctcagccttgatccggtcgatagccccggccagttgatcatcgttggtcatgaagtgggttgccgggaaaagggagatgctgtctctgaccccgtgcacttccccggtcaaggggtcaacttcgacaatccggtcgatttcgtcgccaaaaaattcaatccggtaggcccggtcagaatagccggccgggaaaacttccacgacgtcgccccggacccggaagcggccccgctggaagtcgatgtcgtttctgtcgtactggatgttgaccaagtctctgagcagggtgtttctttcgtattcctggccagtatagacgtttaacacgctggccgcgtattctcttgggtcacccaagccgtatatacaggaaacggaagccaccacgatgacgtcatttctggacatcaaggcgctggtggcagcgtgccgcagctggtcgatttcgtcgttgatcgaggcgtctttttcaatgtaagtgtctgactggggcacgtaggcttccggctggtagtagtcatagtaggaaacgaagtattccacggcgttgttcgggaaaaattccttaaattcattgtagagctggccaaccagggtcttgttgtgggtaatgaccagggtcggcttgttcattttggcaattacattggccatggtataggtcttccccgtccccgttgcccccttgaggatctgctctttatcgccggcttgaaaaccggccgtcagctggtcgatggcctgctgctggtcaccggccggcttatatggtgagacgagttcaaatttgttattgtcttgccgcttaatcacttttttccccccttaaacttgcaataatcagtcgtaatctattttactacccgaacatagattctaacaatattttgctcaaagaaaaaagcagcagaccacttgtccgctgcttttaatatctatttcaaaaagcccttggcttgcaggtagttgtaagcttcctgcccggccacgctgccttcgcccacggcggtcgttacctggcgcaaatcctttggccgcacgtcgccggccgcgaagatcccttcctgccgggtccgcatcaattcgtcagtaggaatccagccgttttcgtccaggatgtccaggccatccagggccttagtcactggcaaaacgccaacgtaaatgaagacgcccttggtggcaaattccttttcttccccgctgaccttgtccttgtaacggatcccgctgaccttgccgtcttcgccgacgatttcttcagttagggcgttccagacaaacttgatcttcgggtgcttgaaggccttctcctgcagttcaggcttggcccgcagctggtctcttctgtgaacgaccgtgactgacttggctgactgagccaggtagagcccttcctggatggccgagtcgcccccgccgatcaccgtcacgtcttcatctctgaagaaagctgcatcgcagacggcgcagtaagaaacaccatggccggaataagtttcctctcccggcacgttcaagtgcttgtgctctgatccagtcgcgatgatcacggctggagccaggtattcctcgctgtccgtaatcacccgcttgtagtcgccttccagcttgacggcccggacgtcgccatattcatagctggccccggcgttttgcacggtctggtacatcttttcgcccagttccggcccctgaacttccacaaagcccgggtaattgtcgatgtcggcagtgttgttcatctgccccccgtaaatcccccggtctaagaggaccgtcttcaggttggcccgggccgcgtaaactgctgccgtcatgccggctggaccggcaccaatgattactacgtcaacttctttggtcataaacagcctccttgccacttactttttataagtaatatcatacaggattttcaaaagattgcaagcctcttttaaattctgatttccggtcccatctgccggctcatcatcagcttgatctcatcgtcgatcttggcgccctcatagaggaccttgtagatggaagctgaaatcggcatgtccaaagaatacttgtcgcagatttcgtacacggccttgacggtcgtggccccttcaacaacctggcccatgttggccaagacttcgtccaggggcttgccctggcccagctggtagccgcagcgccagttccgggagttgactgaggtacaagtaacgatcaagtcgccgatcccggacaggccactgaaggtccaaggctggccgccaaaggccacgcccaggcgggtgatttccgtcaggccccgggtcatcaaggctgccttggcattgtccccgtagcccaggcccgccaggatcccagccgcgatggcgatgacgtttttaacagccccgccgacctggaccccgattgggtcgttgctggtgtagaagcggacatagtcatttgaaaaaatcttctgcatcttggccgcgttgtccagactagttgaagccagggtaatggccgtcaggtccttttgggcggtattttccgcgtggctgggaccggacaggacgatcatcttgtcaaatccgtctgggtagatttcgtctttaaaaatctgcaaaaccagctttttagtccccggttcaatccccttggtggccgaaaccaggtaaggctggcggccattttcgtccaagacctgccggaccgctttagccactgaccggatcgcgctggtcggcacggcaaacaggataacgtcacagtctttcagaacctgccccatgtcggtgctggcccaaacgctggggttcaaggtccagtccttcatgtagtgcaggttagtgtgatcttggttgatctcatcagcaataacttgccggtgggcgtaaagggccacctcgtggccgttgtcagccagcatggaggccaggactgacccccaggaaccggcgcctaaaacggaaatttttgtcattttttctacctctcgtatggatattttaaaccgcttccttcaagataccactttggcttgactttgacacgccggtagacaaataaaataaccacagcgattaaaagcaggaggctgagggcctgggaaacccggatgacaccaaagatatagaggctgtccgtccgcatcccttccacgaaaaagcggactacggagtaccaggccaggtaaagcatgaagacttccccctgcttaaaaagatgcttcttgtggcgcagggagaggatgatgatcagaccgatcaggttaaagaaagattcatacaaaaaagtcggcttgtagtagctgccattaatgtacatctggtcgatgatgaactggggcaagtggaggttttgcagatactgcaggctgcacttggccccgtgggcctcctggttcataaaattgccccaccggcccaggacctgggccgccatcacgcccggcgccacgatgtccaggactagaaatggcgacaagaagcgccggtagcagaagaccaaaaggacgatcgccccggcgatcaagcccccgtaaatggcaatccccccgttccagatggcgataatttcatccgggtgctgggagaagtagccccattcaaaaatgacatagtagatccgggccccgataaagccgatcggcacgccccacaagagcaagtcgatgaagtcatcgctcatgatctgccgtctttgcccttctctgatcgacatgaaggtagccagcaggatcccgcaggcgatgatgattccgtaccagcggacgtgaatgtccccgatactgaaggcgattggattcagtgctaaagtcattagtctgctttaccccctttttcttcctcactgttttccgcgatcaggctggtcaagttttcatcaaaagtcttggccgcgtcaaagcccatggccttggctctgaagttcatgacggccacttccacgatgttttccatattccggccgaccttgaccggaatagtgacctggggaaccgcgatcccgcagatgatccgggtgttttcctggaagcccaggcggtcatagttggccttggagtcccagttggtcaagttgatgaccagggagatctcggtttcatccttgatggccccaatcccgaagagcttgaggacgtcaatgatcccaatcccccggatttccatcaagtgcttcaaaatacggggagcttccccgaccacggtctcgtggtctctttggtagacatccacccggtcgtcagcgatcaagcggtgaccgtgctgcaccagggccagggcggtttcggacttgccgaccccggattccccggtcaagaggacccccatcccgaaaacttcgacaaggaccccgtgaacgctgcttctttccgccagcttgacggccaggtactgggtgatcatgctcatcaagtaggtcgtggcgtcattggaaatcaagatcggggtcccggctgcttctgccgcttccttcagttcaaccggcaccggcaggttgcgggaaaccagcacgcagggagtttctttctggcagattttttcaaaaactttccggcgcaggtcgtggtccagccgggcagcgtaggaaatttccgttctgcccagaagctggacccggtcagccgggtaaaagtcaaagtagccgctcaattccagtcccggccggtaaacgtcggaaaccgtaatcttcttgccagccacgcattcctgtccctgcagaacccgcaggttggaattgtcattaatgagctcagttagttttaccgtgttcgtcatcatgtacctcactatcatcaacatctcgcactgtcacatcttgcgcctgtttccgcggccgctccggatctgcctggcctggcttgaacctgtcgggctccggccggctgggcagcttgtatttcttccgccagtaaaagcggtagtagagccataatagcgaaattacgaccaggcccaccggcagcaaggcaatcaaggccttgaagaaaaccgagagcagggccagggcaactaccgccgccaaaaccagcagtattatcgtggtaaatgacatatttttcctcttattctggattttcctggctcaaacgccactgcaggtaggcgtagatgaagggatccagcttcccgtccatcaccccgcccacatcggcggtttcatagccggtccggtggtctttgaccatgctgtatgggtggaagacgtaagaccggatctgcgagccccaggcaatgtccaattgctcacccttcaaggccgccttttccttgcgcttcttctcttcttccaggtggaaaagcttggcccgcatttcattcatggccgtgtcccggttctggaactgggaccgctgggcctgggaagtcgtcacgatcccggttgggatgtgggtaatccggacggcactggaagtcttgttaatgtgctggccgcccgccccggatgaccggtagacgtcaattctgaggtccttagggtcaatgtcgatttcaatggagtcatcgacttcggggataacttcaaccgaggcaaaagaagtgtgccgtcttttggctgagtcaaaaggcgaaatccggaccaggcggtgaacgccgtgttcagacttcagcagcccgtaggcattcttgccggaaatccggacgctgacgctctttaagccggcttcatcacctggttcaaagttgttgacttcaaacttaaggccacgggagtcgcaatagcgctggtacatccggagcagcatgttcccccagtccatggcttcagtgccgccggcccccgggtggatttccatcaaggcgttatggtcatcgtactcgcccgacaagagcagattcaattcatattggtggaactcttcctgcagcttggccagctggtcttcggtgtccttttgcaggtccgcgtctgcttccaggcgcagcaattccagggccgtttcttcatcagtcaggtctttttccagagccaggaaggagtcccgcttttccttgagcaggttggtctcactgatcaatttctgggccttttcctgattgtcccaaaagcccggttccgccatcttggcttcgttgatttcaatgctttcgctgatattatcgaagtcaaagagaccccctgaagtggttaagccgggtccgcaactcgtctaaagcattttgaatttcactgatttccattgtctttttcctttgctaaaaatactctttttgtttactacaattataaccaaaaagaggaggctcccgccccctctttgctgatttattaccgactcaagttgtttctgatctgagccttcatgaagaggcgagtcacgtcaaactcgatgtcgctgatcatttcttcaaacatgttgtagccggagtcctggtattcaaccagcgggttcagctggccgtagccccgcaggccgattgactgccgcaattggtccatggcgtcaatgtggttggtccagtgttcgtcaaccacgcggaggataaccaccttttcaaattccagcatttgttccggatcagccagggcagcttccttttcctggtagttgtcttcaaccagctggtaaagctgctgcttaagggcatctggcgtgaaggtcttgaagtcgatttctgaatcaacgtattcttcactggccaggctggaaacgataaagtcgcgcaaggagtccaggcgccaagtcgaccggtcgccttgggtgaacatgtccacttggtggtcgatagtccggtggatcatcggcatcaagacactcttcaaggactcctgctcatcgataacctgcatccgttccttgtagatgatttcacgctggatccgcataacgtcgtcgtattgcagggtctgcttccgggtgtcgtagttgttcccttcaacccgtttctgggctgattcaacctggtgggtgatcaggcggctttcgatgaccttgtcgtcgtcattgtcggacaggcggtcaaggaagtccttgacccggtcgcccccgaagcgcttcagcaagtcgtcttccaaggataggtagaagcgggtgtaacccgggtcaccctgccggccggaccggccccgcagctggttgtcgatacggcgggattcgtgtctttcagtcccgattacggccaaaccgcccagttccttgacgccaggccccagcttgatgtcagtcccacgtccggccatgttggtggcaatcgtaactgcccctctttggccggcattcatgatgatggctgcttccttggcgtggttcttggcgttcaagacagcatgcgggatgtgttccttgtccagcatgtggctcaagcgttcagaagattcaatggccaccgtgccgaccaggattggctggcccttggcgtgccgctccttgatttcgtcaaccacggccttgaacttggagtccagggtcgggtagagcaggtctggcatgtcctgtctgataactggccggttggtcgggatggtgatgacttccatgttgtagatttcacggaattcttcttcttcagtcttggccgtaccggtcatcccggacagcttctggtacattctgaagtagttctggtaagtaattgtggcctgggtctgggattcttcctggatcttgaccccttccttggcttcgatagcctggtgcaggccgtctgagtagcggcggccttccataacacggccggtaaaggagtcaacgatcaagacttcaccgtcttggacaacgtagtcgatgtccttgagcatgatgtagttggcccgcagagcttggtcgatgtggtggaccagcttctggttttcaacgtcgtaaaggttcttgaggccaaagtggtcgcaggccttctggatcccggttctggtcagggaaatagtcttggttggccagtcgatcttgtagtcgccgtggtcttcatcgtcatcggcgtcattgtcgctcttgtcttccaccagcttcttgacaaagcggtcagcccggacgtagtcagcgttggcttgttcagcttcaccggaaatgatcaaaggcgtccgcgcttcgtcgatcaagatggagtcaacttcgtcgatgatggcgtagttaagcggccgctgcaccatttgttccttgtagacaaccatgttgtcccggaggtagtcaaagcccagttcagagttagttgagtaagttacgtcgcaggcgtaagcttcccgcttttcttccggggacatggtgctaaggttcaagccgaccgtcaggcccagccagcggtaaagctggcccatttcagtttcgtcacggctggacaggtattcgttgacagtaacaacgtgcacgcccttgccagacaaagcgttgaggtaaaccggcatggtggccgtcaaggtcttaccttccccggtcatcatttcggcaatgttgccccggtgcagggcaatcccgccgaggatctgcacgcggaatgggtacaggcccagaacccgcttggaagcttcccgggatacggcgaaggcttccggcagcaggtcgtctaagctttcgcccttttcaatccggctccggaattccggcgtcttggcctgcaattcttcgtcagagagagcggccatttggtcagcgtatgactctacttggtcagcaattttttcaaaacgcttaagttctcttttatcagcgttgtataacttctttaaaatgtttgccatctaatcgtccttaattctgatatttagtctaaaatcacagaataattttaacatgtaaatgccaaaaattaaaataatctacaaaaataagcagggcacaataattatcgtgccctgcctggcttgcagccttagtattcagttggataagcggcgaaactattcgttagtttcaatcaagccgtagctgccgtcgttgcggcggtaaaccacgctggtgccgttggtttcagcgtcttggaagacgaagaagtcgtgttccagcatgtccatttgcaagatggcttcttctgggtccattggcttcaagttaacccgcttgttgcggacaatcttgaacattggagccttttcttccttctcctcttcaaccggagcttcttcagggataaagaattcttcaacgcccttttcacggctcttgcggttgacgcgggtcttgtactttctgatttggcgttcaagcttttcggaaacaaagtcaatgctgcggtacatgtcatccgtagtttcttcagctctcaaaaccaggtatggaagcggaatggttacttcaaccttagctgagtggtcacggtataccttcagatttacatgagcgattacgtcctggctcagatcaaagtacttttccaacttggtcaagcgcttttcaacataatctctcaaagcttcagtgacttcaatattttcgccacgaacattgtactttaacataataattatctcctttcccgcttgcgcggtttctttacactcatattataccaaacttgaaagcgctttgtgaaaatatttagcgactaattgaaaaactttcgacctggcatttaggaaaagccgtttcaatcgcgtcgcgcgcatggtaaagtgttcggcctgtggtgtaaatgtcatccaaaaggatgatcttgcctgttattgtacccctaaattccggatttaaaaagaaattttgcttggcctgcatcctggcttttttgtccttttccccctgggccccagctctagccttcttggctaaaagtggcgttaagggcaaaaggggggtaaaaatttcccagaccgtgtcatagccccgcttttcccggtgctcaggtgaagtcgggaccgggacgtagtagtcggccgctaatttttggacagcaggggcggccaattcctgcaaaacttggcagagcaggtagtccccgtagcgcttgtagcggaccatcaggtcatgaaaggcctggttgtagcagtagacggcctggttgtgcaaaaaattcccctggtagatccgccgccacttctggcagtcctggcagatttccccgctatcctgctggcggccgcactgggggcaaaaggcggggccgatctgcgcaaactgctggcggcaggatggacacaggcaggaagtcttgcttttgcccggcaaaagcaggcgcctcatgtccaaatctccggtaaaaggctggtcgcaaaaaaggcaaagactcatccccggttcatctccttgatctgcttgaccgcgcttctgatctgccggctgtagcgccggtagcaaaaaagcaccagcccgtcgggatcctgcttgtctctgcccacccggccggcaatctggaccaggctggcagcggaataaatctcatcatcagcggccacgatgatcacccaaacatgcttaaaggtcaccccccgctccaagattgtggtcgtcaaaagcaggtccaggtcgcctttgcggaatttttccaccttctccagccggtccgggtcctgggcatagacggttgccaggcgcaagtcgggcaggagccttttgacagcggcaaaatactggggcatctgggcaattctgggcaaaaagaccaggagggggtggccgcttttggccgccattttgatccgccgggctaatttcggatgcaggcggcccttggtcaaaaaaggcttgacgtacaggtccagccggggcacaggcaagggatagccgtgaaagcggcggttgagcctgacgatggccagtttcccctgcctagccgcttttagcaggtcctcaggcggggtggccgtcaaaaagacccggctgcccgtttttttaacagcattgcccgcggcaaaatgcaactggggattgccggcatatgggaaggagtcgatctcatcgatgatcaaaaggtcaaaggcctggtagtacttcagcagctggtgggtcgtacagatgaccagctgctcattggccgcttccttttcctcccggccatggtacttgccgatctccacctccccgaaggctgctactaggcgggggtaaagctcattgaccacgtcgattctgggcgtggcaatggctacccggcagccgcggctgaaagcctcagccaataagggaaaaatcatctccgtcttccccgccccggtcacggcctcaaccaggcagtcctctttagcggcaaatttctccaataaaaagcggctcacaccctcctgccgctcttgcagctgccctgtccaggtcatccccgccctggccgggtaatgactgccagccgcctggcggaccaaaagcttgccctcatccagccggcccaggcccacgcaagcacggcaatacaaaaagcccgacggcaggcgggcccagcatgagctgccgcagcgctggcagatgccattttcgatggcgggaattgccgtctgcccctcttttatgctattatccactttgtcaaccagccattggcggccggccagagattctttttcttctgtcatttttttgcctccactaactaatacaccaaaaagggatgattttttgtcaaaagaagcagattttttaacaatcaaagaaaacggccagcatgagctggtcatcaagaagagccgcttcatcgcgactcttgcccgggtccaggatgaggaagaggcccgggactttattgccgcgaccagcaaaaagtaccatgacgccacccacaacacctatgcctacaccttgggcattaatgacgaccgggtcaaaagcagcgacaacggcgaaccagccggtacggccggggtgccggaattaaagaccctgcaattaatgggcctgaagaatgtcgccgtcgtcgtgacccggtatttcggcggaatcaaattaggggccggcggcctcatccgggcatactcttccagcgtcagcgaggcagctgaagccattggcatcgtcaagcgggttaagcagcaggaattgatttttaccatcccctacaaccgctatgacaaggtcgaccacttccttaaggaaagagaggtcttcgttgccggcactgaatatggcgtaaacatcaccatttccatctacctggacctggaccagattgacccctttatcagcgatctaaccgagctcttaaacggggaacccgatctgatcaagggggaccagcgctataacgaaattcccgttaaaagcggagaaaaaagattctaaccaaaaatgaccaagcatttctgcttggtcattttcttttgtctgttcagctttattgttttttaccgctatttttctcagcaggcttgtgcccccccttggaccgctcctgccacttccggggcttggcctcgccctggagccagacttcaacgtccggctccttagtgtgggtgctatgtaaaaccaggcggttaatcaagtggctgaggggcttgtatttttcccctaaaaggccgatcgattccacgaagagctcaacggcgatcaagaggccgaccagcaagagggccatggcccagatcggcgacaagaggaagagcatggacacgaaggagaagatcaaggacagggcgtaaatcaccagtaccgtctgcctttgggtcaggcccaagttcatcagctggtggtggaggtggtgcttgtccgcctgggaaatcggcttcttgttcagcttgcggcggatcatggcatagaccgtatcagagatcggcacgcccaagatgatcaccggtaccagcaaagaaataaaggtcacgttcttcaagccctttaaggctaaaaccgagatcatgaagcccaggtagagggccccggtgtcccctaaaaagatcttggccgggttgaagttgtaaggcaaaaagcccaggaggcaggccgccagcataaagcaggcgatcggcacgtacaggccctggttacgcaagaagaagtagccgacgatccccatggtcaaaagcgagatgcaggacacaccggccgccaggccgtctaagccgtcaatcaagttgaccgcgttggtcaaggccaggatccagaagatggtaataggcaggctgagataccagggcaaattgatggtctggccggtaaaaggaatattcagctcggtcatccggatttcggccaaaaagtagataatcatagccgcgatgaagatcccgcccattttttgcccgggcttgagttctaaaatatcatcgatcatcccggtcaagacgatcacgctggacgccagcaaaagggcaaagagctcgtgggtcggaaactgctctctgagcaagatgaaggtcccgatattgtaagtcacgaaaatccccagccccccgatagtcggcatgggtttcttgttgacccggcgggcgttaggattgtccaccgcccccaggacaaaggccaggcgccggatgaaaggcgtgatcgctacttggatgatcaccagtaaaaaaaggtcaacgataatcttaaacatgaaattccgctttctgagtctagttgagttaattataccgggctttaaggcgatttgccaaatgctaacaaaaaagtccagaattcaatctggactttctgctttatttggcaactgccacggcacgtttctcccgtattacggtgatcttgatattgcccgggtaatcgagttctttctcgactctgtcccggatttcgtgggccaaaaccgtggtctcatcatctgagatcttgcctggctcaaccattacgcggacttcccggccggcctggatggcatatgcctgcttgacgccgtcatagctgccagcaatgtcttccagttccgtcaaacggcggatgtagttctccaagctttcgcttcttgccccaggccgggcggaggaaatagtgtccgccgccacgaccaggtcagcgatgaaggagagcttcggcacatcaccgtggtgggcagcgatcgcgttgaccaccaggtccggttcatggtatttccgggtcaattcaacaccgatttctacgtgggagccttcgatatcatggtcgattgccttgccaatatcgtgtaataatcccgcgcgaaccgctaatttttcatccaaaccaagttcagctgccatagtcccggccagcttcccgacttcaatcgagtgcgccagcacgttctggccataggaagttcggtacttcagccggcctaggatcttgaccagttccgggttcatccggtggatgcccagttccatcaaggcactttcaccagcctcgtaaatatcgtcgttgacttccttgcgcgccttgtcaaccatctcttcgatccgggccggatgaatccgcccgtccttgatcagtttctgcagggcccgcttggcaacttcccgtctgatggagtcaaaaccgctcaaggtgaccgtctttggcgtatcgtcaatgatcaagtccaccccagtcatggcttcaaaagagcggatgttccggccttcgcggccgatgatccgccccttcatgtcatcgtttggcaggtccacgactgacacggtcgtttccacgaccgtatccgccgcgctgctctggatggcatccacgatgatttggcgggcaaagcggtcggctctggcactgatttcttcctcgttagcccgaatcagctccgccttctccttggtcaggtggtcggagacctgggccaggacaatcttcttggcctcttcttcgtctaagcgggagatttccagcagcttgtctttctgcttctcgaccagcccgtgcgcttcttccagcaaaccagcggctttttcttcctgctgtttgatttggtctttcctttgtgtgagttgtttctcccggtcatcgagcaggctgctgcggtgatccagggtatcttctttctgctgaagacggttttccttgcgggccgcttcatcgcggcgcctgttcagctcgtcttcaaccttctgccggtaatccctgatttcttcctgggcttccaggatcttggccttcttctccgtttcagcatcccgcttaacggcttcagcggcctgcttctgcgcctggacctcagccttggctgcttcgacttcggctttcgccttggccaaaattgcctccgcgctctgccgggcgttttccgccttggtttcccaggcattcttccggatggcataaccaatcaggcatcccacgacaagtgaaataagaaaaattacagcgactgttgcgagaagaaatatagtattattcatcatgagttacgtcgcctttgtatttagaattattcgcacattactaatcatatgttacatttttggtcaagtcaattccttagctgcatttgcggaaacaaaaaagattgccagacttctgctcgcaatctttttattggccaaaaactgcctatttatcagtcttttccggacttgccggctctgctggcttctcttcgccaggagctgccttcttagcccgctgctccttgaccttctctggattttccttttcttccagagattcagcatcgattccgtaagccttgcggacctgggtctggatgtcctcggaaacgtccgggtgttcctccaggtacttcttggcgttttcccggccctggccgatcttttcaccgtggtaggagtaccaggccccggccttgtcgacgatgtcctggtcagcagccatgtccagcagttcgccggactgggagatcccctgcccgtacatcatgtcgacttcagctaccttaaatggcggagcaaccttgttcttgaccactttgatcttgacccggttaccgataacgttggtggactgcttgatctgttccgcccggcggacttccagccggatggttgagtagaacttcagcgcccgaccacctggggtggtttcgggattaccaaacatgacgccgaccttttcccggatctggttgatgaagatggcaatggtcttggtcttggcaatcgtcccggagagcttgcgcaaggcctggctcatcaggcgggcctggagaccgacgtgggagtcacccatttcaccttcgatttcagcccgcggcaccagggcggcaacggagtcgaccacgacgatgtcgatggccccgctggagatcaaggtgtccgcgatttgcagcccttcttccccagtgtttggctgagacaggatcaattggtcgatgtccacgcccaaggcttcagcgtaagccgggtccatggcgttttccgcgtcgatgtaggccgccgtgccgccccgcttctgcacttcagctacggcgtgcagggcaacggtcgtcttaccggaagattccggcccgtagatttccacgatccggccccgcgggtagccgcccacgcccaaggccgcgtccagggccagtgagcctgacggaacagtcgagatctgggtgtcgaccttctcgcccatccgcatgaccgcgcctttaccgaagttcttttcaattttctttaaagccgcttcaagagccgcttgtttttcatctttagccaaattttttccctcctggaaacttactactaaacattatactttgaaggcctggtaaaaagcaagaaaaaatccgaactaacgttcaaactatttcccctccacttactagtacaagaaaaaagcccttttttccccaatctgacttaaaaaataaaaaatgagtaccttgctgatactcatttttaaagaatagtgattttctaaatgcttacattgaacccttgaagacatcccatgaagaatggaagtagtcgtagccggagtagatcgtgaagatcagagccaggtagagcaggatggtacccaggtggaagatgtcgccaaagagcaggaagatgattgacagcatctggcaggtggtcttgatcttgccaggcatggcagccgccatgaccttgccgttgttttcgaccacgatcaggcgcaggccggtcacagccagttcccggcagacgatgatggctacaacccaggctggagccagattcaatgcaaccatgaagataaaggccgtcatggtcagcatcttgtccgccagcgggtcagcaaacttaccaaagttggttaccagtccccgggagcgagcgatgtggccgtcaaaccagtcggttgcggaagcaacggcaaagacgatcatggccaccacccggctccacagaatttcagtccctgccagggtgaatgagccggctggccattgggcaatcagcaggatcatgaagataggaatcaaaaagattcggaaaacagtcagtttatttggtaaattcattgctttaaattcctcacttttaagaattaatggtcattcttctcttattgcttgctgctggaagcggcagatgatgatggagcggatgatgcctggctgcttggggcagcgctggatgaagcttgtgagcttgatcgaacgctggagctggaagctgctggccggctggaagctgagctttgcacgctggaacttgcccggctgctgtagctcgtgctggtattggtgttagtgttggtgctagtcgtgcggcttgccgcggagctgcttgctgaagcagagctgtcacccaggtagatagtcaaacgggtcgtgccgttgattggagtgaacggaatcttcttgccgccaacagttacagtcacgccagtatcagtccccaggtaaacgatcaaagtttgccccttcttgacagtttccgtgtgcttttcaccgctttgcagggtcccctggttggtgatcacgttgtcaacggaaacgtagtagtagatgctttgcttgcttgaccggactaccaatggcgtgctggacttgatgccagttacccggtagcttgagccgccaagtgaagcaaccttgattgagctggtcttctttttcttggatgaagaagaagctgatgagctcttcttgctggaagacttcttggaagtaatcgtgacgctggagccagcattttccttctggctgcttgacccggtcttcttcatgttggcaaagaccatccccccgatcaaaagcacaagggcgatcccgcagcccagggccaggcggggcacaagcttgcgccacttggcgtccttaggagctttctcggcaacttcccgcttggctggccggctggcactgattctggccggcttattttctgccggctctactggagctgcttcttcttcatgagcttcctcatgaacttcttgagccggactgcttgctgccggttggctgacttcgctcgtgacttcatttgcaacttcgccttggtactggctcagcaattccttaccgtccaagccgacgatttgcgcgtactggcggatgaaagcccggacgtaaaagtcgcctggcagcttgtcgaaatcgttgttttcgattgcttccaggtagcggctctggatcttcgtagccttctcaatatcggaaattgaaaggcccttggcctctcttgccttacgtagttgttctccaatgcctgacattattaacctcttcaatcactttaaaattcgtttataaattatagcacaatggccgcggatgtgtcgccctattccagccagccgccactgacataaatcgtttgcccggtcaggtagtcgctctcagggttaagcagacagtcaacccagtaggcaatttccttgggcttggccaggtggccggccggaatttcttctgccagctcttttaaggtttccggggaaaacatggcattcatggccgtgttgaccgcccctggggcaacgacattaaccgtgaagcggctggcggcaacttcccgggcataggcctgggcaaagcggctgatcccgcctttagtcgcgctgtagactgcttccatggcgctgccctggcccccgtaaactgagcccaggtagacgatccggctgtgctcttgctttaaaagctggctttccaaaagcttggtcagcttgatcgggttctccaaattgaccttgatgatctggtcaataacctgggaactctggctgcccaggaagtcatagttggtgatcccttgggcaaaaacgaccgcgttgacgggcaaaagactgctggcaaaattcttgagctggtcgtcgcctgctaaaaagttcagcttgatcggcatgaaatcctgcaagggatgcttttccgccagagtcctggccaaatcgctggcctcttcccagttgctgttgcagtgcaggtacatggaccagccagactcagccaggcgggccgcaatggcctggccaataccgccggttgccccgaaaatcagtgctcgcttcattggtcatcctcctcaagcagacgggccgtgttgatgctggcgccctcgcaaagctcctggcagtaggcccggtagtcggcaaaattcatggcctgcatctgctcaacattggcaaacaagtcttcctcatccaggctttcttcagccatttccacggcaaaacccgacaaattgtccaggctgcgcacggtttgggccagccagcttcttttgtgaatctcgaagagcttgcgcatttccatttcctgctttttgggaaaaagcttgtctggcgccagttcagccttgatctggtccagcagctcttctgcttccgggctcatccccagcaagaccgcgtaggccccctgccgggtataagtcacgctgatctggaggggctggctgaccagtccagcttgtctggcactggcgaaccagtggctggcggcacctagctttgattctagcatgatttccagcaaaatttgactcatatcccgacttgctaaaactttcttaaagtttggcaaagggatagccgccgtaaacaggggcacttccccgccgatcaggttccagtcctgcccgcttggcaaaaagggcaccaagtccgcttctttttgcggcttgcccgggcgcaggtattggtctgacaatttcctggcctgtctaagaatggtcttgacctggttgtcggtaaagtccccgcaggcaacaaaggacatgcgggcggccacgtagttttcatcataagccgcctggagcttttccttagtcacgctggcaatcgattccctggtcccggccacgtcgatggccaagttgcagtccccatagatgccccgcaggagccggtcgcccaggatccagtcgggctcatcctggtacatggctaattcctgctggataatggggatttccttggccacattctcatcggtgaagtagggctggccaaccagtttgaagagcaggtcgatcatggggccgacattcttgaccccgctggcgtaatacatggtttcattgaaagaggtaaaggcattgacgctggccccaattttttcaaattccagggacaagtcgccttcttccgcggcaaaaagcttgtgctccaaaaagtgggccaggccgggcacgggctggggatcagcactgccgaaatcgacgataatgccgaaaaagcgctggttaaaacccttgcgccggatcacctgggccttgaagccggaagggaaatcttttctgataatttctggtttgatcattttaatacatagctttcattcagatacagcttttgggcaaagtcagccagccggccgctggtcacccggctaaccgcggccatcatatcaaagtcctcgtagtcggcatggagcttgtagcggaggtctttggctaaaagccagctggcatggtcctggttgagcaagtggcggttggccagtgcctgccggctctgcttgagcaggcccggatcgatccggccgtcagccaccatcttcatctccttgccgatgatctgccgggctaagtccaacttgtccggatccaggccggcgttgaccaggaagagggcattgtcagcataccaattgctttccaccgcgtaagccgccccgttttcctccctgaccttgctgaagagccgggaggactggtctccggtcaagtattggcgcaagaccgtccccgtggccaaatcctgcaggctgggctggcccttgtaggcatagcccaggaaaagctgggcctgctgcttgccctgctcgtctgttttctcaatccgcaagtccggggccgaaatcaataagtcccggctgccaaagtccaaggctaggcccggccagccttcttcttgcagcttcttttgcaaaaggcgcttaacctggcgggcatcatagacatggctaaatacgcagctggcctgggtcttgatggcatcggcaaagcggcggacttcttggctggtcgctttcgtaatatcttcaatcgagccgatgaagctggccgcgtaatcgggctggtccgcgtaccagttgttgaaaaaggcgcttaaagccgcgttgctcggctcagccatgagctcctggtattcttctttcagctgtctttgggccagctggacagagctgggcgtaatcaagggccgggtggccaggccggcaaaagtttctgctatctgccggtagttgtagtccgggtccaggatttcctggggctcaacgaaattggccaggtaggaaatgaccatttccttgccaaaaagctgcacgactgcttcaaactggaaggagtagcgctgctgcaattcgacctgctggaggccgggatccggaaagagttcgctttcgttcatctgcatgcggcagagcaggctggccatagccatgttgtgcttggtcagcggcaggcggacgaacaggcccaggttgccgctggtaaatttttgattgctttgaatgctgatattttcttcgttcattatttttattcttcttgtccttcaggcggcaaaagcaccttgcgcggcttggagccttccggcgggccgactaccccgtgctcctccagctcgtcaatcaggcgggcagcccggttgtagccgattctgaaccgccgctgcagcatggaggtgctggctgactgctggcggcggaccaggtccactgcctgctggtagtactcgtcgtcaacgtcgtcatcgctgctttcgtcatcatccccggcctggggaatcatttcctcgtcgtattcagcgctttgctggctcttgacccagtcaacgacggcttcgacctcatcgacatcgatgtaggccccttgaatccggtcaggcttggaggccccgatcggcaggtagagcatgtcccccctgcccagcagcttttcagcgccgacctggtccaaaatagtccgggagtcgaccccgctggaaacggcaaaggaaattcttgacggcacattggccttgatcaaaccggtgatgacgtccacgctcggcctttgggtagccaggatcatgtggatgccggcggcccgggccatctggcccaggcggacgatggagttttccacgtcgtggccgccgaccatcatcaagtcgctcaattcgtcaacaacgaccagaatataaggcaaaggctccattaccggccggctggtatccttattgttctcagccaccttgcggttgtattcgcccatattgcggacactgccggcagcaaaaagcttgtagcgccgctccatttcgtcgacgacttttttcagggccttggaagccaggcgggagtcagtgacaacggggatcatcaagtgcggaaccccgctgtagactgacaattcgaccatcttcgggtcgatcaaaaccagcttgacttcatccggccgggccttcatcaagatgctggccaagatcgtgttgatggccacggacttaccggacccggttgacccggcaaccagcaggtggggcatcttggtcaagtcagcgctgatgatctgcccggtcacgtccttgcccaaaggcaccatcaaaggatggtccttggccttttggtcctggtgctccatggcatctttaaaagccacggactgggccttctgattaggcacttcaatcccgatataaggcttgcccggaatcggggcttcaattctgatgtccttggccgccagggccagggctaagtcatcggccaggttgacaatccgggagaccttgaccccgacggctggctggacttcgtagcgggtgatggtcgggcctaagatagcctttttaacattgacttccaccccgaagctcttgaaggtttcctccaaaatagccgtgttctgcctggttttatccttgtcgctggactggtcactggcctggacggcctttaacagagacaggggcgggaactggtagttgtcatcatagctgaccgtgctcttgtccagaccatggtcaacctgctggtcggccaaaatcatcttctggtcatcttcagcctggctgcggggcttgggcaggtcatccagttccagtgaacgagtgaccggcgggtcagggtgctgctctgccacctggatttccggcagggaaggcttggctgcctgcttctctgccttctcttgccttgtttttttctccggcttggcttcttcgctatcccgccaagggtcggtcagcttcccccggttgttgggatcttttctttgctgctccctgtattcagagtactttccctttagctggccggctccatccttgctttgctggataaaggagcggct

SEQ ID NO: 2168 - DNA, 104793 bp, Unknown
  gut microbiota DNA sequence
ttttgaaaagcagcgaccagggagcggaatttgacgtcaaagaacatcaagatcccgctgattatgttcaaaacagctaggcacaggccgccaatctggcctaaaagctggtagaagatcccgtacaggaagctcccgatccagcccccgccgacgctgacggtgacattggcccgggccagttcttcaaagatcacgttcttgaaggcgggcaaaaattcgctgtggacgcttctgacattgaaaaagcggctggccaaaatgtacaaaaggcccaggtaagccaaaatcaagccgcttgtccgcttaaagccaaagcggggcggctgcccgtaaatcagcatgaccaggcccaaaatggccaggaaggccccgcctaaaagatagctgtccccaatcaagagccgcaaaagattggccagttccttacccagccagccaaagcgtaataacgccaaaatggctaccaggatcaagacgatcccggtaaccacccagctcaaagattcttctcttttctttttatttctgtttttacgattagcctgccttttctttcgaggcatttcttcacctgctcaatccttagaaattaggttcaaagtccaagttgatcggttcatccaaggcaacctggctaacttcataagtcaaggtttcgatgtattcaaccagcggccggctgagcaaacggtaggtttcctggtccaggtcctggccgtcgccgtggtagcccagaagctgaacgacttgggtgttggccccgctgatttcgatgatgttgtcttcgtctggcgtaacgtcgtagacaacggctacttcgtagtagccgcctgcctcgccggcatcttcaacgccgtcttcgcccgtagcgacaacctggcggatggctacgttgacttcgttcttttcttctggctcatcgagcaggtcatagtgaaaggcacgaacgatgattggggtctgcttgttaaattccatgattttacctcataaatttctttttagccactaatgcttgggcaggttccgctggtagcggccaggacggttgtagtcgtccttgagcttgtcgttttcatagtgatgggacttttccatgtggggaaagccttgctggcgcagggcttcaaaaattacaatagctgccgaattggacaggttgaaggcccggatcttgtcggacatgggaatgcggagattgcggtccgcgtattgtcgcatgaaggtttccggcaaaccggtcgtttcccggccaaaaacaaagtagtagtccttgctttcgtccgtgtagtcgacgtcagtataagccttgctggagaacttggagatcaagtacatctcggcattgtccggcaaagtagccagaaaggcccgcaggtcgtcatggcggcggatttcaacttcaccgccgtagtctaaaacggcccgcttgagatgcttgtcgtccaggcggaagcccaagggctcgatcaagtccagcaccgtgttggttcctgcgcaggttctggcaatgttgcccgtgttgtcgggaatttccggctcaaacaaaacaatatggttagtcatttatttcctttctttcttcttcttgtccagcctggtctgcttcatcctggaaactgtcgtcataaaggtgggaaaccttccggtagtaccggtagacatgggtcaaaaggattttcatcaccgcgtagatcggaatcccgccgatcacgccccacaggccccagactgagccggcccccagcatgacgataatcgtcgtcaccgggtgcatcttcaagcggttgccgacaaccagcgggctgatgacccgggtttcaatgatctgctcaataaagaaaaccactaagaccttggccaccatcggcaaattagtcactaaagcgatgattaaggccggaatcaaaccgatgaaggtcccaaagtaagggatcaggttcaaaaagccagcacagatcgccagggctgccccgtaaggctcgccgataatcgtatagccaatgaagaacatgatccccacgcagatagccacggaaacctggccgatcacgtaagaagacacagcctggttgacttcatgcagcagcttgctggtcgcctgctcccagcgctggggagcgaacttgaccagaaaaggccgcagtttgtgtccgtctttcaacataaagaagagcaaaaacggagctgtggccagggtcgtgaagacggctgtcgccacggtgaccgcgctggttaaattccccagggcgctggagacggttgaccccatgctcttgctgaaattcttctgcaaagaagtcatctgcttttgcagagaatcgcgcaggccgctgaatttcggactgtgcaggagctcatcaaccgcgttggtcgaattcttccagatcgtgggccagttcttgactaaggagtcaatctggctctggacgaccggaatcagggaattgatggcccagatcaagaagaccgtgactatggcaaaaatcaccatgatggtgaccgtccgcggcaccttgaacttctcttccagcttatcaaccaccggctccatcagatagtactggaccatggccaccaaaaggggcggcaggatggcgctgatgaaggtgttgaccggattcaagataaaggaaatcttgttaaagaccagcacgatcaacagggccaagagcacattgatcaagccgacgctgaagcggttgttaagcacccagtccgtaaagaggctcgtgtctcttttcttcattaatccagcctacaggtgttcgtaaacgatttcgtcgtcgactctgaacttcggcatttcctggtcttctggcaagtccaggtagagggcgttggacatcggcttctttggcactttgtcagtgaaaaagaggctggcgtgctgcaaggcccgcaagttgctgaccgccatagggccaacatagttgatcaaaaaggtcgtcccgtcaatggtcaccgtatcgcccttcttaagaacgactgcctgggcagcctgttcatcatcaaaggcctggatgacggaaacgtcctgcagttcatctttggccgtctggccaaacaaaattacgacgcggtccttttcactgatcgcgtttggtccgattgctttaattgtagatatccatttcatttttatcacctggttaaattctaacatactcaccgggaacttaaagctaagaagaaaagaattgttaattattctttacggacgactatcgcttatcgacatttgctaaagataagcttaatatttaaactagagttattgtggagtaaataaggaggtttaaattgcatattttaattggcggctacaccaagcaagagtcagccggcatctaccagtttgactttatcggctccggtgaccaggcccatctggaacaaagaagaaacgtcgttgaagtcggcgggccaacctatttccaaaaagacggccagttcatttttaccattaagaatgaaaacggccagggtggcatcgcggcctttgcaaacggcaagctggtcagccagctgctgcacgaggggtcttctccggcctacatcggcatcaacaaggaaaagaagctgctctacacggccaactaccacactggggtcctggccgtcatcagctatgatgaccaggggcagctgaccctgcttgaccaggtcaagcatgaaaacaaggctttagggccgcggcctgaacaagccggcgctcacccgcactactttgatgaaactccgggcgggcacctggtttcctgcgacctgggccaagacagagtcgacttctacggctttgacgggcaaaagctgacccacctggccagctaccaaaacgaagacggctttggcagccgccacctggccttctcaccggacggcaagtacttctacgtggccggtgaactttccagccaggtcaacgtggtcaagtttgacgaagaaaactggatgttccggtccctggccacctactcaaccattccggaaagctgggaccagcacaacggggcagcggccatccgcctgtcaagtgacggcaagttcctttacgtgtccaaccgcggccacgattcaatcgctgtctttgccgttttgccggaccaggccctgaagctggtccagcgggtgtcaacttttggcgaattcccgcgggacttcaactgggacgcggaggaaaagtacgtcgttgccgccaaccaaaacagcaataacgctaccctctaccagcggcaaagcgacgggaccttgaccccgctggaaaaggacatcgcggttccagaaggcaccagagttttattcactgattaagttaggagtatttttttagtaacatgctagacattttcaaagccatcattctcggcatcatcgaaggggttacagaatttctgccgatctcctcaaccggccacctctacctggccgactacatcatcaagttagaccagccaaccagcttcatcaacatgttcatggttgtcatccagctgggggccatcttgagcgtcatcgtgatctactttaacaagctgaatccttttgccccgtcaaagagcaagcgtgaaaaagggcagacctggcagatctggttcaaggtcatcgcggctgtcctgccgtcaatcatcattggcctgccgctgaatgactggctggaagaaaacatgacctcctggcaggtaatttccgccaccttgatcatctacggtatcctcttcatcgtcttggaaaaccactacgccaagcggcagccaagcttgactgatttaaacaagatgagctataagaccgccctcttgatcggctgcttccaggttttgtccatgatcccggggacttcccggtctggggcaactattctgggggccatgctgatcgggtcaagccgctacgtggcaactgagttctccttcttcctggctatcccgaccatgttcggggcatcgcttttgaagctggtcaagttcttcaaggccggccacgtctttgtcggcaaccagctggctatcctcttggttggcatggtcgtttccttcatcgtggcctacctgtcaatcaagttcctgctgaagtatgtgcagacccacgacttcaagccattcggctggtaccggattgttttggggatcatcgtcatcatctgcggtctggtatttgcgtaatccttgtattcacgcgaaaatatgctatgattattgcttaagaatagcaagctagaggacggtgaataaacatgttaagtttgctttgcttactttttattttatggctctgctggaagatgggcgtggccctctggcgggttctgatctttttgatcggggtcggcctggcctttgccttgctcagctcagtagttttgccgctactagccatctgcgccctcgggggcctggcttgggcagtaatctcaaacgcgtaaaaatagataacagatgaataagaaaaggagacaggccggcctgtctccttttttgactttattgttttgttattttgccgctaatttatttccctgcttcttgcttcagctgccgccacaagccctgcatgtcgcctgggtcgggaatctcaatctcccgctcttccccgctgaaggggttggggaaggacaggtagaaacagttcaaggcctggcgggcaaaagcatccctggccccgtataggtcgtctccgtaaaggacatggccgatagaagccatgtggatccggatctggtgggtccgaccggtcaacaggcggagttcaattaaactggcccccgggacctggtcaaggacccggtattcagtcaaggccctttgcccctttggattgacctcccgcttgactgtgtcccccacccgggccaggggcttgtcgatcaggccgcttaaatctccttcggcgaagttgccatgcacgatagcgtggtactttttgataaaagcatccttgcccagcttgctgaagcggtcatgggcgatggcgttcttgcccaagagaaccagtccggaagtgtcctggtccagccgggtcacgatgtggggcttgacgtaagccgggttgaccccctgcttttcaaagtaagccagcacccggttgattaccgcgtcttccgcatgaaagccggaaggaatcgacaaaaggccggccggcttgttgatcaccaaatagtcagccgtttcttcaacaatgtccaggggccggcgggagaccttgagccaggggttgaccggctcttggcccatcaaaaagtggaccacgtccccttcttttagccggtagctgccattccggcggtggtggttgaccagcatcatcccgccgtggttcttgcagttgttgactgcccgccgggaaaaaccttttttcagcaaaaaatgactcagctggcctgggtcatttttcgcaacaatcattttgtatacttgcactatctgtcaccaatgaaggcgtcgttgacccgctcccaaaaatggtggtggccatactggtaaaagcgaatctcttccgccgcaattttataatctactttctgcacgtcggtcaagctgatcctttccccgtcgacgatcacgaccgcccggtcggaaatcttcggcacgatggtgatccactcatccggggcaataacgatgggcgagcccaccgtccggaagaccaggttgttgatcgaggcaatttcagtcagctgcagggtcttgaggcgggggtggattaccgctccgcccagggacttgctgtaggccgttgacccggtcggggttgacacgcagagcccgtcgccccggaaattctcaaagcgctcacccccgagccagacctcagcttccatggtcttggaaatccgcttgattgaggcttcatttaaggccaaaaagcgcttctccccgcagctggtggttaccttcatgtccaaaagcgggtagcccacctcgttttcttcaacgggatggctggccagggcgtcaaccagcttctccatgtcgtagttccgccagtcggtgtaaaagcccaggtggccggtgtggataccggcaaagcagaccttgtccagctgctgcttatacttgtgaaaggcagagatcaaggtcccgtcaccgccgacagaaattaccaggtcgggatgctgctggtcctgcaaaatgcctttttccgcgagcagcacctgcaggtgccggaccgccacctgggtggtcacgcggtcattgtgaacgatagctactttcatgacttttccttgcccttgttcttggtgaagatcttctgcgcttccttgacctcatttctgatcgaggacatctcttcatccagctggtaggcagcttccgccgtccgcttgagccgctcagaaatatcttccgggtaggccccctggtacttgtagttcaaggtatgctcaaccgtggcccagaagttcatggccagagtccggatctggatttccgccaaaaggcgcttggccccctcgggcagataaaccgtgtaggccaccaccatgtggtaggaccggtagccggacggcttggcattttggatatagtcgcgctcttcgacgacttccaggtcatcgcgggcatggagcaggtcaacgacccggtagatgtcatcgacaaactggcacatgatccggataccggcaatgtcctgcatgtcggtttcgatcacgtccgggctgatgacccgccgctgcattttctctttaatggagtcgaccgttttcacccggccaaccacgaattctattggcgaatgctctcccttggtcaagaaactctgccgaagagctctgaatttaacttttagttcatttacggcttcattgtatggccataaaaaagtatcccaatcagtaatcacagacattttccttccatctcaaacaaattcattttaacatagatgttagcgaaagcaccaacgcaagctttttaatttttatctaacaaaggagtcttaaaaaatgagcaaaaaccgcgaaattgaagccaaagtcgccctggaccaggccagctatgaggctatcgtcgctgcctacccggtcaagagcgacttcaaacagagcaaccactattttgacaccccggacaagcagctaaaagaagaccacagtgccctcagaatccgctgcttccaagaccgggctgaggaaaccatcaaggttccggtcaagaagctgcaggagacctaccatgaaagcctggaaatcaatgatgatttaaccctgcctgaagccgaggactttttaaaaaagggccggccaagtctgactggcaatgtcggccagtaccttttagagcattacccggacaaagccagccagctgacccttttttcctggagcaagacccggcggatccttttagacgggccaaagggctgcgagctgactttagaccagaccagctacccggacggctaccaggactgggaaatggaaattgaaaatgactccccggccgctatcaaggaagccctggcagaaattaagacccgctttgccctgccagtcaagtcagccaacaaccagagcaagattgcccgggccagccagcatgccaagtaaaaataggcgaaagcttttcttttgttttcaagtaaaagctttgttaaagtagcagatgaagcaaaaattggaggtcgaccatgttcgaactttttctgtttatcaatccgttaggtttatcctgctaccagcttgaaaaacgcatccggctattggcggcaaaactgaagcttgaaatttccgtcaattacattcccctggtaaccatggaagccatgaaggccgacatggtcaagcggaactggaacttcaacacttccatcaatttagccaattatcacaatgcctcagtcagcgcccagagcttttactatgccgtgcaaatcgcttatggcaagaagaaggccaggagctttttgttcaagttgcaggaaagtttgagtgacggccagcggtcttattccccggccttggctgaagaattgatggaaagcctcaatatcaagccaaagaaaatttcatctactttgaaagatgcctgccttaaagacgtcattgcccaggaccagcagctggccaggaaattccaaatcacggccctgccttcaaccgtgatttttgacgaccagatcgatgacagcggtctcttgcttgatggtgaattaagcgacgacgaccttctgcaaattttccaaaacagcgcgaacagctgccttgaacccttgatgcagctgacggagaatgctccactttattatccggtcagccaccttcatctcttatagccagcctctcctttaggggctggttttttgctgcaaaaatttcaagagccagcttttctcccccggcctgcgccaagtggaaaaagcttccttgggcaaagtaaagacagtgtagccggccaggtacatcaattcccccagcttctgacccagcttgctcttttccttcagctgctggtccagatagtcccgctccttgacccagtcatcggccaaaggcgggggcaaaaggggcctaaagtgccataaagcggcaattccttccgcgtccaaggcgaagtccacctgccggtacagcatggtctggctgacaggggcctgccttatttggtacttcaatctaatcaagcctgcctcttggtggatttccagataatagcttccccagcaccggttttcctggaaaaagatcagctgggtctgctttagcttttcccctaaaaaatgccggcggccgaccagccagacatccttaatcccaatcgcctggtaaagggcatgccggtgggcaaactcccccttgcttaagggcgcgcactggacttcaaaggccaagagcggtgtggccaaaacgtcagcccgcaaggcaccgtcagccagcggcacttcagctttcgcatttagccccgccgcggtcaaagcggctttgaggagcattttcccctgccggtgctcctcttgttctcctagcccccggtaagcctggtagtgcttgaaaaaaggctctgccttctgcgataaaaccaggatgaccggtttcccgcagcgcgggcagcggtagacttcctggttgagataggccgggttctcccggaccttgccggcctcactgacggccaggaccagttctttatttaataaagctgcgtacaaaataatcccccattaactagtacgccaaaaaggggagatttttttaaaataggcaaaataaaaggacccccgaaggagtccttaaattatcatctggattcttaagcccacttgctggcaaactgccggcgcaaagcccccagcgcgtcctgctggaagaggcactggccgtgggcttgggcctgctggaattcgtcagcggacacctggcggccaaattcattggcgatcgcccaggcatcagctggcttgatttccgcgtaattctcgtccataaaagccagcttgaggtaaaactgctgcttgtagtagtagacgctggacgccaggtcactgaccttgaggctgtcagccaaagccaggaggtcatcgatatcgtcaaagactaaaacatgggtctcctggtaactccagtagtcctcgtagtcttcatcatcggtgttgcccaggtcctgcatgatcaccgggtccatctcagtgttggcgtcatcagccgggttcaagtcggaaaaggcccagtcatcttcctcaaccgcttccgccatatcgtctccgaccccattggcttcaggatcaaagaagcgccgcatttcttccggcaggtcgctgcctgcattcatcttggtaatcaggagatcgatcccgccatcgttgggcatgacctggaaagtcaccggcgcatcgctggcaaagtcattgtcctcgtccacttcgcgcagaactgacaggaaaaattcctggactctttcccggttgccgagtaaatccaagatcttcaagccccgctggttcagatcctcccgggtcatgcttacgcggagcgtgttctcattcaccttttcaacgcgcatcttcatccctccttatatgtgtaccgttattgtaacctaaaaagccaacaaagcaaaagcgttagcttctagaagccaacgcctgcaactttctattctgaaattaaaaatcctggtctgccaggcgcttagcccgggctatttccagccggcgcacgctgcgcggcaggaagcggcggatttcatcttcattgtagccaacctgcatccggcggtcatccaaaataattggccgtctcagcaggcttgggttcttttcaatcagatcgatcagttcattcattgaaatgtcgtccaggtcgatattcagctcttgaaaagccttcgaccgtgttgacacgatttcttccgtgccttcttcagtcattctcagaacatgaatgatttcttcccggttcaaaggatctgaaataatgtttctttccttgtagggaatattgtgttgttcaagccattgctttgccttgcggcatgaggtgcagcttggagaaacatataaatctaccattattaccacgctcctttaaaatgagattgcatgaacacacattcgttacttactatatagtttagcatggatacttacaaaaaggaagggggtaattggctttcttttaaatttcttaattaatcaagcaaaaaagcggtcagctcacgctaatcgcttttaatttgctctttacttgtcagccatcaagttcttaaccaattcgatgttgtcttcgttggtcaatgattccttggttgccttgtcagccaagctggcgagttcttcagttgagagcttcttcatttcgtttctgatccgcagaattgaagttgcgctcattgagtattcgtccaagcccatggaaagcaggattgggaacatgattgagtcaccagctgcttcaccacacatcccgcaccagataccagcttcgtgagctgagtcgatcgtgtgcttgatgaggcggagaactgacgggttgtatggctggtagaggtaagaaacgttttcgttgccccggtcagcagccatagtgtattggatcaagtcgttggtcccgattgagaagaagtcgacttccttggcaaattggtctgccagaacggcagctgccggaacttcgatcatcatgccgacttgcaggtcgtcgccaaccttgacgccttccttgaccagcttgtccttttcttcagccaaaacagccttggcttggtgaagttcgtccaaagtaccgatcattgggaacatgatccccagcttgccgtaagctgatgctctcagcaaggcccgcagctgggtgcggaagatttccttgtttttcaaggacagacgaacggcccggatacccaggaatgggttcatttcttctggcaggtcccagtaggacaggtgcttgtcgccaccgatgtccatggttctgatgataacctgcttgccgttcataccttccagaaccttcttgtaggcttcaaactggtcttcttcagttgggaagtcgtttgagttcatgtacaagaattcagttctgaacaagccgactgcttcagcaccgttttccaaaacgccagccaggtcgtctggagtaccgatgttggcagcgatcgtgaagtgcttgccgtcagcagttactgatggttcgtccttcaacttccgccattcagccttttgcttagcgaagtcgtcgcccttcttgcggtagtcagccacttgttcttcgcttggttcaacgatagccaccccatccaaaccgtcagcgatcagcatttggccgttttctacagaagtggtgatcttttcagtcccgacaacagctgggatttccaaagaccgggccatgatggctgagtgggcagtccggccgcccaagtcagttacgaagcctttaacgtacttcttgttcaattgtgccgtgtcacttggcgtcaagtcttcagccaccagaactacttcgtggtcgatgcttgccaagttaggcagttccttgcccagcaagtgcgccatgatccgctttgaaacgtcgcggacgtcagctgcacgttctttcatgtaggcattgtcagtcatgctttggaagatagtgatgaagttttgggcaacttcgtccaaagctgcttcactgttgacagcgtcgctcttgatcttggcgctaatctggccagtgaattcagggtctgacaggaacatcaagtgggcgtcaaagacttgcgcttcttcttcacccaagctttctgtggcaaccttgcggatgctttccaattcagcttgtgattcggcaactgccttatcaaagcgggctacttcagcttccgcgtcagcaacggacttcttttcaaaagaaaggtccggttcgaccaggaggtaggctggagcaacagcaacgccgtcactggctgcgatacccctcaaagtttcagtcattattcagccaaaccttcttttgacatagtttcagcaacagctgcgatagcttccttttcgtcatcgccttcagcgctgatagttacgtctgcaccttggccaacacccaatgacattacgcccatgattgacttaaggttaactgacttgccgttgtattcaaggttgatgtctgaaccaaactttgaagcagcttgtaccaacaaggtagctggacgagcgtgaataccagtttcagcgataatatgaaattctttcttttccatcgtaaattatctcctttaaaaatcaagaattgggtaccaaagtaccgtttctcttaaagaataacatgttttcgaggtcaatacaacttaattgtaaatgttttcattaatacttgggcttattctctatcgaagtataggtaataaccccgccgcggccggcccggccggtgatttttttgttttttccgtaattgcgcaggctttgctggaaaacaaacgcatcttccgggtccttctgcgggtcgatctggtactccagcaagtcgcctgagaccaatttctccaaaatatcagtatagtccatattaatgtcacaacctcctgtccattattttagcgcaattttttgtcaaaattaaaggaagaagtctcaaaggccggctattttctcccccgagtcttagcacttgactaattagagtgctaagctctataatttaggcagagctttgatgaaaggcggtattttaacatgttgtgtcaaaactgccaccaacggcaggcctcgatacatctttacacgaagatcaacggccaaaacaaagaaatcgacttatgtcagcaatgctaccaagagttaaggaatcaacaaggcaatcaaatgaataataacaactttttcggcgactttgacgacctcttcaatgctttgaacgggcagtcaaatggcgcaaaccgttacaacaaccaaaatccatccggcccgaccccgggccggggcggcaatggcggcggccagtccctgcttgaccagttcgggaccgacttaacagctctggccaagaagggcaagatcgacccagttatcggccgggaccgggaaatcgcccgggtaattgaaatcctcaaccggcggaccaagaacaacccagtcctgatcggggaagccggggtcggcaagaccgcggtcgttgaaggcctggcccaggacatcgtggacgggtcagttccagccaagttacaaaacaagcggatcatctccctcaacatggtttccatggtccaagggaccgggatccggggccagtttgagcaaagaatgcagcagctgatcaaggaactgcagagccagccgaacatcatcctctttatcgacgaaatccatgaaatcgtcggcgccggcaattctgaaggcggcatggacgccggcaacatcatcaagccggctctggccagaggtgagctgcagttagtcggggctacgactatcaaggaattccgggaaatcgaaaaggactccgccctggcccggcgcttccagccagttgaagtcaaggaaccaagcatcgacgagacaatcaagatcctcaaggggatccagaagcgctacgaggactaccaccacgtcaaatacactgacgacgccatcgaagccgccgtcaagctgtctgcccgctacatccaggaccgcttcctgccagacaaggccatcgaccttctggacgaagccgggtcaagaatgaacctgaccatcccttacatcgataaggaaaagatccaggaaagaatcgacgcggctgagaagctcaagcaggatgccttgaagaacgaagactacgaaaaggctgcctactaccgcgaccagatcgaaaaatacgagaagctgaaggaccaaaacgtcgacccggacaagaccccaaccattacggccaaggtcatggacaagatcgtggaagaaaagaccaacatcccggtcggcgacatccaggcacaagaagaaaaccagctgatcaacctagccagcgacctcaaggctaaggttatcggccaggacgaggccgttgacaaggtggcccgggccatcagaagaaaccggatcggcttcaacaagtccggccggccaatcggctccttcctctttgttggcccgaccggggtcggcaagaccgagctggccaagcagctggccttgaagatgttcggcagcgaagacgccatgatccgcttcgacatgtccgaattcatggagcaatactccgtctccaaattgattgggtctgccccgggctatgtcggctatgaagaagccggccaattgaccgaacgggtccgccacaacccatacagcttgatccttttggacgaagttgaaaaggcccacccggatgttttgaacctcttcttgcagattcttgacgacggccgcttgaccgactcacaagggcggactgtttccttcaaggacacgatcatcatcatgacctcaaacgccggccagggaatcaagacggccagcgtaggcttcgcggcagaaaacaacaagaatgaagctgaagaaacccgcaaggtgatgaggcagtacttcaagccggaattcctgaaccgctttgacgacatcatccagttccacccattgagcaagggcaacctcctgcagatcgtcaacctccttttggataagaccaatgccatggtcagcgaccagggcctgcacatcaaggttaccgacgcggccaaggacaagctggttgaggaaggctacgatccggaaatgggcgctcgtccgcttcgccgggtcatccaggaagaaattgaagacaaggtggccgactacaagctggaccacactgaagccaagcaattggtggcggacttaaaggacggggaaatcacgatttccgaagaagttcccgccctgccagccactgaagcgagcaaagaaaagtaactatctctgagcagaaaaaacaaggattatgcaaaaaggatccttgtttttttcttgaatgcgttataatgaaagtgaagggaatatcagagacaaatagaaacgggtgaagttttatgcgcttaattgatgttactaatagctatgccgaattagttcacagtcagctaaatactacgagcgtgaactacgtgaaagtttactccctaggcaacactaccgtagtttataccgaaagcccaatcgccatcgggatcgttctggaaaaccaccaccgcaagatccgcgaggaagaactcgaatttgtaatcaagcggctgattcccgaccagaccagctatcagcttacggttgacaagcaccgccgagtcgtcgaaatccacgttgacaagtaatccctgcaaaaagagcccactgggctctttttttcttccctgtcttcttcccttattcctttcagcaaaattcaaaaaatacttgttttttagcaaaattacagattaacttgcgaaaaacagcctttttttcaaaaaaattgtcaaaattgacctatgtcaatttttttataaaaaatagttctacaatctgctttgagcactagaaagcgcttttagaaaagaaagtgaatgtgtaaaaagcaacaattttaaactgttgatttagtaaaaataaggaggcattgatcatgacagtttatccggattacttttattctgaaaaagactttgataagagccacatgggctacaagccgctgaccattccagctggcgttgaggcccagcctttggccgttcccccgcttttagcgccggacaaggttgacggcaatgacatctactacaccatcgaggcccaggaaggcgaaagccagatcctgccaggcaagaagaccaagacctggggctacaacgctccccttttggggcagaccctggtagtcaagaccgggcaaagagtccacgtgcgtttgaagaacagcctgcctgtcctcacttcattccactggcacggcatggaagtttcgggaccaattactgacggcggctgccacgccccagtataccctggcgaagaaaaagacatcgaatttacggtcaagcagccagccgctctgacctggctgcacgcccacccatgtccgtcaacggccatgcaggtctggatgggcctggccatgggggttgttgttactgacgacaacgaagcccgcctgccgattccaaagaactacggggttgacgaattcccgatcatcctgcaagaccggaccttccacgacaaccagctcgactaccgggctgactacgacccgatgggggtctttggtgaagtgcctttgatcaacggcgtggtccgtccttacgttgacgtgacgacccaaaaggtccgcctgctcttcttgggcgggtctgaccgccgggaatggcgcctgcactttgaaaacgacttgaccatgacacaaatcggcggggacgattccttcctcagacacccgattgacgttaagaagcttttgatcgggccaggggaaagacaacaagtcatcgttgactttgccggctacaaggaaggcgatgttgtcagcctctacactgacgacttcaagctggttgaattccgcatccacgcctttgaaaaagacgaccgtgaactgccattcaacatcttcactccggacgacccggctgtgaacagcgaagcgccagtccgccacgtaaccatggacgaccacgacaagatcaacggtctccgcttctccatggaaagaatcgacatgaagcagaccttgaactcagttgaatactgggacgtaaccaacaccaacaactctgcttcagggatgctgcaccccttccacatccacggggcccacttcctggttgtttcccgcaacgggcaaaagcctaacccgaacgaaatcaatgtctacaaggacactattgaagtcggcccaggcgaaactgtccgcctgaaggtctacttccaaaacgccggggtcttcatgtaccactgccacatcatcgagcacgaagatgccggcatgatggcccagatccaaatcgttgacccgaaggatccggacaagacctacaagctgatggacatggaaaccatcaccaacgcctttgcagaagaaatgggcgttgaaccaggcgaagtcttcatgccagggatggacgttgaagacatggacatgggtgcctgcttccacgcggctgaagcttcgaccagccgccgcttggtcgaagccgttactgccgcttcaagagccggtcatgaaggccaccacgacgcgaccagcggggccagccaccactaaaaaacttggaggatcagaattatgatgaacaacaacctttacttgaagattttatgggtcttactgtacggcatcgtcgccttctacacctttaccgacaagacgatgatggccatgtactggatggccggggtaatgtttgcccaagcggtccttgacctcgtttactactttttgccaaagagcaaaacagaaatgactgaatgctagtcagtcaaaccaatcatgcgcagaaaaacgatgcctcgcggcatcgtttttcttgtttgctatcttcttttgctgatttgtttttacttgcttctttgcattacagcttttccgtcagttccacatccgggtacttgtcgtggaaccagcgttcagcaaaggcgttctcaaagaggaagagaggattgccaaagcggtccttgaccaggaggttccggctagaagacatcttcgggtccagctggtccgggttgatccaacgggctacccgatggccgatggaagtcatttcaacttcagagttgtattcgttcttcatccggtactggaagacttcaaactgcagctggccaaccgcccccaaaatgtagtcgtcggtctggtagttgcggtagagctggacagccccttcttgaaccagctggttcatccccttgtggaaggacttctgcttcatgacattctttggtgaaacccgcatgaagagttccggggtaaattccggcagcggcgggaattccagcttgcgcttgccagcgtagatagagtccccgatctggaagttgccagtgtcgtagaggccgacaatgtccccggccacggcttcagaaacctggacccgggcactggattcaaattcaacggcattgttcaagcggacctgcttgccggttctggccagggttacgtccaggcccttgctgaattccccgctgcagacccggacaaaagcgatccggtctctgtgctgggggttcatgttggcctggatcttgaagatgaagccggagaattcgtcatcatctggcttcagttcttcatccccgttgacttcgtgctcgcctggcgctggtgccaggtcaacgaattgttccaggaaagtttctaccccgaagttggtcaaggctgacccgaagaagactggagtctgctggccggccaaaacctttgcccggtcaaagctggccccggccccttccaaaagctcgatttcacccaaggtttcttcaaactgcgggtcatcggccaaaggactgccggctggcgcctttccgtctgctaaagcgataaagcggtcctgcccttcttccgggtggtagagttcaacccgctgtttggccaggtcgtaaaggcccagcaggctctgccccatcccgatcggccagttcatggtcacaccttcaatgcccaggacttcttccagttcagcgaccaggtccaggggttcccggccgtcccggtccagcttgttcatgaaggtaaagaccgggattcccctttgccgcacgaccttgaagagcttcttggtctgcggctcgatcccgcgggcggagtcgataaccatgaccgcggcgtcaaccgccatcaaagtccggtaggtgtcttctgagaagtcctggtggcctggggtgtccaggatgttgatccgcttgccctggtattcaaactgcataacggatgaggtaacggaaatcccacgcttcttttcgatttccatccagtcactggtggcgtagttcccggtcttgcgggccttaacggtcccggcgctgcggatcaccccacccaagagcagcatttgttccgtaatcgtcgtcttaccggcgtcggggtgggaaatgatcgcgaaagtccgccgcttgtttactttgtctaaaagttctttgttcattattcttcagtttcttcctcgtaattttcttctggcagggtcaataagaccgttaagagccgcgacccccgcattcttttggtcgtcaaaaccatgccgttgtccaggggcacttccagctgctcgcctctgcccgggatcacgccaagtttggtgatcatatagccggccagggtgtcaacgtcttccatttccaggtcggtgccaaagcggtcgttgaagtcggtcaaaggcatcttgccgtaaatgacaaattgctggtcattcagctgccggaccaaaacttctgccttgtcgacctcgtcgtcaatgtcgccaacgatttcttccagcaagtcctcgatgctggccaggccggtcaccccgccatattcatcagttaggatggccaattgctgctggctggtctgcatctgcaccagcaagttgtccagctcgatcgtttccggggcaaaaaggggcggggaaatcaagcggtcataagtcagctggtcaaagccgtgctggcgggcctctctaagaatggtacggatgtggatgacacccacgatctggtccttgtcctggcggtagacgggaattcttgaataaggctggcggaggatgtcatccaggttttcctccaggtcgtcctcgatgtcgatcatgaaggcgtcagtccgcggcaccatgacttcccgggctaccttgtcgtggaaagccatactgccctcaatcatcgaatattcagtatcagtcaaaacattgccggcatgcagctgatcaatttctgcctgcagctggtccttgccgctttcttcattgctggaaaaacggcttctcagtttgccaaacaggctgccggtcgcagggtcgcttgtcattttcttaactctctttcgtaaaatccttaaatatttacattatagcatatgaccttacgggaatatgttaaaatagcccagtagaaagaggtgttttaccatgaaaatgcgccgcattatgttagttttcgtcttcctgctcttgatcccctacatctgcagcctggccatcatcgggatcggctttaacgccctggtcctgcactcgactgaccccttccgcacggctgtaggggcctttgtcggggccatcatcatgctggccgtcaaggccacgatccagcggcccttgaatttgctggccggagacatctatgacagcttcctgcagcagattctccgcttcttcagcatccgccgccggccgctcttgcaggtagccaactttatcctggactttgtcctctgcaccctggccacgatcgtgatccgcctgcttttgcccctggaatggatcgtcggcacctccatgggcttcgtcatcttggtcatgttcatttcaacttgcctgggggcctatatcgaatacgacaacttgtccattgacgctgaaatcaagcaatcctaattctgactgaccgggaggtaaaggctcttggtcagttttttactgcctaaatccagctggcggaggatataagggttaggattctcctccagctgagcctggaagtcgctgcctaagtcgcccgcttcatccaaaaagcggggcagttcaaagttcaggggcaggtcgaaataggccgcgttggccgtctcttctttttggaaaacccgggcgcttggcagggaaaacttgagcaggccgctaacttcgctatccttaggcgcgatcaccccgtaccagtacatgaagttttccgggccaaaaacgatcaaggacgcccgctgcccggcaaggccggcctctttgacaaaggcttgaaaggccgggtcagcttccagttcctggttggcggccgcgaaggtcccgtttgcatccatcatccggtcaggaaaggccttgccgataaaagtaagttcgttgatttctgtctgcatctctttacttctttctattttctaatattcttccagttcttctaaaggaatgatttccccggccaaaaaggcgctgatttcatccccggaaaagccgtggctgtacagatactgccgcatcttctgctcccttacgcctggctcatagcgcttgaagcgcttgtaggccttaaggccctgcttggccagagccgctctttcctggtcctcatctgcttccgggactaaatcctgggtcacggcctgggccagggagccggagaagccgtggctgagcagtttagtctgcatcttgcggtcgacttcccgcttggcaatcttcccctgctggcccaaaagtgacttgaccaggcgcttgccaaccccggcccattcctcatcagtcacgtctgccagggcagcttcgattaagtcatcgtcaacgccctttttctttaagtcccggcggacagcccctggtccattcttaccgacctggaggttatttttgacaaaaaggcgggcataagccgcgtcttccaggtagcccagctgggtcagctcgttaacggcccgcttggccgctgaccgggaaatttcatgctggctgaggtagtcagtcacttccttgaccgtccggggctggtaggacaggtatctggccgccaggtcgctggccttggcgctggcttcatagtccaggatttcattgatcttctgggggctaagctcctggcccttgagcaggacaaattccgccagggtcttctcgctgacggaaaaggcgtattcctggtccaaaaaaatattgtagcgcccctgccgcttttgtgcactaactttcgtgataatggccattttttcctcctttttggcaaatctggtaactctatcttagcaaattgccgcaaaagctgcgaaaaacttgcgctccttttaaaaagccctgtataatagtatgttacgaagtttccagttatctttattgtagaaagaatagacaaagaagaaggctcacatgcagaaaaaacatttttcaaaaaacgcttctaaagagcggcacgtcatcatcaccatcaagcggctggggatcaacggtgaagggatcggctactacaagcgcaagatcatcttcatccccggcgccctgccagacgaagtcgtggtggccaagatcgtcaaggaccacccccaatacctggaaggtgaattagtccggatcaaggaagccagccaggaccgggttcccttcccatccggcgttgacccgagaatcgggggcctggaactggcccaactgtcttacgcgggtcagctcaagttcaagaaggacaatctggtctctgcccttgaaaagtaccacccgcgcggctacaagaactacaagatcaagaacaccatcccggccccagaccagtggcactaccgggccaaggcccagtaccagatcgaacgggaaaaccaccatgtttccctgggtctgtacgcgcctaactcccaccaattgatcgacctgccggaaatgccgacccaaagcgaggacacccaggcaactgaacgggccatccgggatctgattatcaagctccgcgtcccgatcgccaaccgccggcggaacttgccaggcgttaagactattgtggtccggcaggcggaagccagccaggagatgcaagttaccttgatcactgttggccacaagttggacaatctgctgcagctggctgacaagatcatgcgcctgccaaaggtcgtttccgtctaccaaaacgaaaccgactggcagaacccgcaagtctgggggaacaagaccagcaagctccggggcaagaaccagatcacggaagagatcatgggcaagaagtttgacttgagtccccggtccttcttccagctgaacccggtccagacggctaccctgtattctgaagccttgaagctgctcagcttaacgccggacatgaccttgatcgatgcttactccggggtcggcaccctggggatcctggcggctgaccaggtcaagcaggtggtcgggatcgaaagcatccctgaagctgttttggacgcccagcacaatgttgagctcaaccatgtcagaaacgcagaatacctgcagggcagcgtggaaaagctccttccccgcttgaaggaagacggcctgccaatcgatgccttgatcgtcgacccgccgcggaccggcctggccaagtccttgatcaagaccctgctcagagtcaagccggccagcttcgtctacatttcctgcaacccgtccaccctggcccaggacctggtccttttgggcgaggcttacgacgtccgggtcatcgaaaacgtcgacatgctgccgcagaccccgcgctgcgagtgcatcgccaagctgaccctgcgcaagtaggaagcacaaaaagaaaataagcattagaaaaggcgagaagatcaaatcttctcgcctttaaactaccctcggcagtctttccaagtggatgaggtagctcatcaaattaatagtcacgatattcaattttaagaattcaccaatggctaatatcggctaagataaaacagtcacttgttcgagttttacgtgctagcgtatgaaatgaattagactattgtgtatcgccacttggttaaaagcttcaagcctttattatggtctcaataagagagacaacgaataataattacaatctggagataaaaacttttgttcagttgttttctacctcttccacgccttcagtatagcatgatatgtaaacgcttgcaagggattattttgcgtattttgctaaaaatttcttgaccgcgcgtgcatataaagccggattgtgctcataggacttggcatgctgggcccctttgacgatcaagagctgctttggcccccggctggcccggtaatttttataaaccatcttagttgggacaaaggtatccttgctgccatggataaagagcatgggccgggtattcttcttcagctgggcaaggcttgaggcctgggccaaaaagtagccggcttttaacttggtaatcccgctcaagatttccaccaggggaaaacggggaaaggccggcatattgtaaagggcttgggcttcgtgctcgatttcatttttagcactggtgtagccgcagtcttcgataaagcatttgacctgcttaggcaagtttaagccggaggtcatcatggtcgtggccccgcccatggagaccccgaaaatcacgatcttgctcttttggccatttttcttaatcacctgctcggcccacttcttgacatcatttttctccagccagccgtaaccgacatacttgccctggctttgcccatgagcttccgcgtctggcaaaagggtgttgtagcccagggagtggaaaagctgggcataggcccccatattttccttgttggacatgtagccgtgcaggataatcacggttttagccgagtttttagctggaatatagttggcccgcaggagataattgttcttagccgaccgcagctgccagtgctgctttgtcacctgcttgtaccagagcttctgcttgtactggggggtggacttggtcaactgcaccgtcccgttggtcacgaaacttttcttgcccggcaccacggccatgttgaaaaagtagtagccggccccggccaaggccagggctaagacggctaagaggccccctaaaattttgaccaggcggtaattgcttctctttttattcttctttttcaccagtttcctctcctctttccctctttatatctatagtttctgtcttttttatcgctttgttcctttgttttaagcaatatgaacagtataccacaataaaaaaagaaaggtttatccatgctgcttgaagattttttacagctcctggctggcctgggcgggcaaaatgtcctctacctgcaggtacaagaccagaccctccccctcagtaagtttgtcttggcccgggaagactgccagctattgtgcggcgggcaggcaatgaccctggctaaattccgccagctgaccggcaaggggagcaagtccatccccctcagcttctgctggcaggaaaaagaaattcctgtctacggggtccagatcctgccagctgagggcaagatcatctgcaagtaacaaaaaagcgtagaaaaaagaagttgtctggtcttcagacagcttctttctttgcgtatttcacttgccggctggcttcttcttgccttcgctttccagcttcttgcccaagtcaatgatgtacttgcgcaaagcatccttggtttccgggtgacggagaccgtattggatggaagtttccatgtagccttccttgttgccgacgtcaaaacgctggcccttgaattcgtgggcgaagacccgttgggtcttgttcaaggcgtcgatggcgtcagtcaattggatttcaccgccggcaccggccttttgcttgtccaacatgtcaaaaatttccggagtcagcaggtagcggccgatgatggccaggtcacttggggccttgtcaacgtctggcttttccacaaaggccttaacgttgtacaggtccggagcagtttcgccgattgggtcgatgacaccgtacttgttgacttcttcatgcggtactttcataaccgcgatggttgaagcgtgagtttcatcgtagcagtcgatcaattgcttggtcaatggcgtcttgtctctcatcaagtcgtcgcctagcataaccacgaaaggttcaccggcgataaagctgcgagcccggttgacggcatcccccaagccatttggatgcggctgccgggtgaagtaaaggttaaccttgatgttggacatagtggtttcccggaccagcttcaaaagcccgtccttgtgcttttcagtcaagttgtcttctagttccgtgtttgagtcgaagtggtcttcgattgcccgcttgcttctgccagtaacgatcagaatgtcttcaatccctgaagccatggcttcttcaacgataaattgaatagttggcttgtcaacgattggcagcatttccttaggcatggccttggttgctggcaaaaatctggttcccaaaccggcagctgggatgatcgcttttctgactttcatgtatttacatcctcttttcttaacttcgcacattaatgaaagcattttaaatgcaagcgtataataacatatttctagaaaagaatctagtaaacctagaccaatcttcttgaaaaaggaaaattattttttccgccgcttggcgataaactcagccaaagggccgttagaataggtcgctggcccatagcgcagctggtccaaactgacattgaccgccgtgccaaaaagtaacaggatggccaggagattgagccagagcataaaaatgataaaagttccaactataccataattttcccacttaaccggaaaatttttcaagtagaaggaaaagagataagacagggcttcccagccggacaccgtcacgatgctcccgggcaaaagagccttcttgaagtggacattgggcgctacagcgtttaaatagtagaccccgatcaacatcaagaccagcaaaaccagccagcggtagctgaagagcttgtcaatccaggccaggggcaggttaaagtaaggagccaggaaatgcaggacctcctggccaaagaccacgaccagggctaaaagaatgaacatagtgaccatcaaggcactgaagatcatggtcaaggtccggttccagataaagtgccagaagcccagcttcagttccttattgtggacgccatagaggcggttcatcccaattctgaccgcgttaaccatacaggacatggaccacagggccatgatcgcaccgaaggagatgtagctggtcgaattcgacttgagcagggtatcgacaatcgggatgatatagcgggccacgtcacttggaaagatcatttccaaataatcagcaatcggtcccgtggccaggtgaaaccagggcagggcgttaccgacaataatgacgatgggaaaaattgaaaacaggatgtagtaggcaatcacgatggaactttgaaaaatctccccctgggaaacgaccgaggaaagagttgtaagaaagcgccggacccccttttgtcctggctcaactttttccgccatgcctagtcttccatttcgtcaaagtgcggaatatacttttccaggccgtcgtatggcttttgcaaagtcaagatcttcgggccgtccttggtgatggcaaaagtatgctcgaactgggctgacttggacccgtctggggttgcgtagaagacccagtcgtcattcgggtcgtcaaccgtcttttgcaaaatccgccagtccccgccggcttccaccattggttcaacggtgatggtcatcccttcccgcaggcgcaggccgtgaccggccttgccccagtgaggaacttccgggtcttcgtggatggatggctggatgccgtggccgatcagttcccggacgtcgccgtagccttcttcatcctccacatagtgctggatgacagccccgatgtccccgatccggttgccaactacggcttggtcgatccccatgtacatggccttcttggtcacgtccatcaagtgctggtcttcttctgagatttggccgaccccgtaagtggtgcaagagtcggattcatagccgttcaagttgcaggttacgtcaaccttgaccaagtcgccttcctttaaaaagacatttttgcggggaatgttgtgggcaatttcgtcgttaacagagatgcaggtgccgtacttatagccttcaaaaccttgttctgacaagcggccgccccggctggaaacgaattcctggcagaattcttcaatgtcccaggtggagatgcctggcttgatcacgtcacgcagggcctcaaacatggtcgccagcaagtggccggaagcctgcatgcccttcaattcacgaacagatttaatagtaatcaatttgtttttcctttcataatgaagtagtttgtcttcaccattataaccttttttaaaagtttgctaaagtagcaatgcgcccgattcgccaagccggggcaaatcgtgtataatactctagaaattgttttttgggagcttaacttatgagagcaaagattgtttttgccagcatgaccggcaacgacgaggacatggccgaaatcctggaggaaggcctgctggaccaaggcctggaagtagattcttctgacgtcagcttcactgacgccagcgattatttagacagcgacttgtgcgtctttatcacctacacttacggggaaggcgccatgactgacgaaattgccgacttttacgaccagctcaaggagctggacttgaccggcaagtcttttgccgtcatgggttctggcgacaagacctacaaggaacactactgcgagaacgtttttgactttgagaaggccttcctggcctgcggggccaaggaactgattcccccgctcacggttgaaaacgcccctgacgatgacgatatcgcgcgcatcgatcaagctgctgaggagttggcggataaattaaatggataaagattttaaccggcggcgggctttaggcgagcagatcttcaagcgctaccgcaatttatgggtctacatgttctttggctttatcgcggccttgatcaacacggttgtcttcatgttcatgcatgactttttgcacaccgtcttggtcatcgacaacacgattgcttttatcgtgtctaacctggtctccttctggttcaaccacaaggcggtcttcaccaagaacgtggaccatgaacacaaattgtggcagaagctgctgtccttttttgcctaccggatcatcagcctgctgccggacaccttgatcatgtggctggggatgactgtcctgggctggccagccttgatcgtcaaggtcatcgaccagatcctggtcggcatcttcaactacctgaccaccaaatcagtcttcgagaagcaggaaaagagcctgaagaagcggctggagaagaaaataaaaaagcagtgaagctgagcttcactgcttttttattcgtgcaagttggccaatcaagaaaagtcggctggcttgaggccttttttgccggcaaaacaccaggcaatatcatctaaaatccggtcgctggcctgcccgtccccgtatgggttcttagcttcagccatctgctggtaagcagctgggtcagtcagcagctccagcatggctgccttaaccgcgtcttcttcagtgccaaccagtttcaaggttccggccttgaccccttccggccgctcggtcgtgtcccgcaagaccaaaaccggcttgcccaaagacggggcttcttcctggacgccgccagagtcggtcatgataaagtagctgcgcttggccaggttgtggaaatcaaccacgtctaaaggcttgatcaagtgaatccgggggtcgccgcctaaaacttccttggctgcttcttggactcttggcgagaggtgaaccgggtagacaatttcaacgtcgtcagtttggtcgaccacgtccttcattaccttgaagacccgccgcatcggctcgccctggttttcccgccggtgcatggtgaccaggataatccgcttgccctggccgatcttgtctaagacttcatgctggtagtcggcctggacggtttgggccagggcatcgatggccgtgttgcccgtgacaaaaatattttcttccgggtgcccttcttttaaaaggttggcccggctgacagaggtcggggcaaagtagaggtcggacaagacatcggtcagttgccggttcatctcttccgggaaaggagaatacttattccaggttctgaggcccgcttcaacgtggcccaggggagtctgctggtaaaaggcagccaggctggcggcaaaggaagtcgtcgtgtccccgtggaccaggacgatatccggcttttcttcctggatgatctggcttaaagcagtcaaaacccgggtggtgatgtcagccagggtctgctggggctgcatgatgtttaagtcgtagtccggctggattttaaaaatctccaggacctggtccagcatttcccggtgctgggcggtaaccacagtaactgcctggaagcggtcgtcactgatcagcttgagcaccaggggggccatcttgatggcttctggcctggtaccgaaaacggtcattactttaattttctgcatacttaatctccttagcaaattgctaacttaatcatagcaaaaaggcgcgaaagcggcgcatttttcataaaataatcgataaatcatttttgaggtgaactatgacagtcaatatttttcccctcctgggtgacagcctcttgatcgtcctggccggcttcggcctggtctactcctttgacgggtccttggggcaaaagacgcggcggattttaagaattgccagcctccttttgctcctggccatcatccccttgaccatttggatcctgcagcatcccctgcttatcaattgatgaggcggaaaaactgaatagcacaaaaaaataaggaatcagtccagctgatcccttatttctttactctttttactgcattattagctattcgccttggcttggtgctttaattccagctttctgagccatggcaagaggaagccagtcccgaagaggacgataacggtgatgatgttcatccagagctgcttggtccattgcggactttcaaaagtaacgtcttgcggcaggaagcccatcgtcgcgcagatgaaggtgaagatgaagcaccaccagccgaccgccagggcccccttgttgtttctgatgaagacgaagtcgtccttggcaaaagtcttgtgccggtagcggaaggctaagaaggccaggaagactacggaagtcttgtacggggatacgatcccgttcaagttcaagagccagttaaagatatcgttgatttccggcaaggtccctgacaaaagcaaaaggaagagagtgatgctgcaagtcagcacgtaactgttaacaggcagcccatccttgttcttctttctgagccagcttggcatgtacttttcagaagtgtcagaggcaaagacccggctggcggcgtcgatcaaggcggccaggtcggccatgaagttcaagaggcagacgatggcgtacatgtacatgaggctcttgcccatgccggcttcttcgcccagaagctggaaggcatagaaggccccgttcatcttaaagtcgtgcgggatgtgtttagcgtcaaagaggacggccagaccaagagtttcggtcaaggtcatgaagaccgtcatggcaaaaagcatccacattgacttcgggaattccttgcgggggttcttcagccgggtaacgtaaggcgcggccagttccgccccggacatggcaaagatcaaaaggccagtcgtggagaagtagtggacgctgaagttcggcttaaagctggaccattccatcttggtggcgatgtggccgccgtgcatgagagcccagatgatcaggatcacgaagatcacggacatggcgaacatggcaatccccccgatcaaggacagaaggtccagggagtttttatatgcactttcgcacaagataaagatcaagatgatgacaaaggtcaaaaggccgaacatgaaaggtgacatgtgcttgcctaaagtgttgttgcccaggatcatccaggaaatggaaacgatgatggagttggacacgtccaccaggtagggcacggtttgggcccagtacatccagctggtagcgtagcctaatacgtcgctgcccgtcccccgccggatccaggaggccaggcccccttcttcagtatccttgtaggccaggcccaattgggtggcgatcaaggtatatggcaattggtagcaaatcaaaaggaaaatccatgaaaagattacggacagaccttggttttggtatgggtagaaaacatcttcaaagcggatgatggtgacgaagtcgagcatcgccaaggtcatccaggccatgtagtgtttttttggggtttcttcaatcattctgtaagtcaagctccttattggtcaaattgtcttaagcggcaatttgcctggacgggggcttattttggcgctttaaaaagctggtcactgcaccgtctccaatcaaaaaagtgtcgtttttattttattcctattgttttgaaaattctatagctttttcaatttgataaaaattctttcaagcgttaagtgaaagttatccacataccggtcattagccaacttttagtaaaaaatatttggttaatttgctcttggcaagaaaagcaggcctttttcgtgcaagtaaatgcgcaaaaagtaaacatcactcaatgcgtcaattaagaatgctttttggcaaaaagagcttgaaagtgtataatctacctatgcatactacaatttttttataaagatactgaattgagtggtacgcgcttttatgaaaaatgccaagtaacagaaaggaacagatatgaaaaagtttttgcgagtaaccgcgacacttttgtccgctgcagctattctcgactctttgtatcggctctttgttggccattcctacttgagagttgcctttcttaagctgaccggcggtaatggcatccccggctggcttcaaatcgcggtcatcgccggtatcctcttgtttctctctcaatatgactggttctttgatcattttctccgcgatgaacgtgaccgcaagtacaagtagcaacttccatcaacccatgaaacagaaaggaatttttcaatgcattatctagcaatcgctgctaaaaaagagcttctgccctatctgccaatcgactggcccaaaactgaactgaccgagctggtcaaccccgcaagcctggctgccgtagtcatcgatgaaaaagacagccggtcccggggcatctaccagaccatgaaggaaaagctgggtctggacttgcccttgatcgaatttactcctgagacctctccagctgaaatcagccgcttggcccagacctacgaagaagccaacgttccccgcttcatccgggagctgacggctttttctgaccaagacgacctggtcttcgatactcctggccaccacaacggccgcttctacgaccgccacccagctggagcagtcttgcgcaacttcttcggtgacaactacttcagagccgatacttctgactgcgtctcagaactcggcgatatgatgaaccacactggcgggcccttagaagcccagcaagaagcagctaaagacttcaacgccgacaaggtctacttctgcaccaacggcacaaccagcgccaacactatctgcaccaccgcccttttagatgaaggcgacctggtcctttttgaccgcaacaaccacaagtccatctacaacagcgccctagtcatgacgggggccaagccggtctacctgccaactgaccggaacgctgacggcttgatcgggcctttgaccgccgccagtcttgatgaagacttgatccgccgggaaatcgccaaggtcgcccctggccgcgccaaggctgaccggcctttccgcctggcggttctgcagctggaaacctacgacggcatcttctatgacgccaagcttatcttgaaaaagctcggccgcctctgtgactacatcctctttgactgcgcctggggcggctatgaacaatttgtcgacgtcctcagagacttctctcctttccagcagacctacggccccgatgacccaggcatcctggtcacccagtccgtccacaagcagcaagccggcgtgggccaggcctcccagattttaaaaaaagacagccacatcaagggacaaaagcgctacgtcgaccacaagcactttaaccatgcctacatgaagtacgttacgaccagctactcctacccggtctacgcttctcttgtcgctaacagcgccatggctgcttcaccggccgttaacagctggtggaacgatacggttaaattaggcatcgacttccgcaagcgccttttaaaggaaagcaagctctttaagcccctcgttcccccaactgtccacgggcaaaagtgggagaacctgccaactgatgtcttggcccaggacacggaagcctggaaactgtccccagatgatgactggcacggcttcaaattgcttgctccgggtgaagttgccctaagcccggtaaaagtcaccttgatgacgcccggcattgacctggcaaaagctgccttcaccgaagaaggcatccctggcgccatcgtttccctctacctgcatgaaaagcacatcatcccggaaaagtccgacagctactccaccctctacctgctcacgccaggcgaggggcaagtcgatatgaacggccttttctcggccttaatggcctttgaagaagcctacttgactaaggcgcccctgtctgccatcatgccggaattagtagcccagtaccctgaccgctacgagggttataccctctaccagctctgccaggagctccaccactactaccaagagcatgagatctttaagctccagcaagctcttttcctaaaggacagcttccaaaattacgagctgacgccaaaagaagctgaccgcgaattcgtccacggcaacagcgaactggtcaaactggccgacgccaagggccggatggccttggaaggcgccctcccttacccgcctggtgtcttcatcgtggcacctggtgaacgctggcaggacctggacgttgcctacttccaagtcttgatcggcgctgcccgaaagttcccgggacttgatccggaaatccaaggggtctaccaagaggacggcgaagtctgggctgaagtccttaaagaatcttaagctgacaaaaaacgttgacacaatcgtgccaacgttttttctatcttctgaactattttctttattttttctttttcccttagtcaccaaagagaactgacttgaccgcgttggtcacggcgatcttgtcatgggcgtaggtcaaaccgccctgcatgtagacagcgtaaggcggacggatcgggccgtcagctgagaattcaaccgttgacccggagacaaaggtccccccggccataatgacttcatcttcgtagccccgcatgtggcttggaattggggtaacaaaggagtcaaccggtgagttcttctgcacttcctggcagaacttgatcatcttttccttgtcgttgaaggtgatcagttcgatcaggtcagtccgcggggcatcccacttaggagacacgtcgaagcccagcttttccatcaaggcggctgagtagatcatccccttgatggcttccccggtcacgtttggcgccaggaagaagccttcgtagaactcatgcaggctgtttaaggttggcccttctgagtcgctgatccccggggcaaaaagccggctggctgcccggtggatcaagtcttttctgccgacgatgtagccaccagtctgggcaatcccgcccccggcattcttgatcaaagaaccggccatgaagtcggccccatattcagtcggctcatgcttttccgaaaactccccgtagcagttgtcaacgaagatcaaggactggggactgacttccttgataaagtcgatcatttccttgaccttagcaaccgggaagctttcccgggtgtcgtaaccccgggaccgctgaatagccacgatcttcggctggtcccgctttaagatcttttccccctcttcaaagtcgacgctgccgtcttcttttagcggcacataggagaacttgacccccttttcaatcaaggtgccggccttgtctggggtaaggccgatagcgtgctgcagggtgtcgtaaggcatccccgtcaggtaagtcaaagtgtcgcctggcaccaggttgccgtcaagggcggttgccagggtgtgggtcccggaaacgaattgcggccgcaccagggcgtcttcagtgtggaagacctgggcgtagacccgctccagcttgtcccggccttcatcgtcgtccccgtagccgttggtccccttcaagtcagattcagcgaccgcgttgtccacgaaggcttccagaaccttggcctggttgtaaataacctgttcgtcgatttcatgcaggcggccggcgatctgctcgtcgacttccttaacaatttttgctaattcttctggtaaattgttcatcaaaaaatccctctgtttgttctttgttacttacctatcttaaaccaaaaaggcagctttttaaataaaaaatagccttccacgcaattatggaaagctatttgcaaaagttctattgttcgctggctgccttttccggcaagatcaggttcaagagaatcccgaagacagtagccaaaccgatgctggtcagctggaatgagccgatcttgaggtaggtgcccccgatcccgataaccaggatgacggaagcgatgaccaggtttcgcttcttttcaaagtcgaccttgttgtcaaccaggatccgcaggccgttggccgcgatcatcccgaagagcaggaaggagatccccccgataaccggagttgggatggattcgatcaccgctgacaccttaccgacgaaggagaagacgatggcgaagaaggctgccccgcccaagacgaagacgctgtgaaccttggtcatggccaaaacgccgatgttttccccgtaggaggtggttggcgggccgcctaaaaagccggcaatgatgctggaaagaccgtcgcccagcagggtccggtgcaggcccgggtcttcaaagaagttccgcttggtcaatttgtttaagaccatgatgtggcccatgtgctcagtcatagtaacaaaagcaattggcgccatagtgatgatggcggccgggtaccacttgaacttgtaactgacgcctaaaacatcaaaggcgggcaaagagaaccacttggcgctttcaacgccggacaggtcaacgatcccgcagaagagggccatgaggtagccgcagatgatccccagcaaaaccgggatcatgctcgggaagcccttcaaaaacatgttgaagataatggtaataaccaaggtaaaaatcgctaccccgaagtaagtcaggctgtacttaccgctggcgttgaacatggcgtcgttagccgcggtcgtcgctagtgacaggccgataacgatgatgatcgggccaaccacgattggcggcaggatcttgtccagccagcgggaaccgaagcgggcgatcaagagggccacgatgacgtagaccagaccagccgcgatggccccctgccctacggccgggtagccgtaatttttcatcaaggcctgcatagtagcgataaaggcaaaagatgagcccaggtaggctgggatcttcgcctgggtgcagaggatgtagaccaaggtccccacccctgaacagaagagggcgatgcttggctttaagccgattaaaagcggaaccaggacggtcgaaccgaacatggtgaagaggtgctggattgagagcagcagccagggaccgaacttcggcttgtcctggacgtccaaaaccgcttcagggttccggaatgtcttgtcttctttcaaaagaaatcttcctttccaaatactggaacccggaacagaaatgtccttgtcagcctcacgggactgaatttaaaggttccttaacaattgactactttagcctactaataatattattttttgtcaaggaagacgaaaaagccgcggctgacaaagcttcagccgcggacttgaactatctaaggaaaaatatggtttattggaatagattaaggagtattttaatgacaattaacgggccggactgatgaagtattccggcttgcagatcttggtccagtcaacgaagatcttcttcatcaggtagccaaccgcgaatggcacgactacccagacgatgaccagcaccagcacgttgtggaagccggcattgtaggctgctaaaggagaaaccgccccgatcaggccgaaaccaccggaagccggggtcccctgcaggccaaggattggcacggagagagttgagatagccgctgttaaagcaatcgggatcccgatcactgggtatctcaggaagtttggcatcatcatcttgatggcgcctaagaagatggcaacttgcacacctggcttgtcaaccttcatggttgcccagataaggaaggcagcggtacttgccagaccgaaaccagctgcggcagaactcatgccggccaggccgatggccacggagatggctacagttgacagcggggtaacgatgatgatcgcgaaggacatggcgatcaggatacacattgggtatggagccagcttggtgaaggtgttgatcacgtcaccgatggccgtggttaccagggatacgtaaggcttggtcaagctgcccaggaaaccgacgccagtcccggccaggattgggaagaagacgatccccagtgagccgaaacggttgccgacccacttgatgaagagaacagcaacggctgccgtcagcatggtgttgataacgtcccccatcccagctaattggaagctggtggtagttacgcccttaaccgtggtagttaccgcggtcacacagccggagcccaggaaggctgccccgcccacacaggctgcttcagtatagcccaggttgaactgcttggcggttgagaagccgcacattacggcaaagaagtattggaagacggtcacactgtgcaaaagattggccacaatcgcgttgcttcctgcgaagggagtcaagaaggttgacaaaatggcacttggtaaaagtgacacgataatggcagtcgctgaaccattaaggactttcatcgtaaatgatccaactgtttcttttgtttgagttgtttcagacatatagtctccgcctcctaacggtagaaaattataattacattgacacagattatgagatatctaatatcgattaatttttctctcataaactgatgtcttgaattatagaggaagctcccggcctttgcaatgcttttcgtcaacactttcataattttcttattgaagagcaaaaatccgctttctttttctggatactttattttctttgaatttttgttaaaaaccagcatcttttaccaaaattaaaagcaaagagcaataagctaaggcggaaaaaagtatgaaaaaagcagcaaaaggcaaaaagaaaacccctcacttccgtgaggggcagatatgacccgggcgagatttgaactcgcgacaacctggtttaggaaaccagtgctctatccaactgagctaccgagccatacaacacattttattctacaaaaaatgtgttgaaaaagctagtgctttcgcttaagtcattagtattgcggcatgaaaaagcggcggggttcatcagtctgcccaatctggtcagccgccttgacaaagggcaaccaaatcaagaccgcgatgaccaggttgaccggggacaagaccagggcccgccagtcatagttagtggccagataagggccgatgaccgggggcatgatattaggcaccgaagcctggacccggttgatccagcccagcttggtcgccagataagccaaggaaacattggctagaggagccagggtaaaaggcaaaaagcagaccgggttcaagatgattggcagcccgtagagcatgggctcattgacgttgaagacagccggagccagggccaccttggccaaagtccgctggtcaccccgcttggaggtcagcaaaatcgcgatgactaaaggcaggcagaccccattgacgccaaagaccacaaaagaagtattggtccacaaatacgggatcttgtggccgttagccgccgccaaaaggttggcgttttgggccgtagcccagatcgacccgacaaccggagctaaggcactggccccattgatcccgaaaaaccagaagagctgggtcaaagccgtaatagcaatcaccatgataaagccctggcccagtttcaaaagtggcagctggatgatctctaagaaccagtcgccaaaatactggccagtaatggtctggaagagatagttcagcccgcccacgataaagagggccagcatgaccgggatcgctgcttcaaaggccgcgatctgggccgggggcatagccgtatggatatgcagtcccagccgggccttgactcccaggatgtacagggccacgcccaggccgccaaaaagaatggccgtaaacatccctgtcgttgacagctgcttgatgttaaaagcctggtccagcttaatccgcttattcccctgcatgaggtaggaatagttggcgatgctcatcatgaaagaacaaagagccgtcatcgacccggccaaggggtccacctcacaggccttggccaattggtagccccagctgaggacgaagaagagggcaaacatggccacgctcccccgccagacgaagttgcagatggagatcgatggctgcatgagctggtaaaaaacatgccagccccagttgcggttggcggcaatgatgaggctcttgattaaaaccgccaccgacccggtcaaactgatcggcagggtggaaataaaagcatccctgagggccaccagccagcggaccgaggccagattattggccaagggcagcaggtgccgctccagccagtcaatcacgctattcactttgcttcttccccttcagataatgcgggtgataacccttgttcttgtttttcttcttggacttctttttcttcttaactggctgctcaattacagctggcttgtctttgtcttcagccttttccttcttgaccggcttttctttactcaagtggtagccggcaaagtagacccggtcgacggtcacttccccttccaaaagcttcttcagcttgcgcaggtcgtggtcgttacccagagacaccaccttgccttcctgctgcatccggccggtccggcctgcccggtgcatgtaggtgttggcatcagtcgggatttcgtagttaaccacataggttagttttggaatgtccaagccccgggccgccaggtcagtggccaagagcagcttgaccttccccttggccaggtcccggatggcctgctggcgcttgtcttttgagaaattattggccaaaacttcaaagcgggtcttgctgtgggcaaaaattctggcaaagcgcagcattccctcatttgagtcaaagaagagcaggccccggaagccgtccagcttgcacaagcgctgcaggtattccagcttgtgctcattgtccacctgcaaaaagacgtgttcagtctggctgccctggtcggggcggacgtcgactaaaaggaagtggcgggcaaaaatttcttccgcctcttgggtaatctgggattcagtggccccaaagaggaggatctggctggaagaaggcaggttctgccctaaagaactcaaaagctccagcttggcgaattccaaaatgtcgtcagcttcatcgatcaccagggtcttgatctggaccagtttaatccggcccgaggagaagaagtcaaagaagcggcccggagtgcagaccaggacctcacaattgtccttcttcagccgttcgtcctgtctttgccggttgccggccccaaccaaggctaaagtcttcagacccagggccttggcaaaaggcaggatggcatttctgatctggacggccagttcagtcgttggggccaaaatcaccagggaatttttatcccccgggatgacccgctctaaagccggcagggcataggccagggtcttgcctgtccctgtcttggccaaagcgaccaggctggccccattcttaatggcctcataagtctctttctggatcaaggttggctggctcttgccttccttttgcaaaactgcttgaatttgttctgtgtaaatcattgtgctaattgtccatacttttctttatattgctggctggtcccgatataggcatacatgacattcttgcagccgatcccgctgactccggccacgtggcccttttccgtatagcgccagaagcagtagtccagcttgcttggcgctgacgccgaggtagccaggaacttgcatcccgccggaaaaagcttcttgtacttgaccggggcgttgaccataatctcatgactcttgaccagggaataggccagcttgctcatcgccgttaaattggcggcgctggggtcatcttgcccgctgtccagcaggatgggcaaggccccccaatgcccagccgccaggcgcttcgcccgggataattgctttgccgcatttttctccccttgcacctcaatgatgctgccataggccaatttggtcttggccaccttctcgcgcctggcggcaaaattctggtcaaccggcagataaacgaaagacaagccgcccttttccaggcggctgaggtcaaaatctgcctggctgaccttcaggccgaccgcgctttggctggctccttttggcagggtcgtctggctggcataattgtacaggccatatgccaaaaggctgataatcgcggccagcagaatcaaaagggccggcagtgtcgccggatgctggaaatgctttttttgccccatcgctcaaaacctccttctaccattttagccgagaaatccgcctagaccaagcagaaagatttcttgtataatttaagggttagacttgttttactggaggtatttcgtgaaaaaacagatttcttttggccaggcgctggcaaccgttatcggctcagtcatcggggccggggtcttctttaagatcggcagcatctcccaaagcaccgggtcggcctcagccaccatcttagtctggcttttagccggagtcatctcgatctgctcgggcttgaccgtgtcagaaattgcggccgccttgaatgtcaacggggccattgaatacctggactacagctatggcaatatctggggctttctcttcggctgggcggaaatgactgtctacttccccgcccagatcgcggctttagcttcaattttcggccagcagttcgtggtcctggcgggcctgccggcctccggtagcaagtggatcgctgccggcgtggttcttttgctctttttgatcaatatgctggggaccaaggcttcagcctggatgcagtcggtgatcacggtcatcaagctcatccccctctttttgatcatcgtctttgcaatcatccgcccgcaagtctccgtcagtctctggccagttacggtggatagcagtggcggctggctggccgggatcagccaggggctcttgtctgccctctttgcctttgaaggctggatcgtggtgaccaacctagctaaggaaatgaagaatccgaaaaaggacctggcccgggccatcatccttggcctctccttggtcacggtcgtttacgtcctggtcaattacgcctttatggcggttttgccttttgacaagatcatcggcaacgacaataccgcctactacgcttctcttaagctctttggccaggccgggggaaaaatcgtcacggtcggcattctcctgtcggtttacggagcctgcaacggctttatgctgacggggatgcggacgccatatatcctggcccaggccaaccgcctgcccggctctgagaaattggccaagacttctgtcagaagtggagtcccggtcttctccgcccttttgatcaatgccatcgctttgatcatgatctccctgggtaactttgaaatcttgaccgacatgctggttttcgtcatgtggaccttcaccaccctcctgtcagtggccgtcattttgctgagaaaaagagagccggacctggcccggcctttcatgacgccggcttacccggtcattcccttgatttccatcatcgggggtctcttcatcatcgtgatgaccgtcatcaaccagttcgccctctccatgattggcctgggcatcaccctcctgggcctgccggtctactactggaaaaagcttcattagggcaaaagaaaataacagacaaaaaaatcaagcaaaaatggaccatccgtatggatgatccattttcttttaggaaaaattagtcgtgttcgtgcttgctgctgaattcttcaacgacttctggcttgatgacgccgatgtaaggcaggttccggtaaagacccgcaaagtccatcccgtagccgatgacgaattcgttgcccacgtgggtgccgtagtattcaacatctacttcagtcgtccggcgggccgtcttgttcagcaagacgcagcacttgactgagttggcgccgcggctgagcagttcgtccttcataaacttcaaagtcaaaccagtgtccacgatgtcttcgacgatcaaaacgtcccggccagtcacgtcagcttccaggtcatgggttaccgtgatcttgccgctggattcagtcccgttgccgtagctggaaacgtcgatgaagtcaatgtcgcaagccaggtccatttcccgcaggaggtcagtcagaaagaagatagcccccttcaaggcaccaacaaccagaacccgcttgccagcgtagtccttggtcaattgctggccaagccgcttggtcatttccgcgatgtcttcttcgctgtacaacttgtgatcaactgcgtcatgaatacttttcattaggtttcctcgattgctaattgctttcaaaataatatatcaagattataccattattttaacaaaaaagaacggattttgcctaaaaaccgttcttttttctgaatcttattcttcttttttagcttgatcgtttgtctttggcccttcaacgatgaaccagcgcatgaaaccttgctggatatcgtccagggtgaagcggaagccttccagttctattgactctcccttcttcaagtcgggataccgttccatcatatagccgccgatagtgatgatgtcactgttctggaagctcttgaggttctggtggaagtagcgctcaaagtcataaagggtggtcttgccggagacccggatattgccttcggcgtccttgataatgtagtcatcagaaacgtcgtcgatttcatccttaactgacccgaagagctcttcgtaaatatccttgtcagtcacgatcccgctggtgccgccgtattcgtcgacaaccagcacgattggagtgtgcttgctgatcatcaagcggaggatgtcctggatgggcatagattccggcacggtaatgatggtccggttgatcctggttactggtacccggtcgtcaatccggctctgctgaacaatgtcataagcgtagacatagccgaccacatcatctttgtcattttctcgcactaccgggaagcggctgtagccgtcttccagatacttgtccagggcagtcttgatgttttcgctggcatctaaaactgtcagccgggtccggtcagtcatgatgtccttagccgtcttgtcgttcagctggaaggctctttccatataggtcaagtcttccttgtccagagcaccgccatgcaccgcgttcttgctcaagcggatgatttctgactgggagtagacctggttttcttcatcggccgggttaaagcccagcatctttaagatgccagaggagctgacgttcaaaagccagacaaagggataaaccaaggtgtggaagagctggaggggattgacgatccacatcagcatcttaaccggagcatcgatggcgatatttttcggcacgacttccgtcaaaaccacttccaagtaggtcaaggcaatgaccccgatcaaggctccgactgagttgaccagatttttggatatgggggtcagggccagcagcctttcaaaaatgctggcgatggtgtccgccccgaaccagcccaggataaccccgaccaaggtagtcccaacctgggtggttgacaggtactcatttaaattttgcgacatgtgcagggcccgcttaagtttcttcacgttcccctgcccgttggcaatcatgtcctccagctggctgggccggacttgcaccaaggcaaactccgccgcgacaaagaaggaggcaaaaacaaagatcacaccgattgctagtaaattaatccagatttgtgttgtcgtcactgtaattcacctattactccaattgaactatttacctttattctatcatcatttgcagagtttttttcacgaactacattaatcccggaaaatattaaacgggctgtccgggaaaatccggacggcccgttttaactgcttattcttgttctttttccttgtctgccttagcctgcttcttcttcttccgcttcttgtgccagatgaagatgatgatcgccaagaccggtaaaaggatggcgatgatgttccagaagaggcggttccggattctctccttagccttggcttcggccttttgattgtaaggaatccggtgaccggtaaccagcaaacggtgagtgttgatcatgtaaggagtgcaggtcatcaaggtgcagaggtccttgcccttgacaatcttgagctggtcgacctgggtcggcttgatgaccttaatctggtccaccttgtaggccagggtctgacccagattgtggacgtagaagacgtccccctttttcatccggggcaggtcagtgaaaaggaggcgggaatcccgacctgttttaccatgttttcgcttttttagctagccaaaagaaaaatgccgtcccttgcggaacgacaatttaataattttttcggaattatatatgctcttacttgtccaggccagtccacttccaagaagttacttctggaatgtcttcaccgtggtcccggatgtaagcgtggtgcttagacagcaggctgtccatcttgtcaatgaaggcagcactcttgtccttcaaggctgggatttgttcaaccgcgtccttggccaggtcgaaacggtcaaggtggttcaagacccgcatgtcaaatgccgtggtaatgtcaccattttcttcatagcagtgaattgaaacgttgtaacgcttgcgggcaaaccagatggattccatcatggtcttgtagccatgccatgcaaaaatggttggcacgtcagttgggaagaggcggtcgaattcctcttgggaaatagcagctgggttatcctttggcgccatcagcttcatcacgtcaaccacgttgatgtagcggatcttcaagtctgggaagttctggtgcaggatatcgatcgctgccagggtttccatagtcggttcagtttcagttgaagcgaagaccacgtccggcttggcatccttgtcagttgaagcccagtcgatgtagcccaggcccttgtcaaccagcttggcggcttcttcaggagtgaaccattgcggccgttcctgcttggaagttaccagcaggttgatcccttcccggtcacggaaggccttatcagctacagccagcaaagtgttggtgtcagctggcaggtattcatgaatcatgtccggccggttcttttcaaacaagtgggtcaaaagacctggatcctggtgggtgtagccgttgtggtcctgctggaagacagttgacgtagctacaaagttcaatgatgggtaatcgcggcgccagtattgttccttagccttccgcagccacttcatgtgctgggtcagcatggagtcaaccacccggccaaaggcttcgtaagtagcgaagaagccgtggcggccagtcaaaacgtagccttccagcatcccttcatcttggtgctctgacaattgtgagtcaatcaaacggccttgcgcagccaggttttcatcgtttggttcgtggatttcactttcccattgccgcttttcgccgtccaggaagtcaaacaagcggttggacttggattcgtccgggccaaagccccggaaagtagtcgggttcagttctgccaccttggtcaggtacttggcccattccaccatatcctgggcgtccttggagcccggcttgccaacttcaaaggcaaagtcgcgccagtctggcaggttcaagcgcttaggattgatccccccgttagtgactgggttcatagccattctttggtcaccatgaaccgcgttttgcaggactaagtcagtcgggtagccggtttcgtcaaacagttcttccggcttgtagctcttcagccagtccagcaacagttccttgtggtccatgtgcttctggtcaaccggaagcggaatctggtgggcccggaaggagttttcaatcgggttgccgtccaaatcggccttaggaccagtccagcccttcgggcattggaagatcaagagcggccagtgggcaaatgattcatcgccgttttcacgagcattcttttgaatagccttgatgtcttcaatgatggcatccagggtcttggccatttcctcatggatctggtcaatatccttcatcccgtcaaagcggccgcccttgaaagttgaaacgaagtaaggcttccagcccatgccttcaaagtacttggtcagttcttcatcgctcatgcgggcagtaatggttgggttggaaatcttaaagccgttaacctgcaggattggcaagacagctccgtccttgaccgggttgatgaagcggttggagaaccagccagcagccagcgggccggtttcagcttccccgtcaccaatttcagcggcggcaatcacgtccgggttgtccagaatcgcgccagtcgcgtgcgacaaagtgtagcccagttccccgccttcatggattgaacccggggtttccggagccgcgtgggaagctaccccgcccgggaagctgaagcgcttgaagagcttggtcatcccggtttcgtcttggctgatttccgggtagatttcagagtaagacccgtccaggtatgagttggaaaccatcacctggccgccgtgaccggaaccttcgatgtagaacatgttcaagtcatacttcttgataacccggtttaagtgggcgtagataaagttctgcggcgcgatcgtgccccagtggccaaccggcttgatcttgacgtcgtctgccgtcagttcttccttaagcaaggggttcttgagcaggaacaactggccgactgacaagtagttggcggcccgccaccaagcgtcgacgctctttaagtattcttttgaatcgtaatctgctgtcatctttttactcctttgaggaactctctgttttacttgtttcaatcataccatttacaaaaaataagtcaatcaatctgataattggatcctaccaattttataaatccttaagatactttgcaaagaagaaaagacagaagatagaaaagatagaaaaagtgaaaaataaaacggacaggtatacctgtccgctttatttactcttaattcaaattgacaaagctgttgaagcgcatgtacttgtagtgaacccgcatgctggagacttcaaatggcgtgccgtcatccaaaaagaagatcccgtccatcacgccaaccggctcagtggccttgagctgcagcgcttcttggtcttccgcgcttgaaggggaaaccgtaatggtcaaataagaccgggtgaccgccttgttttgcgcgtcttccaggtagttgaacaaggacccctgcagaatctcttctttaagctccggcaggatcttgatcggcacgaagccttcttcaatcaagaagggctggccgtccaaaaggcggaggcgcttgaactggtagacaaagtcattttcactcaagaagaggtcctgggccgtttccgggctggccttgaccaccttgaattccagcagcttaatcccctgcttcttgcctggcgctaaaaagctgtccgtcaagcccaggttggacccttcatagcggaacatggcctggttcttcaagtacaaggggttgataaaagtcccgctgccccgcttcttaaaaacgatgccttgctgggcaagaagttccagagcccgcttcatcgacgaccggctgacctgatactgttcggccaggctgcgctcgtcgggcagccgcatcccttcatattcgcccgctaaaatctggcgtttgatgtcaagcatgaccgtccggtaaacataatcagccattcagccacctactttgcttgcgcgattgcagccaggaaccagtccttgaaggcctggcggtcaaccttgaccgcgatcttggcgttggccttttggccaaagaagccttcaaagtccatgactgaagccccgtaagtgtaagggcccttggtgtctaccgccacgtaagcttccttgacttcaaacaggtccggcgccagcagcatggcagccgtcaaggcgtcatagatccgcttgccagaatcggcgtcagcgtcgtttaattcatattgggagttgagcccgtagatcatttccccgacccggcccaaagccttgatttcttccaggctggccgcgtcaacgaaggcctggttgccgacttccaaaggagccacgtagatgtccaggcccttggcgcccaagtcaaagacgatcttggctgcttccgggtccccggaaacgttatattcgtcgtaaggaccgtagttgccccggcccaaggctccacccatgatgtaaaggcggtcgatcttgtccaggtcttccggatattggcggaagtaaagggcaaagtccgtggctggcccaatctgcatcaaggtcaccttttccgggctttggctgactacttcgtggatcttggtcgcggctaagccttctaccaaaaggctctggtcagcttccgggaagtcaaagccgtccatcccgctggccccgtggacttcagaagcatcgatggcttccttgaccaaaggcaacttggccccggccacaactgggaccttagtgcccaggaaggcctgcaggcgcagggtgttgttcaaagtcttctccaaagaaacgttgccccaggttggcacgatcagcttcacgtccagttccttggcgaacagggcgatcgttaggcagaccgcgtcatcgatcccgggatcagttgaaataattaagggtttcttgttcattaatcgttctccattattcagaatagctttattctatcatttcacccggcaaataaaaagaaaagaagcggttgcttcttttccaaaaaaattctttagcgactgcggacttcaatctccccgttgtcgcgggcgatgatgacctggtcgcagatgtttaaaaagaggccgtgctcaactaccccgaccgtatggtccaggtagtcagccagaccacttggcaccggaatccggtccagcttgaggtccagaatgtagttaccatagtgggtcttaaggcgctgaccatcttccgttaaacggaattccggcttaagcccttcatctgccaggcgcttttccacctgcatgcaggagatcggcaaaacttccactggcagggcaaagccgctgaggtggtcaaccaccttgctttcgtctacgatccagacattcttcttggagttgacggccacgttcttttccaaggtcaaggcggccccgcctcccttgatcccgtttaactgcttgtccactctgtcggccccgtcaaccgttaaatcaacctggtcaacttcactgagggggctgacagtaaagccatagccttccagctgcttttgactgcggctggaggtggtcacgactgccttaagagtcaagcctgctgctttcttcttgcccagttcatcgatgaagaacttcaccgttgacccggtgccgacgcctaaaaccatcccgtcttccaccaaggcagctgctttcttagcagcagcctttttcaatccatcttgctttgcttggtccattttttgcctccgctatttttccaaaatgcttgtcagctcagctacctgcttagccactgagtcacggccgaagatataagagcccgccacaaaaacatcagctccggcctctttggcgatttccgctgtctgagcattgatcccgccgtctacttcgatcggaagatctggcagaattgcccgggcggccttgatccggtctgctgcttcttccatgaacttctgcccgccaaagcccggatagaccgtcatcaagagaacctggtcaagcttgtccttgtagcgctccagcaccttaatgtcactatctggactaaggaccaacccgcaggagacgccattttcctttaagtagtccaaccagtggtcaattcggtttgggtagtcggcttcatagtgaatttcaatcaagtcgctgcccgctttaacaaaggctggcaaaaggtcaggcaggttgttgctcatgaggtggacttccgcggtcaggtctgggaactgctttttaaaatcactgaccagctggggaccatatgacaggttgggcacgaaatgtccgtccatcacgtcgatgtggaagcggcggatcccgctgtcagctgcttcctggatctgctggcctaagtgcaggttgtccgcgttgagaattgagggtgcaataatcatctagtcacccatcctttactcagctaacgcagacgcaacgctggcccggtccgggatagaaggctgggcccccatcttctgcacggctaaagacgacgcccggttggcaaagcgggcagcctcatgcaggttgctgaagtcgctggccaaggatccggccaaaaagcctaagaaggtatcgccagccgccgtcgtgtccaccgccttgaccttaaaggctggtacaagaccggtaaagactggagaagacaggtaggcccccttgctgccgtaggtgatgatcacatgcttaacgcccagttcatgcagcttggccgcgttcttttccaggtcagcctcttctacaactggcaaagaagtcagcagggcactttccgtttcgtttggcgtgatcaagtcagtcacggccaagaggtcaactggcaggtccttgatcgcaggagctgggttcaagatagttaccttgccggccgccttagccagcttgaaggcggctgttgttgcttccagcggggtttccagctgggcgatgacgcagtcagcagcttcaatgacgtctttagccgccaaaacgtcggcttcagtcaagctgtagttggccccatggtcgatgataatgtcgttttgcccttccgcgttcaaggtaatgtaggcatggccagtcttaacgccagcggttggcaagacatagtcagtcttgaccccgtagccggccagttgctccttcatccagctcccataggagtcttcgccgactttagagatgaagatggtctcagccgcgctcttagcagccgcgactgcctggttggcccccttgccgccgccagcctcgctgaccttgtgggcgttgatggtttcgcctggcttggggaagttttctacatgcagggtcgtgtccacgttgctggacccgattactacgatctttttcatagcattttctccttaactttaattctaagtcaattataactattcccgtccttttaaaaaagcgctttagccgaccaactggtaggccgtcttaaagcggctgagattatagcggtcgtaaaggtcggccaggacaacgttaaagttctggatcctggtatttgggtctggattcttggaatcaaaacgttctgccaaagaagctaaggcctggcttctgacagcctcgtagtcgctcagctgatccacccgcccccgcaagtcccggcaaagagcgctgagggtgaagtctgactccgccgctaaaaagttcagctggctgtcaaagactaacttgtaacggtaagccttccggcccgggaagtcctgggagttaaacaaatccaggtacaaaaccagtttctgcttttccaagctggccaggtccttaccttgactgaggcacttaaacttcagaaagttgacaaaatagtcgtaaaagtccccgtaaaaatcttcctcaaagcgttcgatgcttgggtcttctgccagcagctgctttgccagcacttcttcaatcttcatttcatgctcctcgtctattttttctcttgttcctattgcgtttatagtcgtctaagaaaattatacctgggctgctgcttgaaatgtagttccaatttcttaacaaaaaaacgcgtcaactgacgcgcctttttgatcaattattttatggatttaacttaatgtagatgcataagccggcaaccaagagcaaaaagccaccacaggccagaaaaatcgccttttgccagcctttagccaggtggtcacttgcaaaggaaaacagccaccaagctaatgtcgcaacggctgacatccacaaattgtgctggccgctcgcaaaatcaataatcatgaatactgctactaaaagtatcggtggcagcaagtacaaagtcaactttttactcattcaaatccctccccttatttttatattaacatattataacgataatataactgacaaactaagctgtcaatcataatttgccatgtttacagtcatctaaggaaaattatacagaaaaaggcaggccctaggacccgcctttaccatcttttgaacttttgtctcggtcattgaaatcttgcaaaaagctatggttaaacaattctcctctgatttgttcggcccgctggtcagactccttttgccagtcagcctgcagattccggcgatacctcaagtaattggccatccgcccggtccggctcaaaaaagcctgctgcattttgctggagtccagaaaacgctggtccacttctttttccagcaaattcccgtttccatcaaagcggtagccgccccacatgtgctgcttgaccgggttcatgggcaggctgtcgacatagtgcagcttgcccaccatccgcttgctggccgtaaagcccaaagtcaccgggtcatagatatcaacataagtattgattctgccccgcagctgggccagcagctgccgctctttatgagttaaaaggcgccagatattggtgccttcatagagataagcagcagcaatctgatctggaaagcggcaattagccagagcgtattcagcattgatcgcccctagggaatgcccgtagatgtaaaaatagccatccgggaattcctccagccagcggttaagatagcggctggccgtaaccaaggcgctgggcacctgcctttgattagtcagcatagccagaaaaatcggccagttggtgttcagccactcgtcccgccaggttgtcgcgttgcccttcttaaagccataagagcccttgaacaagactgtaatctcattgttgttttcgatcaaaaaagcctgcattccgtccttggcgtaaacgtcccgggtcaattgcccgatctttttgccggcgactacaactgtctcgcccacattcagcgcctcataagacagcttggtcagttccacccggtccaggtcggtcaattcttcattgatcattcttcatcttcctcgccttgcaggtatttggcaaagcgggcatagtcggcttccatctggtcggcatacttgacggcccaatgagccaggcccgtgtccagctctttttgcttgtggacatagccgtaaatcatcggcgctgtcgggctttggtagtgagcaatggccaaaatgaaggcacacatgttgcagtaggcagagaagctttcctggtccagattgagcgggtcaatcgagtccttcatgtcccggaactgacggacgtaaaagcttctgccgccagcttccatggcccctaagaaaggatcatggtaggtctgcaaaacccgctgggcggtaatgatccgcttgccttctcccttgccttgggcctggctttcctcaaccgtcaaagcagacaagttgtagcgaagcggcaatgcctccttgatctgcaagaccaggtggctgccgtccttgccagtgagcagggccagatagcagcgggttccccagctgccgacgcccacgctgtagcggatgatgtcggtcacttcataattgatcaaaaggacccggatgtcgtcagttacgctcttctggtaatcttccaggcctgccataagctcggcataaacattctgggaaacacgccgggcccggggcgggttttccttaaagcgcaagcgcccgtcttcggtcttttccgtaaacttcttgaccacggcatcagaattgttcttcggtgcccggtccgctaccttcaagagaacccgcttcatttgctcattgtccgtcatttgacctaaaaggtcatcaacgctataagacaaattaaagcgctcaagcaggggcaaggaattggcgtacttgattccccgccggtaagagtggacgctttctgccaaaatcccgtccagctgctctttaggatagccattgatccggccggtcaaaaccacgctggtcaaaaggcgcttaaggtcaaattcccagttgccaatccgggcctcgtcaaaatcgttcaagccaaacaaaagctggcgctccggggaagcgaagaagccgaaattggttaggtgggagtccccgcaaatgattaccgggatatgggactggccgtctggaaactggcgcaggtccttttccatgattccggccgtggcccggaagtaggaaaagggattctgcatcatccgcttgtgccgcatccccaaaagctcgggaatcattttctcctcagtcagcttgatcaattgaaacacgtcccgcttgaccgggttgaaagtgctgatcgccgcaattggatgttccttacggcggccttctccctgcttgatcagttcttcctggctgtcaccgataaacatttgatcgattttaaaagtttcgatttcgtggcggtctttttccatctttcagcctacttttcgtcgtcttccaattcgctttcctgcggcttcatagcttcaaaagcgtccttcttcttcgccttctcttcttcttcctcttctttaacggtccgaaccttttcatcggcttcagcgatgaagtattcctggctgttgaatggggtctgtccccgccggtcagcgtgcacccattcggtcttgtgcaggattcgggcctggacattgtcctgccacatcttggcaaaaatatccaaaactctttcccgcaagtcttcttgcaaaaccgggaatagggtttccacccgccggtccaagttccgccgcatcatgtcggcgctggccaggtaaacgtcttccttgccgtcattgtagaagtagtagatccggctgtgttccaggaagcggccgacgattgagtgtacttcgatattgtcgctgacgcctgggatttccgtcttcaagcagcagatcccccggacgatcaagtggatcttaaccccggccgcggaagcttcatagagcttggcgatcacgtccgggtcagacagggagttcatcttcatgtggatctcagcatgccggccagccttggcaatggcaatttcgttgttgatcttttcatagatgaactggcggatcaattttggtgaaatccgcagctcgctgaagtaaggcggcttggagtagccggacagcatgttgaagagattagtcacgtcaacgcccagatcccggtcgcaggtaaagaggcctaagtcagtgtagaagtgggcggtaacgtcattgtagttaccagtccccaggtgcaggtagcggcggatcccgtcttcatcgcggcggataaccagggttaccttggtgtgggtcttcaagcccaccagcccgtagataacatggcagcccatctgttccagggttctggcccagtgcacgttgtttgattcgtcaaagcgggccttgacttccaccagaaccgtcacctgcttgccagctttagccgcctggcccaggtacttgatgataggggagttgccggaaacccggtacaaggtcatcttgatagccagaacatctgggtctttggcggcctgcttgacgaagttcaaaacagcgtcaaagctgtcatatgggtgctgcaccaggtagtccttttcccggattgagtcaaaaatattgtggtcacttcttaaagccgggtcaacaaaggcctgcattggcttgtagcggaggtcttcatggccttccaccatccctggcagcttcttgaggaaggtcaagtcgattggaccgttaatgctgaagacgctgccttcatcgacgttcagtcgctttatcaagtgcttgagcagcttggtgttcatgctgctttccacttccagccgggtcacgtgcccgtgttcccggtcttccagctgctttttaaccgccaaaaggaagtcggaagtgtcgctttcagaaacgtccaaatccatgtcccgggttacccggtagcaggctgcctggcggatttcgtagccatcaaagaggcggtcggcaaagaccttgataatgtcttccagcatgatgaagtcattatcgccatctggcaatttaaccaggcgcgggaagatgttcggcactctgaccgtggcaaacttgtgctcaccgctttcccggtccttaaggcgcagggcgatgttcaaggagtcgttgttgatgaacgggaatggccgggactggtcgtcagccatcggggtcaaaaccgggtagagttcgtttgagaagtaacggcggatgtattcttcctggtcttcagacagttcatcactttccaaaatgttgatcccgttcttgcgcaaaagcggcagcaatgaccgggagtaagttgagtagcgcttttcaaccacttcgtgttccttatggttgatggccgtcaattgttcaagtggcgtaaggccactggcatcgtggcttttgaccccggcggctaccagcttgctcaaggaagccacccggaccatgtagaattcgtcaacgttggactgggtgatccccaggaagttggctctttccaaaagcggctcatccgggtttctggcttcgtccaggcagcggtcattgaagtccagccagctcagttcccggttggcgtaataactaggatcggtaaacttttttttgttcttggcaattgtcattttttactttcccctcttctgcttcatggcaatcttcatgccgaagactgcttcagccaaattgacattcttttcaaaaacccagcgttccaaggtcaggtcccgcttgctggtcaccgtgatcagcattttctcatccttgatggaaaccacgatcttgctgatcttctgcttgcgggaagcatccaggctgttggccaggcgcaggatggcagccaacttagctacccggacctgcagggccgggtcaaggtggcgatattcacgttcatcagcgttcaagttggtgatgtcctggtgcttcaaaatgctcaagagcatttcgttttcccggtcagacaggccgatgatctggttggcccccacgatgtaggcagcgtgctcgtagtggttgtggaaattgacgaagttgccgatgtcgtgcaggcgggccgcgatttccagtaattgccggtcgcggcggtcaaccatgccggcatgggccaggcggtcaaaaatatgcagggcaaacttgttggacaggttgatgtgctggccgcctgattcgtagcggcgagcaatatttttggtcgccgtcaaaacgatggttgagtattcatctggccggtacttcaatctggcggcttcctggatcatcaaaccggtgatggctgaagactgggtcaaagtcatcgtgtgcggcttgataatcttaaccagctggttgatcaaaacaatggtcggcttcatccgggccaaagagtcggtatccagctcgtatttttccataaggtactggtccggggcttctctgaagtcagagtaaacgccggcaaactgcttgaggtcgatgacccggtccttttcttggggccgcaggctctgctcgcctcggccggagacgtgctggatgatgatccgggccttgccagtcggcttctcaatggtcttgaagctgaccagcttgcgggagatgtagtcgccgatgatgtcgatcgggtcgcttggcgtgtcccgagtcatagcggccatttcttcaatttcttccgggcccagggcaaagttccaggttgacaggtagtgctggcccttgaacaaggtgaggttgatcatggcactgcccatgctgagcaggtaagtaaattcatcatccgccagttctgagaactgcggcagggccattccggcaatgatcttgtagtaggcgatctgggccccgttcagccattcgatttccaggccggttctgaccttgatctggtcggccaggtagcgggcagaaatcttgtccaaaagctgccggttaccgtaaaccttgtagttgtcgatcccatattccgcgatttttcgcttgaagccgatcaaggcatcagtcaagcggggcagttcgttttcataaacttcaaactttttccccccttggacgaactgggccgaactcaactgttcaatgatggccagtctcttcaagtcaacgatgaacaggcgcgcctggtatgatgatatgtaaattagaccaaattgtcttttactcatatgtctctcctctggttgctttcaaataattttaaatgagcttaaaagctcagctgtaagcgctaagtcacctatttcaattgtacaaaaaatctgccccttcggcttctttttctaggcaaaaatctattttttaacataattttacctggaactaaaaaagcagcgggttcaaagtcgaacacactgcttaagttggtaaaaattattcgcttgccttcaagcgggaagaggacttgatgttgaagccaggcacgccattgaaccacttcttcatcaagcgggcgtaagtcccgttcttccggagtactttcaaggcctggttgacctcagccgtaaacttgtcttcccccttcttgatgccgatcccgtatggttcaaccgtaaaggtatcaggcagcatcttgaacttgtccttgtcatcagaaatcaagccggccaaaacggcgttgtcgctaaccatggcgttggccttgccggcctttaaagcattgtagcaagaaccatagtcatcatagaagatgacccgggccttcggggcgtacttgtggacgtcgctgtcagcggtcgaccccttaacggcggcaatggagtacttggagttgttgaaatccttgatggagttcagcttgctctttttcggcacgatcaaggtttccccagccatgaaataagtgtcggaaaaattgatgatcttgcgccgatcgggtgtgttggtcatggtagccatgacagcatcgacgttgccgatcttgagatccatgatccgggacttttcactgatgtattcaattttcatcttgcctttaggaccaaggatctgcttggtaatagcccgggccaggtcgacttcaaagccggtggccttgctgctgtccacgtccatcatgctgaacaggcgggtgtcggctcgcatcccccaggtgatggtgtttgtttgcttaacccggtcataggtgctgctagattgactgtgtgaacaagcggtaaaaactaatgataacagcaagaccgccataaaggcggtcagctccctcagtttacgtgccattttttctcctcggcaataaacgcggtttggttccttcgtgcttagtacttgatgcgcttgctcaagtagttggcaaagctggacagggcaaagcagatgataaagtacattactgccacggccaggtacatcggaatcatgtaattggtgttttggttgtaaataatttcagcgtggtagagcagttccggcaaaacgatgatcgtggccagggaagtatctttgatcaaggacacgaactgggacaaaagggccggaatcattttggtcagggcctggggcaaaaccacgtgggtcatggcctgcatgtaggtcatcccgtttgaccgggccccttccatctggccagggtcgacggccatgatccctgagcggacaacttccgcgatcatggctgattcaaagaccaccatggcaattactgaagcctggacggcatcaactctgatccccatgaccggcaggccaaagtaggagaagaagatgatcagcaaaagcggcaggtttctgatgatgtcgatgatcaccccgaccactttggaaatccgggtggtcttggcgtcgattctggtaaagcggatcagacccagggccaggccgatcacaaagctcaagatgattgaaatcactgaaacttcgatcgtgacccagaaaccctgcagcaaaaagcggaggttgatccaggataatgcttctgtaagattttccatttatgtgcctcctaaacgcccttcttttccagatactgcatgtagtagctgagcggcagggtcaaaaccaggtagaacaggctgaccaagacatagcttgggatggtctgaaaagtattggatgccacgatgtccccttggtacatcaagtcaaagccggctacgaaagccaggatgctggagttcttgatcaagttgacaagctggttgcccaatggcggaatcacgattctgaaggcctggggcaggataacgtagcgcatggcctgccagtaggtcatcccgtttgaccgggccccttccatctggccggtcccgacggactggatcccggagcggacagtttcagcgataaaagctgatgagtaaatggacaagccgattgtccctgcctggaagccagtcagcttcagcggcgtgtaagttggcaaaaccaggtaaaagaccatggtgacaaccagcaagggaatgttccggaagatttcgacatagaccttggcaaccccgcgccagaacttgttaggcacggtttccaggatggcaaagccggatccgatgatcaaactgaaaaacaaggaaatcagactgcagagaatcgtattccaaaaaccgagcaaaaaggtggaccagtttgctccaagtaaattcaacattaatattcagcctccttaacactgaatcctggaatgttgccaaaccatttcttgacaagcttgtggtagctgccgtctgccttagcttccttcaaagccttgttgatagcttccagcatcttggtctgccccttttcaacggcaatcccgtaaggttcaacggcaactgtgccgccaaccaggtgcaggctcttttgctgatcggcaatcccggccaaaatcccgttgtcagtggcgaccgcgtccccttgcccggctaagagggcattggtgcaggcaccgtagtcattgtactggcggatcttggccttgggggccaggcgggcaatatcgtccgcagccgttgtccccttaaccacgatggccacccggcccttgtggtttaagtccttgatcgacttgattggactgctggttttggtcatgagggatgtccccgccttaaagtaaggagtggagaagtcaaccgacttctttctctcatccgtgatggtcatggtggccagaaccgcgtccaggttgttgttcttaagctgcgggatcttggtttgggccgtaacttcaatgaattttgccttgccgtccttgcccaggatctccttggtcaaaaggcgggccaggtcgatttcaaaaccttccagcttgttggtcttgacgctcttgatcccaaacaaagccgtatcaaatttgacgccccaagtaatcgtcttgctgctcttgacgtggttgtagacacgcactgagttgtcactttcaacagcacaggcggaaagtgaaacagtggtcagcaacagaaaaagcagggcggcaactttgcggaatagtttcgtgtgtttcatgtaaccgctaccttcccttttattagtggtaaattaccttgctgaggaattcctgagcccgtaggttgcgcgggtgttcaaagaagtccttcgggttgtgggagtcttccaagacttgcccctgctcaaagaagatgacccggtcgcacacttctctggcaaagcccatttcgtgggtcacgaccaccatggtcatcccttcagcggcgatggactgcatgacgtccaaaacgtcctggatcatttccgggtcaagggcactggttggttcgtcaaacaagagcaccttgggcttcatggccaaagatctcgcaatggccacccgctgcttttgcccaccggacagctgtcttgggtaggagtcttctttgtccaaaaggccaacttgcttgagcagcttttcagcgatttcccggttttccttttcgtcccggtgcaaaacgattcttggggccagcatgacattttccaggacggtgtggttttcgtagaggttaaagtgctggaaaaccatgccgacattccgtcggatcttgttcaagtcagtcttcttgtcccccaggtcatagccgtccacttccaagacgccggaagaaattccttccaagccgttcatggttcttatcaaggtactcttgcccgcgccagaagggccgatgatggaaacgacttcgccttcgttaatgcttaagttgacgtcttttaaggcatggtagtcaccgtagaacttgttgactttcttgaattcgataattgctgccatagtggtcctcctcgttttattagcgcttaattaaatcaccgttggtttggctcagctttcttggcttaagccgtattgatcaaacaggcggctcctttggtaaaagttcgtttatttgctctgttttagcaaagcagccagatctttcggtcctttttaaaagcaggagccgaatcatctgggatgtgagcttgcccttctgctttcgtaagcggttatttttatttaagcatgattaatttttaattaaatttaccagaaagtaggctttcgtgcaagtcttttgtcagttccacttcatccttttagcttttttaataaaaagccgggaaacttgcttacttatcttaacttctttcccaaacattcttaatttcattttgcctcttctgagatattcttaattatagtagattttacctattttagcaacaactgtttctactttagaaacgagtaaccgctttaaagcccgttttttcacagtttgactagacccggccccggctggcctctataattaatagctaaaggagttttacaatgtcaaaaaagcaacaccccatcattattggtatcgccggcggcagcgggtcggggaagacgaccattgcccacgaattatatgaccagttcaaaaacgaccggatccggatcatcacggaagactcttattataagaaccacccggaaatgtccatggctgaaagaaataaaattaatttcgaccatccggatgcttttgataccgagctcttgatcagccagctgcaggacctgctgaatggcaaagccatcgagatgccgatctatgacttcaccacccacctgcgcagcccggaaacggtccacgttgagccagctgatatcatcatcctggaaggaatcctggttctggcctcagaagaattacggaacttgatggacatcaagatcttcgtcgacactgacgacgacatccgcttgatccgccgccagcgccgggacatggctgaacggggccggtcctttgactcaatcatcgaccagtacttggccacggttaagccaagctaccaccagtttgttgagccaagcaagcgctacgccaacatcatcgtgccagaaggcggggccaacgatgtcgctttggacatgctgaccacgaaagtccgcgacatcctccgccgcaatgatttagcagaaaaagaggtagaataatggctaagcagaaaccactcgtcattgggattgccggggggtcaggctcaggcaagacgacagtctccaaggaaatcagcaagcgcctgccagctgaccgggtgctcattctgactgaagatgcctactacaacgacaattcagccctcagcatggatgaacgcaagaagatcaactacgaccatcccaatgcttacgacactgacctcttgattgagcagctgcaggacctgctggatggcaaggcaattgaactgccgacctacaacttcaacatcctctcccgggccaaggacactattcatgttgagccagccgacatcatcatcctggaagggatcctggttttggcttcagaagaattgcggaagttcatggacatcaagctttttgtcgacgctgacgacgacatccgcttcatccgccgcttgcagcgggacacccaggaacggggccggtcaatcgactggatcatctcccagtacctgactacggttaagccaagctacaaccagttcgttgagccaagcaagaagtatgccgacatcataatcccccagggtggggaaaaccaagtggccatcgacatggtctcctccaagctcttgtccattatcaacggctaagaggaacaaaataacctcaatattttgaagaaaacaaaaacgcgtgaacttgcaagttcacgcgttttttctggcaaattttgattttagagattcaggtaagcaaaggtatgcaggccaatccaggcagtcagcagcatcaaggccagcaagaggccaaccgtgctccagtatgcccggttcatcttctttggtctgcttaaaattaaatgcgtcattttgctccccccttgaaagataactaacaatgttttttatcatacaactttaaggagggcttgtcacgcttttttgattatttttatcaaaaaaatgataactttacgaaactacttggccatgacccggtcaaagagcttggtgatcagcttgaccaaaaccgcgtcaaagacgatggaagaaatgatgcaggcgatgaacatttcaatcaagagggctggcttgtaggcactccagccgtaagttaagtaagacattacatagccggccaccgcgcagcagactgccccggtaatcaagctgccccagccgaagcggtcatagtttttcttcttcgggaagaagccgatttcgttgcaggccccctgcaccagcccttgcaggatggtcattgccccccactggccaccgaaggccatttcaaccgtagcagccagggtttccccgacaatcccggagccaaaggttggcacgaagtacatggccaaaggcgcagccatgtaccaaagaccggcgcagatctgcccggctaaaggccccaggccgacaaggttcaaggctaattcaactgaattgtagatggggttgacgacgtaagtgtagataacccccataataatcccaatcaaggccatcaagataatagccttcacattccacttgctctctcttctaagcattaaaaaaactcctatccaacaattgccggctaggagtttgaaatcatgtttaagaaacacttcccttgcgcaagaattaccttggtcaggttcaaagggtcgactttcgtcatctcagctttcgctcccctagtagcttttattcaatttgacttaatttagtctagcagatccttaaagcgttaacaaggtaaaaagttcccttaattaattaaagcttttaaaggattctagcttttccttatcgatatctctaataatcgccaaggccagatcaacagcagccttgtagtccttgtagctgctgaagcagtatggggagtgctcatagcggaccggaatcccgatcacgatggtcggggctccgttttcgtagtagatggccgccccgtcttgcccgccaccagttctgactgaccgggtgtaaggaatcccgtttttatcagccaagtcgcaggcgtattgctggaacttggggtttggcaggaaggtgacgtccatgtcccgcagcattggtccccgcttaaggccagtctgagacagccagtccggttcaaaagtatcatcggccgggcagctttccagaaccaggcagaggtccggcttgatcttgcgggccgtgacataggcaccccgcaggccgacttcttcctggctggacaaggcggcaaccaggtcaaagttgacttcttcatccttcaagttttccaggatgtcagccatagcagcggcgccgaagcggtcgtcaaagtccttgccgaagaagaggccagtcttttcattgtattcacagtccacgtcaacgaaaatcgggcagccagtgtcgatcttgtagtcattgatcgtttcttcccggctggaggagccgacgtcaatagacaaatcagcgacctgcgggacagactttctttcagcttccgacatgaagtggggcggctttaaggccacgacgccggggatgtattccccgtcccggtttctgaccttgaccttgagggccggcagaaccacattgttccagccgcccagggtcacgaacttgatcaagccgtttggccggatagcctgggtcaagaagcccacggcgtctgagtgggcgtccagctggatcaccggccgcttgccagtgttctgcttcttggaagcgtagacgttcagcatcccgtcgacttcaaggtcggcgtagtccttgaccgtcttggtaaaaaggtcaacgaattcattttcaaagccggaagtggcgttggcatttgaaaagtccttcagcatttgaatttcagcggcttttttcatcaataatctccaattaatccagcaggtcgtacttcagcttcatcaagctgtggccgtccttgaccatttccccggtcaaggctacggtctgcttgtaagtcaagtcagccatcttctggttggcttcttccagcttctcttgcaagtcgcggccagtcaagcccttaacagcccggtcagtttcgttttcgatctggcgcaatttagccatggtcttttcttcaaaagcctgctccaaagcgctgtaaaccttgtagttggtgtcgccgagctgggcgttcagcttgttgagccagaagatcttggtcaagtcaaagtccggaccggtctggaagctggccggagtagtcgtaacgttggtgtagaaaggcacgaagcagttaaaagtgttcgggccaaaggccagccattgcacgccggcgataccttcttcaacgtcatttctgatttgtaggatgtgggtttcgaagttccggttgatcccgattgggcggaagagcttcttttccgcttcagtgttggtcgtgctgtagacatcgtacttggtgtcctggtagtgggagctttccaggaacttgatgtcttccgggctgatcttcttcttggcgtaagtgatgaaaggctggtcctggtcccctggctcgccttcccattcagggtcgaagtagcggtggatgtaccaggcccgcgggttgttgtagtgagcatccttgatggtggatgaaccaaagatgtgacggaggttgtagccttggtagtccgggttcaagtggtattcgttgatgatgtccagcaagtcacttgagcacatgaagttttcttcgtcgttaaagtcaaagaagtcgatgttcaagcggtttggcgctgccacataggcatcgtccggaatccggcgggcagcccagtggtggccgccgatggtttcgatgtaccagacttcgtcatggtcggcaaaggctgacccgttcatttcgtaggtcccgtacttttccaccaggtagcccaggcgcttgaccccttctctggccgaatggatgtatggcaaagtcaaagtgacaaagtcttcttcgcccaggcccccttcttcaactaaagggtcgatcccttggatccggctgttggtggtgatggtttccgtggccgtcatggctaccgtagcgtcgttgatcccggcagcggcccagatcccgttcttgccggaagcgtctggagcgctggtgtagcgcagcgggtttggcagcaggtcttcatcatcgatttcctggccgctgatcactgccttgtagtgctttggctgatctttcgggttaaccgcgataaaggcttcagggataatggtgctgccgccgtcttcactgcgggcaatcatcgtggagccatcaatggtggcgtccttgccgactaaaatggtcgtgcattctgctggcttttgcataagtcctcctctaataatctaaaactaattgtttgctttcttactattattctagctgaaaaaacgccttttgccagctactgcttttgccggtaaagggcatagaggcgcttgctcaaatcggcgccggctggggcactgttttcaaacaggatctggccaggctggctgctggcattcagttcatcccggctggccagttgccgcttgacttcagcagcggccccgatagccccgtcatagaccttggcctgggggcctaagatctcctggatggcctgcttggcaaaaggaaagtgggtgcagcccaagaccactcctgccgccttgccggcatatggggccagcaattcttccaggtactggtaaatggccgggctgtcagtttgccctttttcgatcaattcgaccagtttcggggctggcactttgaccacctgaccaggctcagtacattcggcaaccagctggttgaacttatcctgctccagggtcaagggagtggccatggcaacaacctgccggccgggattttcttcagctgccggcttgacagccggttcgatcccgatgatcggcagggagtattcccggcgcaggcggtcagccgccgcgctggttgccgtgttgcaggcaatcatgacggccttgacctggtgtttgtcaatcagttcatcaactacccgcttggccagctggtagacttcttccttgctctttaccccgtaaggagcattggctgagtcgccatagaagacatagtcttcgtttggcatcagatcaaccaggcggctgaggaccgtgaggcccccctggccggaatcaaaaacgccgattggccgatcagcatattcttttgacatattttgacctcctctagctattaattttgaacctttagctattaattttgaaccttttacccgctttcttcaatctattgactacgatatttttcctgcaagccggactttcttgattttttctttagtttttttagcggaagaaccgtccggcttgctttttttaggggctatgttattgttatatctaacccctggatatcacgttgattaccggaataaaacggcaatctgggaataaattctgtccacagtttttttagttttttagaaagagcaaaagaaattatgtttaacgtttcgcctgaacaagagcgccgccacatcgttgacgactcagcgctcaatggctttttaacgaaaatgtattccatcatgggcctggcggttctggtctcagccttgactgcctacttgaccttgacggtcttctctggcagcctgctgccgctactcaccaaccgggtcttcatctgggtcctgctgctattgccgctgattttgagcgtgggcatcagctttaaggctactcgcaagccgacaacggccttcttcatgttgatggctatcgcggttgtctacgggctagaattctcccttttggcttttgcctacacgggtgcccaaatcggcggggccttcatctccgcttcagccgtcttcatcgggatggcggcttacggcagcgtgactaagaagaacctggacaccatcggggcttacgcttcagccgccatctggggcttgatcgtggccagcctggtcaacatgttcttgaagagcatgccagccagcttcatcttctccatcatcggggtcatcattttcacgatcttgactgcctgggatgcccagaagatgaagtccatctacgccagttacggagaccagctgccagaacttggcctggccgttaacggggctttgatgctgtacctggacttcatcaacctcttcctgcaatttttgcggatcttcgggatcgctgacaacgacaactaaaatttaagattttcttttttgaaaaggctctcttcctaattagagggcctttttcccttgactatttttcctgcaagagtaaggtgaaagatatgtaaagtatttattagcgaagctgaaataaaaggaaggtcacacattgcaaaagcagccggtatggaaaagaaatctgcaagtctcgacggtcagcgtctttttggcggggattgccttttcagaaattaccccttttttgtccttgtacattgacaccctgggcaagttcagccaccagcagctgagcttttggtcagggatcgtcttttcagcggtctacgtggtggcggccctggtttccccgatttggggcaagctggctgacaagaaggggcgcaagccgatgattctgcgggcctctttagggatggcggtcgtctttacctgcatgggcctggcccagaatgtctggcagctgctgttccttagagggatgcagggggtttttgccggcttcatctctaactctaacgcccttatcgcgtcagaaacgccgaagaacaagtcgggcaaggcgctggggatcatgatttctgcccagaccggggggcaattgctggggccctttgccggcggggccttatcgcaggcttttagctaccgggtaaccttctttattaccggggctctgcttttcagctgctttatcttgtctgtcttctttatccatgaagatgacttcgtgccagttgagagcaagcagcggggcagctttaaggacacgatgaagcagtttaagagcgggcaattgattctcgggctgctgctgacgaccttgatcattcaagcggccaacaactccatcaacccgatcgtttccttatatgtcagaagcttgatgcacaattccgggcaggttgtcctcgtcagcggggtgatcgcggctttgccagggattgccacggtggccgcggcttcttactttggtggcttaggtgaccggatcgggacccacaagatcatcttaggcggcttgattgggtcgatcatcctcttcttcttgacggctttcgtccgcaacacggttgagcttggcgtctgccgcttcctggttggttttactgacgcctgcctcttcccgcaggtccagaccatgctgaccaagcacagtccaaaggaactgaccagccgggtcttcagctggaaccaaagtgccatgtacgtcggcaatatttttggcccgctgttaggttcaacggtttccgcccacttcggctacagcgccgtcttcctagtaaccagcgggattgtcgtgaccaacctgcttctttaccggactaatattttgaaaaacattgcctagcttaagcgcaaaaaaagctccaagattcattcttggggctttttgcttggagattattcttgactatcctaaagcgtaagcactattttgtctgtgtttgggccgattttacctatttttcacaaaaataaggatgtccttaagcgaaaataacaaattttaacaaaatctatgcgtttgctcaaaaaaattcttcgcattatactgaagagaaaatattctttgagaatcgaggtgttcttttgaaagtcattaccaaaattttgcaagctgtcagctttctgctcagcctctttcttctttgggccggcctggccagcttgcttgacgtctgcaactctgccagactaatgggctggtcctctttcatcccttcaattgtcgccggcctggtcttcattgtcatgctcatctgcgaagcctggctcagcctgcggataaacaagctggacgaccggggaatcttcttcttcctggccgccctcctactttcaacagccggcgaaatggtcgcccctgttgctttaggctctggctttctctggctgaacctcttgcaactcttgctagtccttctggcccgctttgccatcgattttcatgaatagtggccaaaaattacacataccaaaaatggtgaaactcattctcgagcttcaccattttattttttccgtttcatggacaagtcatccggcaagacaaagatcacaaagacatccccgtagtaattgtcttccacataccgaccgaatacgtcgccttatacatgcggtcaatcggccatgaatatctcttcttctactacgtctcattcgcggccttcatttctcttttggtttatgtctttgccttaaaaggtaaccggtcagcacttgacgatgaagcataaggcagatgcaaaaaagcttatccaggacggataagctttttctttggcattttctgcttttagtaaatctttgcaacttgttcccgaacagtcggttgggccaggaagtcgtcgtagctgatgtcggcccgggccaccacaccctttggaccaacttcaataacgtggttggcaatggtctggataaactcgtggtcgtgggaagtaaagagaattgagccagggtagttttccatggcttcgttcaaggcggtgatggattccaggtccaagtggttggttggatcgtccatgaccagcacgttggctgcttccagcatcattctggacagctggcagcggaccttttcacccccggacaggaccttgatctgcttgttgatctcgtcgccgctgaagagcattctgcccaagaagccccgcaggaaggtgttgtcgtcgtgttccttgtcagcgtattggcgcagccagtccaaaatcgtcaattcgtcattgtcgaagttggcgttaagatctctggacatgtagttaaaggaagtcgtctgcccccaggtaacagtcccggagtctggttccaggcggccggcgatgatttccatcaaggccgtggttgcccgggtgtttctggacaagaaggcaaccttgtcacctggcctgatgataaaggaaacattgtccaaaagctgctcgtcgccggacttgtaggacacattgtccactctcagcaagtcgttgcccaggtcccggttcatctcaaacttgatgtacgggtacttgcggctggatggcttgatgtcgtccaagctgatcttgtccagctgcttctttctagaagtagcctgcttggacttggaagcgttggctgagaaacgggcgatgaattcctgcaactgcttgatctgttcttccttcttggcattttgctggcgggccaattccgtagccagcttacttgattcgtaccagaagtcgtagttgccgacgtagagcttgatctgcccgcggtcaacgtcacacatctgggtgcagacctggttcaggaagtgacggtcgtgggaaacgaccaggacgatgttttcgtagtcagccaggaagttttccagccaggccgtggtgtgcacgtccagaccgttggtcggttcgtccaaaagaaggatatccgggttgccaaaaagggcctgggccaaaaggaccttgaccttgtcgctttccgccagctcgctcatctgcttttggtgcatgtcttccggaatgctcatggactggagaagctgggcagcatcagcttccgcgttccagccgtccagttccgcaaattccgtttccagttcagccgccttgaccccgtcttcttcactgaagtcggccttggcgtaaagtgcgtcacgctccttcatgacctggtagagcttttggtggccttgaatcacagtttccataacggaaaaatcttcaaaggcaaagtgatcctggttcaggctggacattctttcgttagggcccatgctgattgagcccgtagttggttccatttttccttccagcagctttaagaaagtcgacttgccggccccgttggccccaatgatgccgtagcagttgcccggcgtgaacttaaggttgacgtcgctgtaaagggtgcgactgccgatttgcaaacttaaatctgttactgtgatcaatagattttcctctgtttcttaaattttctactgcaattatgactaaatcagtataacaggtttggccttttgcctccaaacttttcaaccattttctcctcccttttttcaacttctttctttttaaggaaaaaattggcttataatcttttaataagaactgattgataggagtattcttatggcatttttcatctcactggagcagatctgcatcatgttcatcctcatggccatcggctttctctgccggaaaaagggcatgatccatgaagaaaccggcaaggacctgaccgccatcctggtctacatcgtcggcccctgcctgatcattaacgcctttgagcgcccggccagcgccagcttaatcaaggacttcggcttgaccttcctggctggctctctcaactacctcttcccaatcgccttcagcagccttttcctccgcctgccccgcttaaaaaatgaccccgacaagcagctgatcgccttcggggccgtctacaacaactgtggctttatcggcatccctttgatccaagccctcttaggcagcaaggggacctttttcgccgtacccatcttagtcttaaacaacatcttcgtctggtcccacggcatcggtacttttaaaaagcggcagcctttggccgacaccctcagaaccgtcctcttcaatcccaatattattgccaccgccatcggctttgtcctttttatcactggcgccagcctcaaattcccagccgtgatagaccggtcggtcagctacgtggcctcgcttaatacccccttaagcatgatcgtcatcggctctaacctggggactatttcgggtgacttctataaagacagcaaggcctggctgatctgcttcttgcggaacttccttatgccggcctgcatgagcgtaatcctgctcctggttcccctgtcaacgaccgcttacctggccgtagtcatcatggcggctgccccggttgccggctttatcgtcatgctcagcctcctggccaaccgcccggtcgccttcccaatgcgctgtctgtgcctgtcgactttaatgtctgtggtcagcgtgcccttgattattatgctggccagctggctcaagcagcttgtatagttccccattaagcaaaaagggcattttttgtcaagacgattgttcgcttttttagaaaaagttgctgaaagcaagcccaagctaattcaattttggacaaaaaaggcgtatgatagagaaaaagcattagcaaacaaagtttattttaaaagaaagaggaagttaagcgtgactgctaagaaattagagaacaacagtaaccacgcggttattgctgaagaggtcaagattttgaccgacttgcttgacgaaagcacccgtcatttggttggcgacgaagaattcgccaagatcaagggcctggttaaaattgctgccagcagcgaccacagccagctggaaagtcagattgcctgcttaagcaatcaagagatgatcattgtcgcccgctacttcgcgaccctgccgcttttgatcaacattactgaagacgttgacctggccagcgaagtcaacctgctcaacaacacggacaaggattacctgggcaagctggaatcaacggttgacctggtagcggaaaaggacaatgccgctgaaattctgagtcatgtcaatgtcgtgccagttctgaccgcccacccaacccaggtgcagcgcaagaccattctggaattgactaacaagatccacgaccagctccgccgctaccgggacttcaagaccggcaccatcaaccggaaagagtggaccaaccagctccgccgctacattgaaatcatcatgcagacggacatcatccgggaaaagaaactgaaggtctccaatgaaatcaagaacgtcatggtctactaccctgactccttgattccggccatcactaagctgactgcccgctacaaggaacttgcccgggaaaagggcctcaacgttgacggggcaacgccgatcaccatgggcatgtggattggcggggaccgggacggcaacccttacgttacggctgaaaccctccgcttgagcgcgacgattcaaagtgaagtcatttttgaatactacgtcaaggctctcaacgacctttaccggacagtgtctgtttcaacttcttacgtgcagccaacgccggaagttgccgaactggccaaattgtcagccgacaactccccattccgagaaaacgaaccttaccgccgggccttctactacctggaaagccgcctggcccacacggaaatggagcttttggatgtcttctccaaggaagccgtcgttaagaaagaagctgccctcaaggctccggtctacaaggatgcttacgagttcaaggaagacctggaagccatcaagcggtcattaatcaaaaaccatgaccgggcagttaccggcggccactttgacgacctcctggaagctattgatgtctttggcttccacctggctacgatcgacatgcggcaagactccagcgtcaacgaagcctgcgtggcagagctcttaaagagtgcccggatctgtgacaactacagcgatttggacgaagaagaaaagatccagatcctgctcagtgaattaaacaatgatccccgcagcctgcactcatccaactcaccgaagtcagagcttttgcaaaaggaactgaagatctaccacactgcccgcctgcttaaggacaccttgggcgagaatgtgatcaagcagcacatcatttcccacaccgaaagcatctctgacatgctggaacaagccatcatgctgaaggaatacggcctgctcgattccgaaaaggcccgggtgcaagtggtgcctttgtttgaaacggtggaagacctgcagaactcccgggaaatcatgaagcgctacctcagcttcgacatcgtcaagcgctgggttgcttctaagggcaactaccaggaaatcatgctgggctactccgactccaacaaggacggcggctacctggcctcctgctggagtctgtacaaggcccaaaaggaactgacagccatcggcgaggaacagggcatcaagatcaccttcatgcacggccggggcggcacggttggccggggcggcggcccatcatatgaagccattacttcccagccattcggctccatcaaggaccggatccggaccactgaacaaggggaaatcatccagaacaagtacggtaacaaggacgctgcctactacaacttggaaatgctggtttccgccgcggttgaccggatggtctccaagcaaaatgtcagccaggaccacatccaggactttacggcttcaatggacggcattgtggaagacagcaaccgggtttaccgggaacttgtttttgacaacccgcacttccatgactacttcttccaggctacgccgattaaggaagtttctagcttgaacatcggctcccggccggcagccagaaagaagattactgaactgtccggcttgcgggccattccttgggtcttctcctggtcacagagccgggtcatgttcccaggctggtacggggttggttcagccttcaagcacttcattgatgctgatccgaataacttgaaggaactgcaggaaatgtaccagggctggccattcttccactccctgctgtccaacgtcgacatggttttgtccaagtccaacatggaaatcgcggaaaagtacgctggtctttgtgaagacgaagctacccggtcagtctttgacatcatcaagaaggaatgggaactgaccaaggaagtcatcctgcaaatcgaaggccacagcaagcttttggaagacaacccgtctttggaaagcagcttggactaccgcctgccttacttcaacgtcttgaactacgtccagctggaaatgatcaagcggggccggcaagaaaagctcagcggcatctacgaatcgatcatccacatcaccatcaacggggtcgcttccggcctgcgtaattcgggctaatgccacggatttatatttcaataagaagcaaaaaagcatgttttttcaaacatgctttttcttcttgcttttgcttcgtgtcgttttagtttttgatttagaatttattgcaaaattgttttacttaatcagccgccttgattgaagcgataatttcttcaaccaggtcagggtcatccttgaggccagtcgtttccaaaacgacttccttcagcggttcatccttgagcatctgttgcagcttttggctttcagcgtctgctggctcgtcaaagtggtaaatcttgccgaccgtttcaagcaaggccgtgtagtcaagaccccgggccttcagttctctgattggccggatgaaacgttcatcatagcccagcttacgaatcggtgtccggccaacccgggcgatatcgtcagagatgtatgggttcttgaagcggttgatgacttgagcatggtattcttcaagttcttccttgctaaagtcccacttggccaaaaggagggaacgggtttcagccaaaacgcgggttacctggtcaacgacccggtcatccttaacggcttccccaatcgtttcatagcccagagccttgccggtgtaagcaacagtggcgtgaccagtattgactgagaacagctttctttcgatgtatggttcaaggtctggagcgtagtgaacgccttccaagcggatcttcgggttcttcatctggctttcgtcgataacccattccttgaagtcttcaactgaaacaaagagcgggtcttcattgtgctgaattggcacgatccggtcaacagcggcgttcgggaagccaacgtacttgtcaacttcggccttgtcttcgtcagtcaagtgcttgtagacttcttccttcaagaactgggaaccgccgatcatgttttcacaggcaatgacatccaaaggttcgcgattttccttgactctcgcgcttaaggcttgggcaatcagaggagcaatgatcttcaataccttggggccaattgccgtggtaaccatgttggttgtcttgatggcttcgactaccttttcagggttcttggcgttgttgatcccggtcacgttgctgatgtgaatcttctttttccccggggcggccagttgaatatcgtattcaccccgctcaaccaaggcatcaatgatcgtttcattaacgtcgacaaaatcaattccaaaaccgttggctgccaaagtttcaccaatgaagccgcggccaatgttacctgcaccaaagtgtactgctctcatttttaattttctcctactttgtctaacaaaccgataatttcttctggcgtttgcgcgtcggctaattttgctacgttgacaacgtcgctgcagaacagggcaatctgggacaagagctgcaagtgctcattgcccaggcccgcgatcccgaagacaaccgtgactaattgctcctggtcatcatctgggtcgctgaagtcgacccccattgggatttggacaactgaaatcccggtcttcttaatgtatttcttcccttcatcagtgccgtgcggaatagcgataaagttccccatataggttgacacatccgcgttccgggcaagcatggcgtcaatgtattccggctcgacgcagccgtggtctaccaggagctgcccggccatgcggatagcttcctcacgggtggcaacattctggttcaacttgatcatatctttttccagtttcatgcttctgctctccttacttcagtttgtcaaccaggccgctgacttcgccggccttgagcaagtcagcaacggtgataacttggatctggtcatagcggatagccaggttcttgccagccattggcgtaacgatgaccaggtggcttggatcattgtccagttcattgattctgacggccttaacaggggttgtcttgccggccttcttcatctggtccttgaacaggcttgacgccatcgtcaccgtacccagatgttggtcgtgacggataaagttgacttccttaaccttgctgaaatcgattgaagccagactgtttgccttagcagctgtcttttcactcttcttgacctggtctgcttctggcagggtttcaccagctgccttcaaacgggcaacgacctggtcatattttggcgtgctgaggaagttgccgacagccacgtgcaaagcgtttggcgtcttttccttagcccgttcagccagttcttcctgggtgatgaccagcaggcccggttcatccttcaagttgcggacagcagtgttagtaactggcaggttcaagcccgccttcctgaccttatctctcagaagcgatgcccccatagcggatgagcccatgccggcatcacaagcaaagataattctttgcacatccttgtagctttcgaccgtttcaacagctgaagctccggcttcttcttcagtcaagcccttggattctgccttcatagctgccatttgcccttgagcggcagccaggtcgccataatcactcttgtccatcttatagataacagcagcaacgacaaaggaaacaattgctgaaccaagcacaccgacaatgttgccgaagtaggcatccttggctgaaaccagcaggatggcgataattgagccaggactggcagcagcagtcaaaccgccgcccaggatgctaaagaggaaggtcccggtaatcccgccggccatggcagccaggatcaggattggcttcatcagaacatatgggaagtagatttcgtgcaccccaccaaggaagtgaacgatcatcgcacccggagcagagctcttggctgaacccttgccaaaaattgagcaggccagcaggatccccaaaccagggccagggtttgattccatcaagaagaggactgacttgccgaccttggcagcttgctggatacctaaaggaaccaggacaccgttgccgatcgcgttgttcaagaacaagaccttggctggttcaataaccaggttggccagtggcagcaggtggtgggcgatgatccagtcaaccccgttggcaatccaaatggttgatacaaccaaaataggtccgatcaagaagtagctgatagctacgaagatcatccccatgatcccctgggagaagttgttatagatcatttcaaagccggccttgaccttgctttggaaggcctggtcaaacttcttcaagcaccaggcactgagcggccccatgatcatggcccctaggaacattggaatccccgtagccttgttggctgcgtatgggtaaagggccggataaacgataccctgtgctaccgggttggcccaagggaaggccaagacgatggtcccgacaacggagatggcaccaaccacgccccctctttcctcatagacgctcttgccgcccgtgtaggcaatcaagattggaatcatgaagtacagcattgagctggtaaagctgttgatgtacttgttcgggaaccagccgttcggcgacatgaagatcgcggtcatgaagccccaggcaataatcgcgccaatgtttggcatgatcatgcctgacaggaaggtcccgaatttctggatctttgccttagctgagctcttgctctgagtttcagacattacttttcctcctaaacactaaaaactattaccaataaaactttctctacttaacttttacttacatttttatcttagcttcaattgtttccgctttcaattaaaagaaaatagaagtctggcatcggtttcagtgtcagacttctatttgtgatatttgcattaagattggccacgggcctggtttagcctttgggttacctggcccaggtactgttgggcaatagcagccgcgatttcctggcagttgccggactcaaacagctgcagggtctggtcactcatgaccaaaaagctactgatcatccccaaaacatttgcactggcttcgggcaaatcttccggcgctaaaagcaggagctgccttttaaccataattttgctttgatccattgctgtcatggcaattggctcagccaggtcataaatggcaaaaaagcatttgctgacggcccttgtccgcgtatgcaagagggccaagtgactgcctggcaaacccaagggagccaggtccagccgctttttcagccgctgggcgacttccagccggtctttaacgtactcatccggcacggccgtgacaatcgccgacaatacagcattcatatccattccctggctgcctatcggctgcagggtcatctgttgcagaagctgctggcaaaaggcgctttctcctgccagctgggtcaagacagctgctggatttttgaagcggcagggctgctgaacggtgcttttttccgggtatttggctacataactggccacctcactcttgacccggtctagttccccgcctaaaagcaagggactgaccaagtggtattcccgggggaaacctggcaaatccagagtcgaaaagatgatgtcataatcttccagtttcagctgggccaagcccgaagcccgggccgtcttaacctgcttaatctctggaacctctttttgcaagcgagccgccagaatggcagaagttcccagcccattgtcgcagattaccaaagctgacaagttgcggcgcggctgccggctgccatattcattggcaaaatatagcagcaagagctgcaattcagctacattcaattcctctgaaaaatccagcttccaggcagccgtgattgcttcataaagctggggaaagtgcatggtcagctgactcaaggtttcaatccgcacgtttggcaagcgcttgacgctgtgctgcagcaaggcggaaatatgcttttgcaggcggcgggaaaaggccggattcttgctgaaatcaaactgaacctggtcagaaacgtcttgaataaactgccccacccggagattgacgaggacttcctggtcatcactggcaaaaggcacccgttggtcctcgtgcatctgcatttgattagcgagaaagatcacttcattttgcgtcaaggtaacttctggtacgtctagcttggcaaaaatctggtagacatagccttggtattttaaagaatccggtttggcagccatgctttccacacttttgccttgccgctggcggtccaggctaatggcaaagagcagaatcagctcgatcagctgataatctgtctcaaaattgaaaactgacagcagatctttgaccgcttgccagcacttaagcagatcttttttcgggagcaggtcaatgaaaaagtttcccgacttggcctgatcttctttattaaggtaagagaaaaagacatagtcgttgctttcactgagcaggattccattcagaatccggcgctgctggctttccttgccgctgacctggacccccaggcccttggtccgtttgagctcgatctggtacttggccaaagactcagccacagcagccaagtctgcttgaactgtcgcctcgctgactcccagctcatcagccaaagcaataattttttccggttcgtcttttaacagaagcagagcggccagggcatttccccggtcttcggccttcatctcaccttgcccctggctctctttgagttcgccgcgcaggtcggcaatcgactcatccggtccagttagctgcagatagcccttcttattggtcaaggtcaagtctgatttggccagttccgggcgcaacaagccaaattcccggtaaagggtcctccggctggtttccagccttttttccacttccgctaaactgattccgtcttcattttccagcaggatctgcagaattctcttctgccggtcggtcacaatcattgctcagtccccttcattaagaaatcgctatcattataccagaagaatacatttttggccaaaagtcaaagcaagtttcagatacagaaacaggcagatgccgccgcacctgcctgttttaaatattctgcaaaaattattcaaccgtaacgctcttagccaggttacgtggcttgtcaacgtccaagcccttgttcttggacgcgaagtaagccagcaattgcgtcggcactactgacagcaaagctgacaggtagtagtcgatttccggcaagacgatgttgtcgccttccttagcaaattgcttgccaacgatagtgatcacgttggccccgcgggaagccacttcctggatgttgccccgggtcaggtcagccgttaccgggtcgttgatcaaggcaattacaggcgtgccgtcttcgatcaaggaaatggtaccgtgtttgagttccgcagcagcgaagccttcagtttggatgtaggaaacttccttcagcttcaaggcaccttccaaggaaacggcgtggtcgatcccccggccgatgtagaaggcgtttctagatggtaccaggtacttcttggccagttcttcgatcttttccttaccatcaacgatttcctggatgccctcagcggccaggctcaagccttgcttcaagttccagtccttggcagcctggtcgcccagcttttcaccaacggccttggccaaaattgcctgcagggcaacttgggcagtgtaagccttggttgaagcaacggcgatttccggaccagcgttcaaaagcatggtgtaagttgcttctcttgacaaggttgacccttcaacgttggtcatggtcaagcttgggatcccccgcttgttggcttcagtcaagaccacgcgggagtcggcagtttcaccggactgggtcaggaagatgaagaatgggtgcttggacatcattgggaagtggtagccagcttcggaagcatagccaacttcagttggaatcccggtgaacttctcaaaaatttccttgccgaccagaccagcgtggtaggaagtaccagccgcgaagatgtagatccggtcagcctggctgacagcgtcgacgatcttttcgtcaacaactggcttgcctgcttcgtctaagtagtcagttgacaggcggcgcataactgctggctgttcgtcgatttccttgagcatgtagaattcgtaagtgcccttggaagcagcgttcgggtcgatgtccaaaactttagcttctctttccaccttgttgccgtcgtagtcctggatttcgattgagtccttggttacgtcagcacagtcgccatcgttcaaggcgataaaggtcttggtttgatccaaaacagaaatcgcgtctgaagcgataatgttaaagccgtcgcccaagcccagcatcatcgggctcttgttcttggcaatgtaaatatggtctggcttggtgttgtccaccagcaagaaggcgtatgaacccttaaccagcttcaaagcctgcttgaaggctgaaaaagcacccaggttttcttccttggccagcttggctaccaattgcacgacaacttcagtatcagtttcagacttgaagtgaacgcctgccaggtacttttccttcagttccaggtagttttcgatcaccccgttgtggaccaggtagaagcggccgtcttctgagtagtgtgggtgggcgttttccaccgttggctggccgtgggttgcccagcgggtgtggccgatcccggtcgtcccttcttcttctggcgtcagcttttcttccaggttggcaatccggccaaccgccttggtcaagtattcatgcccttgtaagtcattgaggtagataccagctgagtcgtagccgcggtattccaagttcttcaaaccgtttaaaacaacttctctagctggcttgccaactacaccgacaattccgcacatatgtcttctcctttggtctagttcaatttaagctattggactaatttgtatttttgcgtttgcaataggaatcatagccgtttttttagctcgggtcaagtctttgctcgcaaattggtataattgtaagcggtaaagtggcaagcttacctatttctttgcaaaaaggtcaaaaaaagcccccgtcttggcagacggaggcttaaaatcagtcttctttcttgtcttcttcgtcatcactctcggtcttgaccgggatcggccggtgctcgatcggggtggaaaaggcaatttctgtcttggtccggccgaatttctgcagctcgttgactaagtggtccagttcttctggccgccggtaggcagcctgaatcagcatggagtagtcccccgtcacgcagtcgcactggataacattcggaatcttttcgatgaaggggtagaactcgctcttgtcttccggcttgacttccagattgatgaaagccttaaccacgtagcccatggacgggtagtcaatgtcagcatagtagtgcttgatgaggtcgttggcttccatccgtctgatgcggttggctacggccggagaagacatgaagttggcttccgcgatatccttgacggaaatgcgggcgttctcttccaacatttgtaaaatgcgtcggtcggttttgtcgattttgtattcaaccatttctttctcccacctattcaacagctgcgctggctattttggtccttttattaaaaatattatattcctacaagaattcagcgcaaggcttttctgaaaaaagagttatatcttgcatcccgcccttaagcaaagaagctgacgatcaaggtcaagataggcaagcccccctgcatcaagaggatcttcggctggctggtcacggccccgtaggccgctaccaggatcatgtaggccaagaccagctgcaggacgatcttgcccagggcaaaggccgcaatcaaggtcaaaacggccagcaggccgttgtagataccctggttcttaaacagcgtattgactgacggccggcttaattcttcctggtccatttggaaaacttctgccgtcttcttggaagtcgttgcaaaagtttccaaatacatgatatagaagaactcaactgccaccaggcaggctaaaacttgtaaagctattttcattgttaactcctcaacttttcacttcagtgcaagctgatagtgatattttacttaaaacataatgataaagtcaaaccataagttgacacttatccgcaatcattggccagatcagcgattttcctggccgggatgccggcaaagaccccgttggcgggcagatcctgggctaccacggccccggcttccacgaccacgttgtcgccgatatggaccccggctaaaaccgtgacccccgcccccaggcaaacgtcattgccgatttcaacccccttggcctgggccaggcgctggcggcgctgcctggttgaccgggggtgggcgattgtcgtcagcaggcaattgggccccatggtcacgtagtcgccgatatgaacctcaccggcgtcttcgatggtcaaacccccagcggccagaaagtgatggccaatatagatattcggcccgttcaggcagctgaagctggtcccaaagctggcctggtcccctaaagcacccaggtgcatcttcaagcgcaggagctgggctggccggtccaggttattgccctgcctgaactcgtcgttccagatgattcccgcttcctggtaatgctccacctccggtgccgtcagctggtagaaatcaccggagcgcattttgtctagttcattcatcgtctttttcctcgaatttttcaaactagttaaattataagcgaaaagcgtttgaaagaaaaagactttgaaaaaatcaaaccatattcgtgctgattacatatgcccgctggcccggcatctctgccaccagctgcaggcggccggcatagtctttgatccggaaactcttttcaatgatttcaccatcggtctggctgaccagctgccttaaaagggcacaaaactcttccttgatggctgccgcgtaatcttcacccttgagacggagggactcagtccagcttcaagccaggattagcctggatttccaccaattcataagcaacatggtgacggaaggcggtcacgctgtcagccgaagctcccttttccacgtaaaaggacttttgcaaaagccctgacatgtggctggaagcaatctgcatgaccgggagggccagactcatgtcttttggttcatccaccccgacaaagccaaccaggtcggtttcaaagtaaaacgggcacaagaccagactgctgagctcccggcgggaaaatacctcatataacataggatcagtctctttgaaagctgccatatcgctgatatagtaaccagaattttccctaaaggcccgggcaaaaggcgagccaagatcatcccgcggcatgtcctgcagagtcgcccactcagaagcaactcccggcgcgcaccattcataggagttgtcatagagctgcttttcattcaactggaaaatacaggcccgggctgcccccagctcttcaccaatttcactaaggaaaatcataatcgcgtcactacgtcactagggtctccatcctgcatggcccggtccatgcactggttcatcaattctacatagcccagcattttctgagcttccaggggagaaagaccgctgaaatcaaaattccttttaaaagcgccgtattttcccaagctttacctcaccaagcaaaatacaaatttcctagccaaaataccgttaactgaagaaaacaccctcggctaggccgggagtgtctaccttattagagcaaaaaatactataaagcattcgattaataaaatcaagctattggcgcgaaataataaagcacttgttgcttttattaggtaagccttaataaatcaaggatatatcgctaatgcgataagttttcagttatctatccagcttgcatttattgaggtattccaacaaaaaagtccgggctaaggaatttggccggatctgccggcgggcttcgtctatgcttaaccagttccaggcgtcgatttcctcatttggactaaccttttcagcctggtcaacggtcaccgtgtagttgagcatcaaggtatttgagggggcaaaatactggctgcggttgaagtggaggcttttagccgttagatgaagttcctccattagttctctgcggcagctgtcttcggcgttctcccctttgttaacgtagccagctaccaggatataggagtccttcccgtactgcttgatcaagagtacctggtcgcctccttcattcatgacgatcatgctgacagcgacggaaaaaactggaaagcggaagtcgccgcattgctcgcaataagggatcaagccatccagaggcaattcctttttagtcaatttttgcccgcactgggggcagtaggtcagttcaaacattttttgtcactcttatctgcttacttatcattacctgcagcaactagatatacttgctgccctcccgccggcttaaggcagagagatcgcgggaagtcatgtattccctgacccaggccgggttggtcttggagtagtcccttagagcccagccgatagccttgttgataaaaaattcctggctgcctaagttgcggtcgataattttgcccaaaaggtccgggtcagttgcttcttttaagcccagctggaattcaatcgccgtccgcctaacccagaagtcgggatcttgagcccaggccagcatgagggctgccgtcttttccttgttttcctcatctttgataaaaatctgcccggccagtttgaccaggctgtcgacgctgtcccaccaggacttggtctccgccagctgcttgatttttggtaagtccttaaaagtcagctgcttttggactttcttcaagtagtccagggcaaagtactgcatttcccggtagtcatctttaaagcagaggtcaaccaggtcccaggcgatttcttccttagtcacgccctttaaaaagggcttggataattcccgccgcgttggcgtcttgagcccatagaagggaaaaagatttcgcatgtacttgcccatggcctgggcattttctttgttagccccggccgcataagcctttttaaccgcctggtacttttcaaaaggggtcatcatttcaccatgttttcatctttctgtcagttgtatggtaaaatataagctattgtgtgctttagcacaatagttttcaaatttatattttctagtttttaatttctatgtattgttattttaacttggtttatggaggatcaacatgaaagaaaagctgacgcatgctgagtcgctgacgatttccagcatgctctttggcctcttcttcggggccggaaacctgatttttcctgcctacctgggggaagccagcggagccaacctctggatctccctcttgggcttcctgatcaccggggtgggcctgccccttttggccatcgcctcattagggatgaccaggtcagaagggcttttagacctcagtggccgggtcagccacaagtacagctacttctttacctgccttttgtacttgaccatcgggcccttcttcgccattccccgctgcttcacggttccttttgagaccgggatctcagctcttttgcccagcgggatggcaaaaagcaccggcctctttattttctcactgatcttcttcgcgatcatgcttttcttctctttaagaccagggcggatcatggactggatcggcaagtttctgactccggccttcttgctctttttcttctttatcatgatcatggccctgctgcatcccttgggcaactatcatgcagctaagccggtcggcgaatacgccagcgccccactaatcagcggggtcttggccggctacaacaccatggatgctttggcgggcctggcttttggcatcatcgtcatctccagcatccggacctttggggtgaccaagccggaaaaagttgcttccgcgactttgaagaccggggtcctcacttgccttttgatggcggtgatctacgccattactgccctggtcggagcccagagccggactgccttgggcttagccgctaacggcggggaagccctgtcccagattgcccgccactacttcccaggtctgggggcagtaatttttgccttgatgatcttcgtggcctgccttaagacggccatcggccttatcacggcctgcagcgagaccttcgtggaaatgttcccgaagaccctgtcttacaacaagtgggccattatcttcagcctcctggcctttgggattgccaacgtgggcttgaccaccatcatttccttctccctgccagtcttgatgctgctctacccgctggccatctctttgatcctgctggccttgaccagcaagctctttgactttaagcaggtcgactaccagattatgacggctgttaccttcctttgcgccctgggcgacttcttcaaggccctgccggcagggatgcaggtcaaggcggttaccggcctttacggccgcgtcctgcccctttaccaggatggactgggctggctggttccagtcgctgttaccttcgttattttagccattaaggctgctatcagcaaaaaacgcgcctaacgcgaaaacagagtttcctaagctaaagaggaaactctgtttttttctattacaagtccagcaagccgtcttcatcaaggattttcacctgcttgcctgtccttttcagatagcccattttttcgaggagtttgaatttgcgggagagggtttcgggagtagttcccaggtagaaggcgatatctttcatcttcatgggcagctggacctggtcgcttccagccgccttagccaagtcgagcaggtagctggccagcctttcttcgacccgctccatggccaggaactgggtctgtctttccgtggccagcagcttctgggtgctgagttccagcagtttgagggagagctggggattttccaggaggagccggttgaagtcggccttgctcaagctgcagatttccgtattctccatggcctggccgaagaagctgtcgttttccaggccaaaaagctgcgcttcaccttcatagtcacccggctgggcaacccggagcagctgctcgcggccgctggcggacagctggtaaaccttcatgtttccccgggacacgatctgcagcttttcatcccctggctgaaaaatcatctcacctttttgatagtgccggtcgctggccagggaattgatcttaagctgatctttttcaggcaggtccgcgaataagggaaccaggctgacacatatatgctgcattttgctctcctctgctggtaaaaattagccctggaccaagtgatcgaattcttccagggtctggtaggtcttagtcatcgccccgcaggcatcggccggaatggtgtaatccgcggtcaaggaccgcagcttgctgaagtcggcagttaagtcttcctggccggctttcaccttcttttggatgtcttcgtaaaccttgcggacttcaaagacttccgggtggtgggcgccgtgggccttgataattgcttgcgtatataagtctaacatttcatcgttcttgtcaaaaaattccttgatcatcatttttctcctttttcttgattagtcgtttttcttgtttttgcttttttctcttatttagcgctggccttcaagacgtcatagccgatattcttcacggcttgagtgatcgtgtccaaattggttttttccgggtcgaagttgaccttggccttgcttgcgttgaagaggaccttgacgctggtcttttcaaccccgtcgacattggcgatggcccccgcgatcttctgcatgcaggtcgggcaggctaatgtttcaagttgtaaaattgctttttgcatgatttcttttcctttcttttttctattggatactttcgctacccttagtatacgggcctgttgcttgagaaaaattgttttctatcaactttcgcgatttttgtaattttgaccggtaggccagaaggcgcatggcgtttaagattacaaccaggatactgccttcgtggacaaacatcccgatggccatgttcatccatgagctggctaacaggctgatcagcaggacggctacgacagccagggcgatggtgatgttctcaatcatgttccgccgggtggccttagccagggccagggcccgcggaatccggtcaaagctgccgttcatgaggaccacatttgaagtctcaattgccacgtcagtcccactgcccatggcaatcccgatgtctgcccgggccagtgacggactgtcgttgatcccgtcgccgacaaaggccacgatttcaccggctgcctgccgctttttgacaaattcggccttgtcttctggcaaaagctggccatatgcctcagtgaggcccagttcttccgctaccaggtcaaccgtcttctggttgtcaccggacaagaggagcaggttcttgacacccagcttctttaaagcagccaggtcttccttgaccccggcccggatctcgtcctttaagcctaaagcaagttccagccgcccgtttatagccaccagaaccagggaattgccagcacttgccagctcttccatgtccttttccatttcttttgtaactgggacatggtactggtcaagcaagtagcggttgccgaccaggacctgctggccagctacttgagcaacgatcccgccgccctggaggacctgggaatcttcaacttctttagcttccaggtcttcatagtagccagtgatggctttcgccaaagggtgggcagattctttttccacgctgaccaaaagctgttcagccagctggccctggccgtactttttcacctggctgacccgtgggtcgccgtaagtcaaggtcccggtcttgtcgaacatgatcgtgtcgaccttgctgaacttggtgatgacttcactgcctttaaaaaggatcccctgcttggcaccattgccgattccggccacgttggagaccggaaccccgataaccaaggcacccgggcagccaagaaccaggatggttacagccagttccaggtcttggctgatgaggccaacaataatggccaggagcaggacgactggggtgtagtacttggagaagcggtcaattagacgctcagcctgggacttggagtcctgggcttcttcgaccagttcgattatcttgccaaaagtcgtttcatccccgactttttccgccttgatccggatggtcccgttttccaaaatagtaccggcatagaccgggtcgccgggctttttgcctaaaggcatggattcaccggtaatgctggcttcgttggccgtcccggaaccggagacgacttccccgtcaaccgggatcttgccgccggtcttgaccaaaaggatgtccccttcgtccaggtcgtctaagtcaacttcttcaaagtcgccgtctgccgtctgccggagggcggtttctggcaccatctccaccagtttcttgatggctgaccgggtcttggccagggtcctttgttcaaggtaagccccaaacaagaagaggaaggccacgatagcggattcttcgaattcctggatgacgaaggcacctaagatggccagggtcaccagcaagtcgatactgatgactttgactttcagggcctgccaagcggttgcggcgatcgggaagccgccgatgagggaggcagccaggagcaggctggactctgctgtttcacttttaaataaccattttgcggcaaaggccaggacgattaagatgcccgtaattgccgtcagccggttgcgatttttcattaaccatttttgcattgatcttttgacctccttgctttgatgcttttaatataccgggaaagcaggattccccaattgatttctatcaagatcgggatttttacaaaaatttttttacgaaaaaagccatccaggggaatttgatcctctgaatggcttagttttagtcgacgcggttgattttaccagccgcgattgggagagtgacgtgttggtcgtaatggtcgttgatcttgccgccaacgctttctggcaattccaggtcagctggcacgccgtggatgtagaccacccgcttgtccagggccaagtcctggtcattgaagacttccttgaacttggcttccagcttggctaagtcgacatctttttcatagctgtagtagccgtttgcgtcggcaactgggtagttgtcgttggggatgcacatttcgtgcggagccgcgtccaggggcaccatagtcgtgccggagaccggttcggtttccacgaggtcgataaagccgtcctggttagtgtcctgggcaagggttggcacttgggcatccttgccgtccgggaagccatggaagtgttcccagtgctggatgttagccggggtgtcgaacatctccagcttgatgtgaagcttgtcagcctcagtcgtgaattctacgtagccatgagcctggctgccaattttttctgcgttaagagccgtaatgtcggcgcggtatttagtcatattttttcctcaacaaatcatagttatcgctttaacgttactttaacgttaaagggagttttaactacttaaaaataagtatatcacgtcatgattatcataattatcatgactatcatgactatattgagtataccatataataagcttgctcgctatttataaaataacgacttaatggaataagttttatataaaaatatcaactatctactgtcagcttacgccagtcatcttctaagatagccatcaacatgtgtcagcgtacttgcccctgtcgaaaactgcatcccgcaaaactccctcccacttgaaaccagcccgcaggtaggctttttccgcgcggagattaaaagagaagacgtccagttcaagccggtgcagatgcggaagttagcccgacgcaggtcccagtcgatttcactaattacgctctcgccaataattttaccgttcggatctataatcaagaagaagtatctgtccgtttcttcgatagcttttaggaaaaaagaagtcacttcttccttggtaaaatgctctttgcagccagtcagtctggacacttcctgtccaagggacaatagttctggaaataataatcgtctacatcactggcctttgccaggcgaattgtaaagccgtctttttgccaagttgccttgatgtgactgttgttcctttcgtccaactagctctttttttcgtccaattttgcccgattttggacgaaagagcaaatgattggactaaaaaagtcccttcacgcttaaacatgaagggactcttctttatcttagtcggtaacttagtcgcttatcttggtcggttgaccgactaagttattctttcgtcagcacggtcacacattccacgtgccacgagcttagttggtcaattacacattgttgattaaccgctgcgctagtcggcttttgttatctacgtcaagctagcacaattattaactcggagctataatgccggatgtagaccacccgcttgtccagggccaggtcctgggggctgtccgacgaccaaattgcccagtcctgggcgatcagcccgcaaaaggtggcggacctgcgcgaagaaaaccagctccaccgcgtttacaaggaggtagtcccctcggcgggggaatttgatgagcacccccaccgcttttacgccacctttgaaacagaaaacgagagcgacgccaccgccggcccccgggccctgatagttggcgatgggccccgcaagctggggaacagtaccgctaacgattacgtgttggcgatgattgcccgcgaactaaagcaccaccagtaccaggtggttagccactccaataaccccaattcgttgttaatgacccagtggttaagcgacaaggtttacctcgagccgatgaccgaagaggcggtcgcttcggtcgcccggctcgagcggcctgactacgccttcgtccccgccggtaaacaggagctggggcgggcaattgagcgggtcagcaccacgacgaaggtggtggtgattgaagccacccagatccccaaaaacgtggtttcctcaatcccgaccctcgagtttaacggcctctttgacggccaggtagtctaccaactgggggttgtcggcgaactgaaggaccagggagttggtaagtatcaaaccctggccaagcgttacccggcccacttagagtcggacctggccaccaaggtgacggccaccagtgaacgggcgattagccaacaggaaacgcccggtttgtatcaggtcctctaccaagccgagggggtccacgaagacgtctcacccctgacggccccagacatcgcctttatgaccaaggtcttgggaatgaacctgactgccatttgggtccgcttaatgattgggcgcttctccggccaggccttggtcaaggctagtcacgagggaaccacctaccacggcgccatctaccgggcccacttcccctacgccgattaccacttaaccaaccaaaagtcggcgccggccaccgtgatcggggcgcagattgaacgcgccaacaaaggaagtgaacaataaccctctcgcacacattaccaaaccaaaaggggtcgggaaaaactctgttttcccgactccttgttgtattcacgagggttagacagaaaacgtggtaaataaccgcaggtctagtgtctaagcaggccgaagaacggtgcgtcctagcttagtcatatgacctgccgagaaggttatttcccactctcgtagtaatggtaaaccgggaccgtgatgggttgtggtgcccggtagttgtcggcaaacaagtcgtgaattagtgccagtgaaccggaagaaaaggggtgcacggcgtcaagcaccacccaagtcacgtccggcgacagtggtggggtcgtcaaagaaccggtgtaattaaagtagccctggttgttagcgaagaactggtttaagtaggcggcaccggcctgaccgttaatgacgggagcgaagtcaaagccggcttcaccatcggcggcccttatccccagcatggctaagaccagggtttgcccctggtcgtcttggtagacaaagtggacctcggcgtcttgccgctggccatcaaacaggtgctcgctgtggtcgtggaagtggaggcgcaagaagtggtagtggtggttccctagcgttaaagtgccagcgccgataaactggtccccagacgaacgggggtcgcgggtcagcgcctggtcgccgacaaaggagacggttaagggctggtcggcgagggggcgtggggtagtttgctctaaaacgatgtcgatgggtgattgttggctagcgggaccttgccactggtcctgggtctggtaattgatgtattccataaaaagacacctccaaataattaaccttattatagcgggttatacaatcgctttctagggaattgggcgaggccggaagaaaatcaacttgtccagtgttagctaagcactggccccttacgacacccactttttgatcagggcttctcgatggtcgtcatcgtagaattcaaaaatggcgattctgtaaaaattaacctgtaaataaattttaccattctgccctggtagtagctcagctattatcggggctttattcgttatccgtaaaaaagctcttcagcttgtaggttgtcacagattctacataatagtggtacttagccactagatcgcaaagcttgtccccattgataagggtaattatccgcgtgcctgcttttgcggttttcattgcttcgcgggtaaagtcagaggtcgtgatgaagattccgtactcggcattatacttatccattgccccacggaacttatcaatttctggcgctgaaactttaccatcccaacgcttggcttgcaaggctacccgggttgtccgaaagtcatctgaagtgatgtaaccaaagccatctaatccaccgtcacctacataacggacaccgatattgtcgtcaagatcaacgcccatgtgaagcagcaagccacgactaaacatttcaaacttctgtggtgacatcttggctaaggccgctaataattcagctttccagggttcttcttcagtctcagtctcttcctctacgtcagagtcatcggctgagttttcggatagcactgcccgcacgtcacggatcggatcaaaatcttcaagcttaaccgtccgccccttttctgataattcgagattgcggttatcttctgtgtcaatgaaatcggcatcaatcaagtgtttaaccgcaaagttaaaacgataatcaaacggacggtatgtggcgcctgttttctttgattttttgactttatcgacctgctcctctgaaattgcttctgagtggtcgcgaatctcacgtttaacttccttgcgcgttacccgaccgccaagtgcctgcatcgcttttagcacttcaatcataatcaggttttcaaatttttccattctgtttatggccattccaattacccctgcctaaaagttgcactctaactttttaactgtcatagttttggatttcgtccactcaatttattagaaatcactcactatcctcgtttgaacactattcccctatcccgcaccggtcaaaggatagcgcaatccgaggccagcgggccagccaacccttcagcaaattttaatcgttttgtgtgcgttctaggacggttacggactcaacatgtcccggcaaccttgccgtctagcctaagacatagacgaaaaccgccaaatcaacgtttctaccatcgctcaactttttaccgctaatatccataattggcccatcatgaacacacctgtgtctgatgggccaatttgagttatggttgtttgaggaaaacggtcaattataatttgaagccgctgtttgcctgattaaattcatcaagattccaatgcaggttctccttgtttacatgacctgattgaaaatgaagatgtgtaaaaaaactcttatagctggctagcgcttgattatgcatacatgcttcctcattacgagctagtgttaattcatgccactcatcatccgcaaatctacggaggactctaaaatcagctattgcttgtttgatatcgactttactcagttcctcaattcttgtcttttcactcatcatgtaatcaattcgactttgaagttcttcttttgtcgtatcgaaagatggtttgattttttccatataaactgcccccattacttaatggtataacttacctcatcagtaatcccacaaatttctgtcattttagctaacaagactgcaattacatttgcagaaaaattggtatcaatcttctcaccgttttcaagaaccttaggcgacctaaagtttgagaaaagcatattaccaaccgaggaatctttcttaattcggtcatatgtttcgctatcatttttccaaacataattaaggaagataactaagcaactcgtccatgaagtagctttaaaatcattatcttgaatcgttagacgaatcggctttgtacctgttacatctagttcttcattaattaagtgttccccactattatcgattaccatagattcgtctaacatctcaggcttagggaaaatcttaattagttcatcagccagcttatttgtacgactaacaatactttctttatcccatttgtcatagtctttggcaatttctcgtgttaatgaaatattcgattcagcgtaaaattctcgcttttcatcataaagcttattactcatttcctgattgtacttcgtcaacgtcaggtttccgatcgttccaccatatcgacgattgattgcatcagcattggaaactttaattttccagtcattagataagttccgaggcataatatgctcaacctgggcatcatcaaaattgattgtaagcacccaatagcgcggtatctattaacccctgttcaatagtcatatactgttcttaacaattgaatacggaggaacgcgatattatgactgaacatccaatcgtaccgctcgagctgccgaagggcagagttaagcctaagaacaggtccacaaggaacagacttgtccttaatctgaagtccaaaggggttgagctgtcattttacagtgatgccactaatgggcttatgctcgaagtcgtagacaggttcttgagccatgattaatctggctgaattaggtcgagtgttcattgtttgcggtaagaccgacatgcgccggggaattgattcgcttgcttacatagttaagaagagcttcaatctcgatcccttctctggatgtgtctttcttttctgcggcagccgaagagatcgcttcaaagctctttattgggatggccaaggtttctggctgctctataagcgctttgagaacgggaagttggcctggccgaacaatgaagacgaagttcgagagttgtccgatgaacaagtcatgcgcttgatgcagggctttaccattgatcctaagattaataccgcaagagctcgtgaattctattgatttcacgagcttttctggtattcttatgattatgaatcaaggagggacaacgaccatggctgacaaagaaactttagctttaat

SEQ ID NO: 2169 - DNA, 39463 bp, Unknown
  gut microbiota DNA sequence
gcaaccaccgtaacgttcgggtgcttttgcaagacgctggccgggacatccgtagtcactggcccttcaaccatggccttaatagccttagccttgctttcccccttggccaaaaggacgatttccttagccgccatgatattggcaatccccatgcagatggcgctctttggcacttcatcaatgctgtcaaagaagcgggcgttggccttgatcgtgctttccgtcaaagcaacttcatgagtaacgctgtcaaacggcgtccccggttcattgaaggcaatatgcccgttctggccgatccctaagacctgcaagtctaccgggttttccgccaaaatctggttgtagcggccgcactctgcctggatgtcctcagcctggccgtccggcaggtaggagtgcttaaatggcttgtactggaagagatgcttgctcatgaagtagtggtagctctgcgggttttccgggctgagtccaacgtattcatccaagttgacactggtcatttgactgaagtcgagctggctggctaccatttcctggtagagttcaactggagaagacccggtcgccaggcccaaggtcttggcccctccggcaactgcttttgccaaaaggtcaaaggcccgcttgcctaattcactggcgtttttcacaacgataactttcatgatgagactccttattttttaattcactcatattggtatagtccattttagttccaagaagattttttgtcaaggtctagaccgataaatcctggcaaaatctgtgtgatttttgctaaaaaatggccgcccttgtactatgcttaatgagaaagcaaaaatagaaaaacaataaaacggatggaggaaaattccatgaaatacatgactgtcaaaggagaaaaactgagccagctgggcctaggcacctggggcatgggggaaaaggccagcaagcgggaggaggaaatcgcggccctgcgttgcggcttgtcatccggggtcaacgtgatcgacaccgctgaaatgtacggggaagggcaggccgaaagcctggtcggtgaagccatcaaggacctggaccggagccagctcttccttatctccaagttctacccctggcacgccagtccaagagagcagaaaaaaagcctggccgccagcttaaagcggctggggacagactatctggacctgtatcttttgcactggaagagcgattatcctttggcagaaactgtcaagggcctgcaggatttgcaaagaaccggcctgatccgctactggggcgtttccaactttgacacggctgatatacaggagctggtagatatcgccggggaaggggccgtttttgccaatgaagacctctacaatctcgacaagcggggcgttgaatatgacctcctgccttggcaaaagcagcacggcattgcttttattggctattcgccctttaactcaggcaacgggcaatctattcccgttaaagccagcttaaagcagatcgctgacaagcggggcgtgtccgtccaccaagtcatgctggcctggaccatgcggaccgggcaggtcttgaccattccaaaggccagttcagttgaccacatgcgggccaacttggcggctgctgacctggtcttgaccgccggtgaactggccgccttggaccgggattacctgccaccgaagagcaagcagcccttggagagcatttaattttcagctgatctccacgaaggtcttgtagtagtcgtagaccttgccgtcttcttccccgcagtccaaaaagcggctgatgatccagccgcttggctggcaaggaagctgttttaattctgcttgcaagttgttgggaaggccaggtacttgcccggctttttctcccagaggacctggccgggattgagccgctcttgctgacccggccctacctggcctgcctgtttgtgatccacttgatctactggccgggcagctggctggccgccgtatcccttatcctgctctttgccgcggctgccgggatgactctttaccagcgccgctacttaggcgggatcaaagacagcatctgggtcttcgcggtcttcgcgcttttgcgcctgctggccacattgctttttaagatctgaaaaagccttgctccgtgtggagtaaggcttttcacttgctttagtttttgacctttcgaacggttttatagacttgcaagaaatttttggcctgcattgtcagtcccatatcgagcagaaaatcgataatttttaaaatgctttgttcgttttgcggctcttgccagtctatcaaactatttaaaaatttccggccaatgatcagcattgtttcgcgctgagggaaatcgaagtggtttaattgccttaagatgtttgcggcataggcagaattgttgctgataagtaaggcgatgacggcttcaaataaagtggtcgttgcaaagtaaaaagtatcagaacctgcttgcttggcaaaatccaaattttcaattaattgggcagaaatttgaaaaatctttttgggactgagcacttgaatggtgttaaagaacagggaaatattttcttgtccccagaccgtaatctcagatagctctttattaagcgcgttttgttcatcaatctccagtaaattgacttttgttaaacaatgataaaggctgcaagcaattgctccgtagtttaaggctaagttatttgaagtcagatggaattcctctaagctgtttcgggcgattcttttaattagagtatggtccttttgctcccatgccttctgcaattcagctgatagttgatcagtatcgtctaagctggccaggtgaacgtattctgaactagtgatgttcaccctttcaagcaatttgagtgttttttcaaaatccatattgccagtaccgttttcccaccgggacagcatctgaatagagcagatgccacttgctgcttcttttaaagtcagtccctgcatctgtctaatttgcttgaagtttattgccgtcatctttcctccaaaataaaattagggcttttttctcacatatgagaaggccaaaaaagtaagtctgctatccatgctttaatttatttagttttaattttaaagcaaaatccaaacttaggaaaatattttaggaggtttcttttatgagtttaactatcaaaaagatcagttcatcagatgtttgtgattgcctaacaatggaaagcgctgcatacggtaaatattttgcaatgattgaatggattgttactgatgattatgatgagttatatatgcctggttgtagtttgctttaaagatgctaagtaaacatttgagagagattgaaaaaagcgctagtaacattttgggtggaaactggtgctttttctataattttaataataaaaaataccccttatccaaagaaaaagttataggtgagttactagtatatctgattattaaaggtgaaatatcgagagcagacaatcatacgtattgattcgttcatagatagacaaaagaggcatgacgatctgtacggatacgtaaatcctctgattcaaacatctgacatcccgaaacattatattgagtattgcaccatttactttattttaatgaaaaaagttatatctaggatttacgataggtgaaatatgcaaaaatcaaaaaagcaattaattctggcaatcagcagcctgggaatcggtaatttaacgagcgcgactttttccttttgcctgggcgtgtatgttttgcaaaagacatcttctagcatgctattttccatgctgcttttggttcggcctttgagcaacttgcttttgagttctttaatcggcttctgcgttgataagtatgatcataaaaaaatttgcatgatcgcccaggcaacaagcgttgtagcggtaatactgtttatagcactatttagagcgcagctttcattatctgaacggttgctgattattgttgccagcagtattgtgctgacagtttgtgatacctttcaatcgaccagctataaggcttcaacgaattcaatggtagctgcagaacaccggcaaaaattagttgcctatgaacaactgacagacgcgggtgctgttattttggcaccgatattgggcggtttgctggctggggcagtcgccatctccaatattgctttgcttgaattagctggtgaaagcgtggttttgctggcaattgctttattggatttccgcttgatttctgttgacgtggaagcgatcagtgattcatggctcttatccatcaaaaatggcttagagtatttcaaaaatgaccgctatttaatggaattgctgctttttgccgtgattgctaattttgctttaagcggcctggaagtcagcctgccaatcgccatgatgaaggaactgggaattcctgcaaatttatatggattggcggacagcttttgcgcaggagggatgcttctggtcagtctattgctaggttctttcaagataccaaagaattatttgctgacgaccggcagaattggaatcattttagcgggtgactttattatactagctttagcatgtttgtgtccgaataagttgcttgctactggtatttttagcatctgcatgctggtggtaggtgcctgcttggccgcggtaaacttgccatatgccatgtatgttagaaccaaggtgccggttaatcttcaagggagagttggagcgactaccagttcagtagtagccttgctttctcctttgggatatgctttgttcgggcttgttttgggccagattaaaccggtctggtgcttaatgatgtgcgcgataattatttttgcagacggattgcatttattgctttctactagcagagtaaatagttcaatctgaaggaaaagccttgctccgtgtggagtaaggcttttcgcttgctttagtttttgactagaccttgcttgtcgcgtttaataaagcgcaagatgcaggcaaaaatcaagagggtgaagatgaagaggacgatgaaggcggcttgtgaccctatgaccacttgcttgctctgcccctggtaaggactgccggcgatggcaatgatcacggacatgcccgcggtcccgatgatcgaccagatcacggaaggggcgactttttcatgagcttccattaaattcaaacctccaataaaaaaactccaattcagcgaatccgagcccggaaagggtctttggattcagccagaattggagtcatactctaatatttcagtggaccaagctccacaaagcttgctttaaaaacttgtcattaatttactttagcattttttcagaaaaaatgtcagtaaaaaacagggccaaagccctgttttctttatttcgacttgatgtagttttgcccgtcggcagctggcccgacagtcttgccgaagaagactaccagaacgatgatcgtcaagacgtaaggcgcgatctgcaggtaaacggatggcaggctggaaatgcctggtagctggtccccgatgatactcaagctttgtgcgaagccaaagaagagggaggacagcatagcgccgattgggttgtagcggccgaagatcatggcagccagggccatgaaaccttgccctgcaatagtggaaactgagaagttcccggcaattgcttcagcgaagacggccccgccgatcccgccgaggaaaccggagatcaagacgccggcgtaacgcatcttgtagacgttgatccccaaagtgtcggcagcttgcgggttttcaccgctggaccgcaggcgcaggccaaagcgggtcttgtatagtacccagtagaggaagatggacaagacgatggccacccaggcaggagctgaagtgttcttgaagaagatcggcccaataaccgggatgttggccaggccagggaaggagaagtagccgaagttttggttgatgttttcggtctgccccttgttgtagatggccttgaccaggaagacggccaatggcggcgccatcaagttcaagaccgtcccggaaataacgtggtcagcccgccagttgaccgtggcaacggcgtgcagcagggagaagatgatcccgacaatcccgcccaagagggcacccagccatggagtagcggtgccgaaggttgaggcgaagctcaggttgaagacgatggaggtgaaggcccccatcgtcatgatcccttccaaaccgacgttgacgatccctgagttttcactgaaggtcccgcccaaagcggtgaaaatcaagggagctgaataaactaaagttgatgaaacgattaaggctaatacagtcacgaagttcattatgcttcccctcctttttgctggtcattggcggcttgccggccggcggtttccgccgtggcaatataggtcgcggtcttgtcagacttcttttccttgaaaaggaggccgacagcccagctgatggctacgaagaagataatggcagcgatgacgatagaaacgatttcaaatggaatcccggctgccgtctgcatccccaggccaccgatcttcaagatagagaagagcagggaagccagcaggatgccgatggcgctcatgccgcccaaaagggcaacggacatgccgtcccagccgatgtccagggtagtcgtttgggtgaagtagttctggtaagtccccagaccttgtacgaccccgcccaggccacagaaggcacctgacaggagcatggagatgatgatgttcttcttgtcgctcatgccggcgtaacggctggcgaatgggttcaaaccaaccgccttgatttcaaagccgaccgtggtcttcttcatcaagaaccagaagatgaccagggcaatgatggccaggaagataccaccgctgatccgggagccgccgaacatttcgctcagccacggaatccgcaggctgccgctagccccgatggtcttggtagtgtcggtgtcaacgcggaggctcttgttcatgacgtcctggtgcaggtattggcaaaggtagaggacgatgtagttaagcatgatggttgagataacttcgttagttccgaagtaggcccgcagccagccggcaatcccggcaaccaaggcaccggccaggctgccggcgatgatttcaaatggcaagaggatgtagacgggcaggcccttgaaggccaggccgatccagatggcggtcagccagccggcttgcgcctggcccggcagaccgatgttgaagaagccagcggctgaagagatctggaagccgatggcgataaagatcaacggggtggcgttacggatggtttccccgatcccgttggctgagcccagggcactttcaaacattgagctgtaggcctggaatgggtcatagctccagaccagcatgatgatggccccgactaaaaagccggcaataacagaaacgatcggcactaaaagccgcttggccttagggctcaccttaatcattagcggcagcctccttcttggtattcttcccggtcataagcaaaccgagttcagtttcactagtctggtcaggcttgacttcacctgattcggccccgtcgtgcaggacgacaattcggtcagacagctgcaagatttcgtcaagttcgtaggacacaaggagcacggccttgccggcgtctctttgcttcagcagctggctgtggatgtattcgatggccccgacgtccaagccccgggttggctggaaggcaatgatcaggtcagcgtcccggtcaagttcccgggcgatgatggccttttgctggttaccaccggacaggtcgctggctggcaattgttcgctggtcgtgcggacgtcgaacttcttgatcagttcccgagcgtgttcccggatggtctgttcgttcatgatcccgtgcttggagtaaggctccttgtagtaggtctggctggcaatgttttcagacaaaggcagttgcaggatcaagccgtacttttgccggtcggcagggatgtggccgacgccggcttccgtgatttggcggactggcttgttggtcaaatcctggccgttgatgacgacttggccgccttcaacatggcgcaggccagtgatggcttcgaccagttcgtcctggccgttgccgtcgatcccggccagaccaaggatttccccgccgcggatattgaaggagagacccttgactgcttcggtcccccggtcttcattgacgtgcaggtccttgacttccaggatatttttgcctagattgatgggagccttgtccagcttaaagttaacatggtggccaaccatcatttcggccaattgttcgtcgtttgcatcggcaacgctgacggtttggatggacttaccagcccggatgacagtgacccggtcggcactttccttgatttccttcagcttgtgggtgatcaagatgatggacttgccttccttggccaggttcttcatgatcttgatgaattcagtgatttcctgcggcgtcaaaacggcagttggttcgtcgaagatcaagatgtcggccccgcggtaaaggaccttcaggatttcaactctttgctgctgagcgacggtgatgtcggaaatcttagcgtcagggtcgatggccaggccgtattgcttggacagggctaggatcttttctctggcggtcttgaagtccagggccaggcccttggtggtttcgtggcctaagatgatgttttccaggacagtgaaggcctgggccagcataaagtgctggtgcaccatcccgatccccaggctggtagcgacgtttgggccggagatgttgactttctcgccccgcacgtagatttcgccagaggttggttcgagcaggccggaaagaatactcattaaagtagacttgccggcgccgttttcgccaagaagcgccaggatttcgcccttgcggagcgtgaggttgatatcgttgttggctttaaaaccgttaaagtctttcacgatatggcgcatctcaataatgtttttgatctctttttccatatgacaaaactttctgtattacttttacaaaaaacaccccgtaatattgcggagtgtttcagattgaccactatatattgtgctacttacttggagcagttgcaactttaattttaccagccaggatttgcttgcgggcagcttgcactgccttccaagtcttggcatcaaggttccccttagtgacagagacgccatcgtgagctaagccgtaggaaattaccttaccgccagggaatttgcccttgtaggctttgtcagcgatgtccttgcatgcgaaacgcagcccctttaatacggaggtcagcgtgaagttggccttcttaccgtcttttgaagtgtagttacccaggtttgcctggtcaacgtcaacaccgatgacccagaccttcttggcagccgtggttgccttgttgcgggtcttggcttcggtgaagacaccgttaccggcgttgccggcagcttggtagatgatgtcagcgccgtcagtgtacattgactgggcgattgacatggccttgtcagttgaggtaaagttgccgatgtattggtcgtaaacggtgatcttcttgcctaaggccttggcaccatccttgacaccttgcttgaagccggcttcgaagaggtccaggacgctggacttggccccgccgatgaagccgaccttgttagtcttggtggtgtaggcagcagccagaccgccaaggtaggaagcttcgttgctcttgaaggtaactgaagcaacgttcttgcggccagtgataactgagtcgatcaagacgaagttcttcttagggtacttcttggatgcggctttaactgagtcagtcagcatgtagccgacaccgtagatggtttggtagccggcttgggcagcttgagtcaggttaggggtgaagtcagcagcagatgatgattcaaagtactggtaaccgcccttgccttgcttgaggccgtgttccttgccgtagtccttgaaaccagaccaagcggcttggttgaaggagtggtcgtcaacaccgttaccgtcagtgatcaaggcgataccgtgcttggtgtccttgttgacggaagtgttagacttcttgccggagcaggcagtcaatacagcagcgattgacagggtggctgccccagcggcaaccaatttcttgtaattaaagcgcatagcgaaattacttctttctttttcttcttttctttttcatagacgaacgattatgtattaaagatagcattcagttttggaaaaagcaagagaacagataggcgaatattcgcttttttggacaaatttggagaaaaagtttttcagcggttaagaaaacggttaattcacgaacaaagcggtagctttgtatagaccagttcccggactgggaagtttaaggcagttgtgatacaattagtagcagattagagaatcaggaaagttagctaatctagggcggccgcgaggctgccttttttgttgcaagtttaagaaaaaaggcacccatcgaatgatgagtgcctttgtgttcttggcaaaattaacgaatcaggaaagttagttaattagtttctaccaggaaatttcgtagagattgttgtacttggtaacggacttgtagagtgtttttccatcttttttgtatttttctttatcatggtaagcaacagtaagatagacatggtcttcgtcgataacttgcaaaccttcgacttcagaatgataacccttgtggtcaatcttgccccaatcactcaagttgacgctgatccactggtctgcaaaggagcgcttattggctggaatcttgatgatctgcttgtggtggggtgtaaattcaccggtatcagaattaatatctggagctttttgactagagatatagatgttgccgtaatcatccatatcaaaaccttggtaggaattgattaagctacttaagttagggtagtagaacgactcaagataggcgatgttacccatattgacgtagttatcaccattgctaagtgaagcaacttggtccaaggccttgttgatcacactcagagagtagattgtaaagtagccgttgccagaattgtcaatggttgctaagagaaacttttgatggtttggtgatacggcggcttctgctctgacaaaattctccccgggatatggatgactgcccgcacggttgaggtaagccaaacgcggaaaatctaaatgactgctgtggcttcctttctgtgctttgatatcgacacgggcgatctgcttgtcccatttgatatcagttcctttcctttcatatttcttgacaccgataaaccatttgttcgccataccagcatattcccaagtttgcgtgtggcctgcagcgacatcactcaagtgtaagatggtctcagtcatatcaccagttttaccacgtacgacgtaggtgtcttcttgcttgtttctcaactgaaggcaataaatgtaagttgaaccaacattagctttttgaacgactgaatgatggtgtggattcagctctactgtcttcttgagcgaaatgctcgtagtttctttaaatttaaccataaaaattagtcctcctattataaatttgtacactggcttctgccgggtacaatgtaattttagcaaaaaagtttagcgaaagaaacatctgttcgtagaaaacaaaagcaagtcacagtctcgtgacttgctattttcagattagttattggctttctcttgacattttatgagtggagaaagtttttatttctttttcttagtatcggtatagtaatcttcgagtctgttaatatctactaagttaatccgataattcggattacttccttcttctggatctgaatagaaagtgtagagctccttagttcttaaagcagcaacatcgacatatgttcccgtagtgccgtggcctgttccttttaaccgagcatagactggttgatcggtgtccataaagtaaatgccatcactgtcagtaaattgccgtagaccatcgattactacgtatttacctgctttacatttttttgtcagattttttattttcttggttttactgtcaaatgtaaaaggatagccggacatcgtaatcatggctttttcaccatttgaatattggggcagatcgttgatcaaagagacgtttcttgctttgatgtaggcgccatagccgatgtagtagaaataatgtccgttgatcttcttatatggcagccaatattttttaccaacgaagccataattgtatttagtagcgtggtatttggtgaataaggtgaagtagcgaacgtctttgtctgtccgttcaattctatttctggttgtgtagacataactgtcttccttcaggtaaccgagggggccataaagtccgttaaaccagggcatccggttgccataacggtcatagacatagctgttgcagtttaacttcagaacgacttgccgtttgatatatttgggcgtgtattttgatgaacttgctgctgaaactgtgtttggagttgctgctaaagccgtaaaacttagtagggcagctaaagcaaacagtgtgttacgtagtcttttgagcatagttatcacctctttttgtaaaagcgctttcttaataataattataacgctaaggcgaagaaaacaagtcacgataaggtgacttgttagtatggatcagtcgtcttgcttactcttttgcgtttcagctttcttagctttctcagcttttttatacttgctttcttgccaattgatatcgagtatgttgattcgatagttaggatggttatcttcttcgatatcccaaaaaaatatatcgctatctttttttcgtaaattgcccaaaaggatatacgttcctgtatagccatgaccggtgccttttaaacgcgcatagtatggttggtcggcatcccagaaaggaaatccatcactgtcagtgaattgcctaaggccatcgaccatgacgtaatcaccatatttatatttctttttaagattagtgatcttcttggttttgctgttaaatttaaatgcatatgtagtttcatcaatcatggctttttcgccatttgaatattgagaatggttgttgatctctgaaacgtttctagctttaatataggctccatggccaatgtagtaaaagtagtggccattgattttcttataaggcagccagtattttttgccaatttcataggtatgatattttgtactatggaggaaataatagcggacatctttgtctgtccgttcaaccttttttctggttgtgtaaacgtaagtgcccttctttagatagccgaggggaccataaagtccgttgaaccaaggcatccggttgccatagcggtcatagacatagctgttgaaatttaatttcagaacgacttggccttttagatagggcgtatcgtatgcggcctgcacagtgtttgcaattaaagcagaaaagcctagcaaaaaagctaaggcaaccagagcgttacgtagtcttttgagcatgattatcacctcttttgtaaaacgatttcttaatagtgattataacgcaagggcgaagaaacaaatcacagtatcgtgacttgctttcttcagattagttattggctttctccctaacattttgtgagaggggaaagtttttatttgtttttcttagtatcggtatagtaatcttcgagtctgttaatatccaataagttaatccgataattcggattacttcttccgtctggatctgaatagaaagtgtagagctccttagctcttaaagcagcaacatcgacatatgttcccgtagtgccgtggcctgttccctttaaccgagcatagactggctgatcggcgtccataaagtaaatgccatcactgtcagtaaattgccgtaggccatcgattactacgtatttacctgctttatatttttttgtcagatcttttattttcttggttttactgtcaaatgtaaaaggataaccggacatcgtaatcatggctttttcaccatttgaatattgtggcagatcgttgatcaaagagacgtttcttgctttgatgtaggcgccatagccgatgtagtaaaaataatgtctgttaattttcttatatggcagccaatacttcttacctacgaagccataattgtatttagtagcgtggtatttggtgaataaggtgaagtagcgaacgtctttgttagtccgtacaattctgtttctggttgtgtagacatagctgtcttccttcaggtaactgaggggaaaaccaaggcattcgattaccataacggtcatatacatagctgttgcagtttaactgcagtacgacttgccgtttgacatatttgggtgtgtattttgatgaacttgctgctgaaactgtgtttggggttgccgctaaagccgtaaaactcagtagggcagttaaagcaaatagtgcgttacgtagttttttgaacatgattatcgcttcttttataaaagcgctttcttaatataattataacgctaaggcgaagaaaaaaggcacccatcgaatgatgagtgcctcttaaaaaatctgttgtttgagattacttcaagtcgcttacgctttcagcaaccttaaccttgtcgttcaagatttgcttacgggctgcttgaaccttgctccaagtcttggagtcgatgttgcccttggttacagaaacaccgttgccttcaagagtgtagacaaagtgcttgccgcctgggaacttgccttggtatgccttttcagcgatacgttcaacagcaacgtccagacccttcagaactgaagtcagaacgaagttgctcttcttgccgtccttggaagtgtagctacccaggcttgattggtcaacgtcaacaccgatgacccaaaccttattggaagccttgcggttcttgttgatgtccttggcttcagtgaagaccccgttaccagcgttgccggctgcgtggtagatgatgtccgcgccgctggcgtacattgattgagcgattgacttagccttgtcagttgaagtgaagttaccgatgtattggtcgtcaatcttgatcttcttgcccaaagccttggcacctgcttcaacaccttgcttaaagccggcttcgaacagttccaaggtagctgacttggcaccaccgatgtaacctacgtggttggtcttggtagtgtaagcagcagcaatacctgcaaggtatgatgcctggttgctttcgaaggtaactgaagcaacgttcttttggccgctgatcacgtcgtcgatgatcacgaagttcttcttagggttcttcttggcagcggacttgatagcgctggtcagttggtagccgacaccgaagatggtttcaaagccggagctggcagcttcgttggcgttaggagtaaagtcggcggctgatgaagattcaaagtattggtagccacccttgccttgcttcagaccgtgcttcttaccgaaggccttgaaaccattccaggcagcttcgttgaaggagtggtcgtcaatggcgttgttgtcagtgataagcgcgatgctgtgcttggtggtcttagtaccagttgaagatgatgacttcttgccttggcaggcagtcaacagaactgaaactgaaacagcagcagtagcgatggttgctaactttttaaatttagaaacagacacgtgatttcctccgttacaacacgaatatttgtgtgacaatcgcgaaaagatgtttatttttatcttagtttattatagtgtaaaaacagaaaaaagcaacaatataagcgaaattccgaactgcttttttgacaacggttaacaaaaaaagcaaaacctggctctcgcaggctttgctttcgcggtttatttgagcttgaatttaaccgtattgtcgttccaaattgaggttttgtattgcagctgcagcgttttggcagaagtctttgcttcgccaaccaaatttcctgaaactgaagcgcccttgtccaaggagccggcgtccagagtgttgtcaacatccgtgtcaattgcgtcgaggtcggtgttgttgccgtccgcgttcagcttgaagtcaaacggattgtagtcctggctttcatcggtgtggttggtaatcgtaatattgatgatcacgaactgctttccgctgtcaggccggttatattcgctgccttgactgaacttgacgctgttgactttgatttcatatcccttgtaagatgctttttggccgactgagtaaactttgttcaaagggttagcttcagcttttttcttagagctggtctgggacttggcggctgagtcagagccgctgtcgctgtcgcttgacccgccaaaggccccgcttccgaggaaaacgacaaccagcacgactagcagccagaaccaccagcgcttatagaacttcttcttttgtacgtacacattcccattctcatctttgatttgctttgccatgattcctattccttcaaattttttactctcacataaaccagcgacagtttaagtgtaggcttttaaagagaaggattggtgggcaggcagcccgctaatggccaaaagatgaaatcgctaccgataaagcggctaaagccgtggtcaaaaccgtggccacgagcaggtagctgatgatgatcccgcaggcccgggtaaatttggacttggatgaatggaaaaggcacatgctcttgatattgcggtagttgcaggcaaaaaggacgatcaagaaaagaaccatgaaaaaggacaggcggagcaggaaactatcagccgctgagtcgctcttggcgtccatactaaaggaactaaacagcatcaataagtagccgcaaccggctgtaagcatgcgggcgggctgatggctgcggaagcctggcaaaagccagctggaccggcctaagccagtaatcgcatccttgaattcctgggcactttggtagcgtttctggctgttgatgtgggtagctttttcaatgatttcccgttctggtccattataaaggcggacgctgggcaggtagccagtataaaggacgttcatcagcaccccgactgcatagaagtcactggctggcccgctctggctgaagccgaactgttccggggccgcgtagcccactgaccccaggatgcgggtgtcgcggtcagcgtcttcctgcatgttccgggcgatatcgaagtcggccaggatcagcttttggccatcataaaaaatattctccggcttgatgtcccggtgaatgatcggcggtgtctgctggtgcaggaccgcgaggacgtccagcagctggcagattaactcgtggatctgggcagaagtgagcttgtgggtctctaagtactggtcaagacggggagagtcgatgtattcttcgatgacggtcaggcggtcgcttttttccaggcagacaatcttgggaatcgcggtgtccagctcagccagctgttcatataaaggagcgtactctaaaggaaggacccgctcgatgtaaggggtcgggaccagcttttcaactttgaaaattgccttgtcgtccgttattttaatggggacgggattaacgtaatcgcttatttttccttgcttcatctataaaatctttctgccataatggtaacaatgggggtaaaaatggaaactgaaaaattactcgctgctttgaaagcagatcatatttctaatgtactagatcaagtggctgattacaattttgccggctatttgaacaagctgatcgaagataagggggtcaagaaaagcgagcttttcaacgaggccatgatcgaacgcagctatggctatcaaattttgaaggggcggcgcctgccagcaaggaataaggttttgtccctggccctcagcttgaaattatctctggctgaaaccaaccgccttctgtctttaagcgataacggggccctttacgccaacgtaaaacgggacgcggtcttgatctactgtttggttagggggatgtcggtgatcgatactgaccagcagctggcaaattacggctatcagagcttgaacgaagaagaataatagagtaggatggcggatattagttgttagtggaggaaagcaatgaatagcttgttttgggtaaatttgttaatcggctgcgggatgctgctgagtggctttaagcagttgccggtgactttcagctggcggaaattggcagtgatttttctggcaagcgggagtctgctcttggttgaagggatgctggtcagaaaggtgtttgaaacggcgcaggtactttttgtgattgcggttctctatttgctgctgggtcttgctggcctggtcatgatgtttgccaaaaaggaccggcaagctttcaccagcgaagattggcgcgatttcgcggccgtcttgatcatcagtgccttgctggccttctactttttgcgggatgctgcttttgacttatccagcatgctgctgccagaagcaatgtttcttgctggcctgctcctggtctcttgggccgttaaagccgggaaaaattaatagatgtaaaagtactgagcctctgctcagtactttttatatccactttataaaaaataccatttgtgtgaaaaaggagtatgatttcagtaaagaataaaaagtgaaaacaaggtgagtgaacaatgaaaaaagaaattccaactctgccctttaattcctcgcaaggaataatcatgctggcggccagcatctatagcgtggccctgtccttcatagtccaagagtacgtctccagccccgcagtcaacagcttggtcaacaacatcagcgttgccgtaagcgtggcctttgctctggctatcggcagcttcgttgaccagcatggtgcctggcggatcctttttttcaccaccttgctttccggaatagcctgcctgcttccgccgctgatttttgacctggacaaggtggccttcatcggcgtcttaattgtcgtcgacattgtcatttccatcatcagtgagttcgacaacgccgccagaaccgtctatatcgtccgcaaggagaaccgggaggccatccccttggtgcagcaggggatcagctcgctgaactctatctcctcaattgtcggttatctgctggttttcgtgaccctcagcttcgtggctttgcccaactacctctacctctgcgccgccctttatctgctggccctcttaatctggctgcgggtaccggctgatcaagttgtggcttccgcccaaccctccttcagcttttccatcctagcccgcgatatccgggaatcagtcagcatcgtctttaaaaacagcattgccttgatctttgccgccgaagtcctttttacctgccggaaccagctggtcatgagcctggtgattctaaaaatcggccgctatgatccccagttcaagtcaatcctggtgattggcctgggcatcatcttggccgtggcagtcggtgctggcctcaaccgggccgtggtcagcctgcctgctggcctcaaaaagctctctatccttaccatgatcgttctttctgccggggcgacctacctgagcggcggggcaggcagccagctgtctccctttgttttcggcctcctgcttggcagtatttttggtaccggcatccccgtctacacctacctggaaaccagccggatcatgaaaactcccgccgcctaccagggacggagcacggccctgctccgcttcgtgggcatcttcttgaccctgatcatggccctggtcctgggcttctttgaaggccgggtaaagagcagcgtggccctctacttctcagctggcgccatcatcctcctcgtcatcttctgcctggtcttgctccagtccgcccgcgaaaagaacgcctgatacgcaaaaaaatctctgagctcctgctcagagatttttgttttgtttacttacttgcttgggtggcttggtacggaaatcttgccggccagaatctggctacgggcagtttgtgcctgctcccaaactgagtcagccacgtagccccgggtcaagtaaacaccgttgtgcttcaagccgtaaaccagctgcttgccgcctgggaacttgcccttggctgccttggtagcgatgtccttgactgccacgttgaccccggtcattacgctggtcaggcagaggttggacttcttgccgtccttggacttgtacttgcccaggctggactggtcagagtcgaccccgatgacccagaccttcttgctggagttggcagccaggccttcgttgacggacttggcttcactgaacaagccttggccggctgaacctgaagcgtggaagattacgtccgccttcttggcaaacatagccttggcgattgacttttccttgtcagcagccgtaaatgagccgacgtactggttcaaaatcgtgatcttcttgcccatcttcttggccgtgtcctgcacgcccttggcaaaaccagcatcaaacaagtcgacgatgtccccgtgaaccccgccaatgaagccgactacgttggtcttggtggtccgggccgcaactaccccggccatgtaggaagcatcctgggacttgaagttggcggaagccacgttcttttgccccttgatcacgtcgtcaatgatgacgaagttcttgtcagtgtgcttcttggctgctgaagcaatcgcgcccttaagtgagtagccaacgccgaaaatggtcttgtagccggccgcaaccgcctggttgatgtttggcgtaaagtcagaagctgaacttgattcaaagtattggtagccgttggtcccccgctttaagccttgggacttgccgtaagctaccatcccttcccagccggactggttgaaggagtggtcgtcaaccccggcgatgtcagtgatcaaggccacgctggctgagctcttcttgttggagccgccgccgttttgcttggcccctgagcaggcagtcaaggcaatccccgctgctaaaacagtaccagtagccaaaacttgcttgaatttgattttcttcacgataaaatcccccttaaaattaacacgattacgattttatcaatatttggtagttatgtcaaaagggcacacacaagataaagtgttgatttgacgggattctcgtttttgccaaaaagccctcaagatatatggctctaagtgggaagggcatactagaaaaaaacaaaaaatcacccggattttccaggtaattttaaaaaagttaaaagacatttagtagtttgcaaattgccaaggcgatgtagccggccacgatcaaggccatcacggtgaagtggcggaggcggttcatgacgaacatgccggcgaattcccgcaaaaccgcgttgggcaggtagtaagggcgggtgtaagagccgatcccgttggcatccagccccgcccttttcgcgtagatggctgaccggaagacgtggtagttgctggtaaagaagcaagccttgaagttgtcattgccatagtcgttgtaggccacaatctgagaaaattccatgttctgctcggtatttctggactggtcttccagcaggatcagttccttcgggaccccccgcttgatggcgtaagcggccatggctgccgcttcagaaattttttcattcggcccctggccgccggacatgatgaacttgggcaagggctggcccttttcctgctggtggtaggcaaactggatggcccggttgattctggccgcctggatgttggaaatctggtccccatggatcaggcctgctcccaaaacgatcaggtagttctgctggtagcggcggggaacaatctggtatagcaggaggttgaccaggaagttgtacatgacagctgccaggtagaccgcgaccgtcgggaaaatgtccaggatgaggcgcaggccggtcggcgtgctgcgggtgaagtggccgatgaaaatgaagacccagaggcccagcatggccccggccaggatcaaggtcaggaggttgggcagggtatggctctcatgcttcaagaccacataggagttccataaaagcaggatccaggagaaggagacgatgacggccacggttactgccaggatcgccagggcccagaggtagaccttgcggaagctgggcaggttggtggcatagaccaggaaggtgaaccaggcccccagcgaagcgatgaaaaaggtgaaaaagaccccgttgatcaagcggcgcgggtcgctcagccaggagaaaatgaaggttaccgcggcaatcgccaccaaaatggtaaagtagctgaaagcccggttctggctgaatagaaatagcagtgtgtttaatccggatggcattttttaggtcctcgtccatatcgtttagaaaattggtcaaactttattataatagaggataagaatttttttgagacaacaaggtgacaaacatgaaaaaaattgggcattatctcttttacttgatcgaaatcgcaatcgtgttcgcgctgtacacgaccctgcaggagttttacttctacccggacatctttggcttcgggtcggctgaggccttcatcctggccctctcgaccgtcctggtcttctggttcagcttctggctctataaggggcagctggatgatgacaatgactggggcttcagccaggacttccactgggattggcggaagctggccaccgcagtcgggggcttcttcttgatgcagctgctctacatcctcttgatgaacttgatcggcggcggagtctcagtcaaccagcagaacctggatgacctccagcagacggcgggccccacctacaatatcatggtggtcttagttgccccggttatggaggaaatcatcttcagagggatgttcttcaacctcctctttaaccatgccggcaaggtcgccaagtgggcggggatcctggtttccggtttcttctttgcctttgcccacaatcccttctggtcaccatatctcctggtttactggatgatggggtcagtcctggcctgggtctacatgaccaccaaggacctgcgctactccatggccactcacatcatgtggaacatgctcagcattttaggctaggccaaaaggaaaaaaacaacaatacaacaaaaagagaaatctgtttggagatacgaaaagcagcgaagcttggcttcgctgctttttagttttacgcttcgtcttttctgatgtagtggttgagcatgattggtgagagaaccgtcgtcaagatgatgaccagaatcaagctggagtaaatgtcctttgggaaaaggtggtgggcaatcccgatctgggccacgattaaggccacttccccccgggaaaccatcccggccccgacaatgctgccttccagcggcttaaggccgaagatttctgatgagtatttgccggcccagtacttggacagaacgcccaggaccgtcataaccacgatgaagaggaagtcctggctgatggaggcaaaagtcagcgacaggccgatgttgacgaagaaggttggaataaagactgagtagccgatcgcggagactgaggaattgacttctgcttcctgcttggtctgccggatggccaggccgccgaagaaggccccgaccacggcactcaagccgactaattcggcgatgtaggccatgcccaaagacaggatcaaagaggcgatgaccacagagtagctgacattgattttttccgccagctgcatgaactttggcgcgatgaacttgtaaaccagccagatgaagacgaagtagagggcttcaaagagcaggttcaggaagaagttgttggtcagtcctgacttgccgccttcatggctgaaggtggtgaagaggctgaggacgatcaccgccaaaatgtcgtcgactaccgctgcccccaaaattgccgtcccggccttggtctgcagcttcccggtcgcccgcaggacttccacggaaatggagacgctggtggccgcgaagacgatcccgatgaagagggcttccaggaactgcatcccgaagagcagggaggccccgccgataaagaggatagggaggataaccccgaccgtggccaccgtgaagctgatcttaaagtacttcttcagcaagtccaggccgctttccatcccggctaaaaacatcagcatgataaccccgatgtcggagaagagagtcatcgtttcgttagggtggatccagcccaaaagagccggtcccagcaggatccccgataagagctggccaatgaccgggggccagttgaagcgggcaaagacttgccccagcagggttgtcatcagcaagaccagtatcagttgtccaataaattccatattgacctccgtttcaaaaaagggctggaaaacaaaaaactcccaagaaaaagcttcttgacccaaagaagcaaattcttgaaagttttgaaactccaacctctgaaaaatgttatgttaactaataatagtttagcaagaaattggagaaaagacaaattttattacgttgggggtgagaaaacttggcatttcaatgccgagttgaatcgccacctttttaccttagtatgtgaacgttagtttgacatgtgatataatataaatagctagagagctgtaaatactgaaaggaggtgcaactcatatgactaaatacgaattcagaaatgatgagccagatatcatccatgggcgaggctacgtatacaacctcaattaccacatcgtctggtgtaccaagtatcgcaaccaagccttggctaatccaattattgtcgattcgctcaaggacaagatccttcagatctgccgtgagaatgagtatacggtcaaggctctggaaataatgccaactcacgtgcatattctgctgtctgccaaaccccaagagagcgtgacaaatatcgtcaagaagctcaaaggcattacggccaagtggctttttgaaaagtacccagaaacgatgaaggaatacttctggggtggtcacgtctggtcaccgagctattacgcaggaagcattggagtgacaaccgaagctgtcgtcaagaaatacattgagacgcaatggaatagaccatttcactaaacgctagaaaggaggaagcgacatggcaatacgcaagcgcaagtcagatctgccggaatatggagtgaaaatcagattgtacccgactctcgtacaacaagccaaacttagacagttctttggcaatgaccgcttcctctggaatcaacttgtcagcctctatcagggacgctacaagaacaacaagagcttaaaactgttaacggaattcgatcttaacaatctgcttcccgctttgaagaacgaatatccattcctcaaggcaagcgacagctccagcttccaaatcgtgaccaagaacatcagcgatgcctgggaggcgttctttgccggaacgagacgcaagccccgcttccactcaaaacataacgccaagcagtcatatactggcaagtcgtcaagcatccggatcatgggcaaaagaaacatgttcctgccgaagctgagaagagtcagatcatcgaaaaccggcgtcatcgacggcaagatcaagcgctacacgatcagcatcgatgcttgcggtcgctactggctttctctcatcgtggagaaaaagaccgccttcttgccaaagactggcaaggcggttggcattgacgtggggctgacgcacttggccatcctgtcagacggcagaaagtttgacaggttctcatcggatttctgcgagaaacaagcagaaatctggcagagcaagtcatccaagcgccgtcatttggctttggttaagtcgcagcaggacgtcaacaaaaaggttcttggcgcaaaaaagcttgtctgactatcgcaactggcagaaagccaatgtcgccaaaaaccgctatatgagccgcatcacgaatcagcgcgatgactatctgcacaagatcacggatcagctggtaaaggaatacgacgtcatcgtcattgaagatctcaagatcaagaacatgacaaagaatcaccaccttgcccgctcaatcctgcgtcagtcatggggtaaattccgcgaaatgctggaatacaagtgcaagaagtacggaaagattctcatcaaggtcaatccagcatacaccagccgaatctgctcaaaatgcggcaaggatacgggcaagaagccactgtcagtgcgggaatgggactgcccattctgcaaggcgcatcatgaccgtgacatcaatgcatcaatcaatattttgcttaaaggacttgcccagctctgagagagctgggcaagcaaaaaaatcgtaccgtcaaacagcagtcaatgcggcttggcggaatcgtcggagggggcacttccgtgataaatagactgacctctgtttttgcactgctgttcagcttgctggacagaaccagtaaaaaagcagtcttgacttcggccaatcctgcttgcaagaataagttggttgttctcagaagctgtaggctgtgcgtgagcactagcctataaagaaacccccgaccttggtcgggggagcatgtcataaaccggtctgttttggattcttcggttcggtcttagccaaaagggccaggcagatggtgatcatgtcgaccacttcctgcaaaacagcgccccagaaggccggaataagaccagtgaaggccaccagttccagaatgataacgaccacgatggcagtgataatgtcgattttagccaccttcatggtgtgcttggcaatggccacggcatcgttgatcttgctcaagtcgttgaccatgatgaccgcgtcagcactttcgctggccgcgctagcccccttggctcccatggcaatgccgacgtcagcggctgtcaagcttggcgcgtcgttgatcccgtccccagtcatgacgactgggcggttttcaggcgccacgttcttgatggcttcaatcttctgggctggcaaaaggccggcccggacgtcatcgacgccggccgcgtcagcgatcgcctgggccacgtccttgttgtccccggtcagcatcatgatgtgctttgcgccttgtttgcgcaggcgggccaaagtttgcggagtttctggccgcagctggtccttgaaggtgatgcagccggcgtacttgccgtcaactgaaacgtagacagcagtagtcttggccttgtttacgttagcgtcaggcgccacgtaggaaagcttgccgaccatgacgtacttgccgtcaacggtcccgctgaccccgttaccagttgattcctgcaggttgcttacggcttggatcaagttcttgtcagtcccttgaaccagggacttggcgatgatatggtcggattgctgctcaaggctggccgcgtagctttggatggtttctttgtcaaagccgttttccggcagaacgtcttggatgaccaattggttctgggtcaaagtaccagtcttgtcgaaggcaaaagtcttggccttggctaattgttccaaggttggaccggacttgacgatgatgtggtgcttggacatggagctcatcccagctaccagggcaactggagcggcgatcaagagcggacatggggaggcaacgaccatgacttccgcgaagcgggtgaagttcccggtcgtcacccaggcagcgatcccgataattaatgaaataatggtaaatggcacggcgtagcggtccgccatcttgacgaacttggccggctgggcagcagaagacttaaccagttcaacgatggtctggtattcagagtccttggccagcttcttgacttccatggttacggcggtttccccgttaagggaaccggacatcaagtcgtcgccgaccgtcttgtccaccggaactgattccccggtcagagatgactggtcaaaggtagagctgccttcaatgatggtcccgtctactggcacctgctgacctggcttgattaagacctggtcgccgatctgcaggtcgtcaaccttgacttcaactaccttgccgtcaaccagcttgctggctacctgcgggttcttgtccaaaagggcccgcagttcccggttggcctggccggtcgcgtagtcttccaggctttcgccaccagtagacatgaccaggatcatccattcagcccagtagtcccgggtaatcatcatggagatgatcgcgattagggccaggacgtcgatgccccagtgcccttctttcaagtccccaaacatttccctggctaaggagatgctgatgtaggcaccagcaatgtcgaacaggacctccgcgattcccggaatgtgcaggacattgtcagtgatcagtccaattgccccgagaaccaggacaacaatgaatttccattggcgtttcatgaattattcctcccaatagtaaaaacaaggagtgtggacacacacttcactttttatcttaaaagacaatatagattattagatatattttagcacaaattggatttcttacactgaaaatacttatgattgtaattgttaattctccgcttctaatttaaggacctgcttcttgtcgaccgtgacatagtggtcgtcaaaagtgtgggccaggtagttgaaggccttgaaccattctcgcctggtgatcatcccttgaaagaccccctggtcgtcgacaacggggaggaagttgttgtcaacgagcaggtggagctgggtctcgatgtctttttccgtaaagttgatggaaacgaagtcagtctccatgacatccttgaccttgtacttgttcaaaggcttaacggaaatgccatccaggtccagcatcttgtcggtgatcatggccaggcttaagaggccggtgatctggcccttcttgttcaagacgggaatcttggcgtacttgaccttggttaagatcaagaaggcatggtaaaggggattgtcttcttcaacgatggcaatcttgctggccggaatcaaaaaggagccggacttttccgcgagaacgcgttgaatagctgctgaaatcatcaacctaattccttatattttttctatgctaattttttttgacataatttaagtataaaactatttgggaaaaagaaaaaaagaaaaaggcctgctcgcgcaggcctaattggttttcatctactttggaggagtaagaatgaatgaaataaaaaagtgggagtacttgtaacgagttctaccagctcgttacatgtttatcatacagggtaattctcaataaagggtttggaattccttaacaaagagtaaagaattgcttgcggatctataaagacctcttcaagcaacaaaaaagctcacgcaacgcacgtgagccgaaagggatagatatgaatcgactatggagtcagtcgatatttttcatttactttggaggagtatgaatgaaaaacaaaaagttgagtgtagtaacaagctctcgcttgctacggtcattatattataccggaaatgtgaacaaagtatgatatttagcgaaaaaattcaaaaaaagccaaaaaaattgcttcgcccctggccgggcttgttaagatagaggggaattttcttttttaggggaaaaattgcagaaaaaaggccggaaggagggccaatgggcaaaaaagacagaaaaagcggaaagaaactagtcagccggaagaagcaccattttcaccggaagctgcgcctgctgatttttaacctaatcctgctggcgggcctggcagcctggagctattactgggcctatccggcttacagccagtggcagatgaagcaggccatgctggcggcccggcccaagctgaccagggccaaggacggaaccagcaccagtccggcctggcacaagctgacagcctaccggaaggcgatccgggacaattacagtttcgtctaccaggccgcctaccagaccccgaaaaggacgacggtgggccaggacgtggtcatcccgggcctcatttcgacgcggagctatgactaccaggcgaaaaagattacttcagccagcgccatgaccccccaggggatcgccgtggtctacaattatcttttgatcacggcctatgacggccagcaccggcatgcctcggtcatttatgttttagacaaaaagacggggaaatttttgaaaacggtccgcttgccaggccggcagcacctgggcgggattgcttatgaccctaagggaatgcagatctggctgaccgggtcaaaggacgggcagtcagccttgatgtccttctccttggccaaattgatcgaatacgtggccagcgccaagaccagcgaccagctggtttatgatcatgagattccgatcaactcgatcgctaaggcctcagctctgacttattacgatgaccagctctttgtcggctatttcaatgaaaatggccatggcaaggtcgccagctataagctggcccggtccggccagtacaaaaacaccatcaccaccagtgagatttccagtatcaacgagtccgtttcctggtctgacccagacgggacgaccagtatgaacaagcagatccagggcctggccatctacggggacaaaattttcctcagccagtcatatggcagccaggattccaagctctacatcttcccgatcacggccgtgaacaacctcgacgagtcaaatgccgagcaggtggtcaggatgccgccttacttagagcagatcacagtctataagggccagctgctctgcctctttgaatcggcctccagccagtatgcccgccaggatatcacggtcatggaccggaccctgtcggtcaatatcaacgccctgctggacaataactgataaatagcgaatatcatataaaggagacaataaaaaatggatagccaacttgctaagaaaatcatcatcgacgtgcagatttccggctggtcctgcctgatcccggccagcggcctgctctacctctaccaggtcactcattacgccagcttcttgtggggcctggccctggtcgttttgtacgcagcctacgtgctggcgaccgccaagctggacaagtggcagtatccaagctacgttttgcggatgagcttgatcgcgatgttcttcgtcggcttactgccttcaattccgcttttgttctgctacagccaggagcgtaaggccggattgaagtagttttttgcaaaaatataaggtgaaggactagttttttgtgttttttaatacgttaagaaatggtaaaatgtcagaagactgtgaacgaaatatgaataatgtgttacagttgactgtaataaaaaagtaagttgtgttgtttcattctgttgggatagcagactctggtgaaaagaagaggagatgagcttaatggaaaacaagacaccagtcagccgggggaaggtcatccggtcttttatcctgcgaaccctgctttacagcctcattttattaggcttgatttatttgtatgaatattgtggcttgggttcaactggctttatttacaatgaattttaggagagttgagtggaaatgagaaatattgtcaagacgatcgatgagatcgcgcaaagagaaccagaccgggtagtttacgactacctgggtcaaaagaacacctacgctgacttgatcaagcgggctaacagctgggcagccttgttaaaggaaaaagcaccggccaaggtacccgttatgatttggggcgggcagacttttgacatgctggcttgcttcttaggttgtgtaaagagcgggcactgctacgtgccaatcgccgactattctaacgctgaaagaatcgacctggtcagagaagtctctgcctccccggtcttgatcgccatcagcgacttgccggaagtcgacctgggcgacttgaccctgcttaagccggacgacgttccggaagaggggacagcggatgaggcagactacgtcaagggcgatgaaaacttctacatcatttgtacttccgggacgaccggtaagcctaagggggtccagatcagccacgacaacctggttagcttcgttgactgggaactgaaggactttgacctgccggaccatccgcgctttttggcccaggccccttactcatttgacctgtcagtcatgagcatctacccggccctgttgagcggcggggaactggttgttttgcctcacgaagtgacggaaaactttgcccagctcttcaaggccttgccggaaaccgacgtaaatgtctgggtgtcaactccgtcctttgcccaaatgtgcttcctggaccggacttttgacgcagaccaccacgccggcctcagccacttcctcttctgcggggaagaactgccccgcaaggaagttgaaatgctcaagaaacgcttcccggacagccggatttttaatacctacgggccaacggaagcgaccgtggcagtcacgcaagtggagatcacccaggaaattctggaaaaatatgaccgcctgccaatcggctatgtcaaggaagatacggaaatcactattgacctcagccagggcgatgacggcaagagcggggaaatgatcatcgccggcccgtcagtttccaaggcctacatcaataacccggaaaagaccgaagaagccttttaccaggaagacggcgttcagcactaccggaccggggacgtgggctactttgacggggacctgctcttctacaagggccggatcggtttccagatcaagttcaacggctaccggatcgagctggaagaaatcaacttctacatgaaccagaatccgctggtccgccacgcggttgctgccccgatctacaagcctgaccacacgatcaagcaattggtagccgtggttgagttaaacgacggggtccgccgcaagttcgctgaagggaccattaccaagcagatcagagacggcctggccaaggacgtgatgccgtacatgatcccgcagcgctacctttaccaagacgccctgccgatctcccagaacgggaaggtcgacatcaaggcggtcatcaaggaggttaaccaggcgtgataaatctgcaaccatatgaaaacccgcagtactttgtctacctgttgatcgcgcttttgcctttgatcatcggcctttacttcggcaagcgctacaagtggtacgaagccctggtctccctggctttcatcttcctcatcttcgacgcggacaagtggcagcagggggtaaccttgatctgctatatcgtctaccagttcctggtgacttttgcctaccagcactaccggaagaagacggggaaggccaataagacctgggtcttctgcctggccgtgatcctggctatcctgcctttggtcggggtaaaaatctggccgatcgtgccccacaagcaggggatcgacttcggcttcttagggatttcctacctgaccttcaagacggtccaggtggtcatggagctgcgcgacgggacgatcaagcaggtggatccggttatgtacgcccgcttcctcttgtttttcccgaccatctccagcggcccgatcgaccgctaccgccgcttcgtcaaggactatgacaaggcgccgagccgggaagactacattaaggacctctcttacgcggtcagatacctcttccagggcttcttgtacaagttcctactgggctggttcttcgggacctactgcctgccataccttaagcagcaggccatcctggccgggcggatgtatcctttgcacctgtcctggtggcttttaggggtcatgtactgctactcaatgtacctgttctttgacttcgcgggctactccctcttcgccgtgtcgatttcctactttatgggcatccacacgccgatgaacttcaacaagcctttcgcggcccacaacatcaaggaattctggaaccgctggcacatgactctgtccttctggttcagagacttcatcttcatgcgcttcaccttcttcgcgatgaagaagcgcttgatcaagaaccggaaccgcctggcgcaagtggcctacctggtcaacttcatggtaatggcggtctggcacggtttgacctggtactacattgtctacggtctttaccacgccctggccatcatcatcaacgacatctggctccgcttcaagaagaagcacaagctggtcaagcacaacaagttcactgaagcggtggcaattttcgtgaccttcaacgtggtctgcctcagcttcttgatcttctcaggcttcctgaacaacctgtggttcaacgtgccgctgggcaagtaatttcttaaaaaatcaacagaaaacaaaacagaaaaaagatctaaagaaatagatttaacaagaagaggaaaattatggatattcaaaagcaaatcgttgacattttagctgaagcaactggtgaagacttctcagacaacatggaccaagaactctacgagagcgggatcatggactccatggccactgtgcagatgctcttgaccctgcaggaaaccttcgacatcaccgttccggtttctgaattcaaccgcgacgactggaacaccccgaacaagctggttgaacaggtgaagaaactgcaagatgaagaataagacaaaactttggctgatctttgggccagtcatctgcgcggtgctcttgctgatggggatcttatccctgccttgggagcggaccttctcaaagggcagccttttccaggccgccgcttcgcagaccacgactgtcttcaagggcaaggccatgcggcagaaggcctataagcagggctatgtgcctttctacgggtcaagtgaactgtcgcgttttgacaacatgcacccgactgtcctggctaccaagtaccatcgttcctacacgcctttcctgcttgggggaccgggcagccagtccctggctcaatacctggggatgcaggaggcgccaagcaagaaggccgtggtgattatttcaccgcaatggttcacgccccaggggcagaacccggatgcctttaccctctactactcgcctctgcatgccagcgactttattttgaacgctaaagacacggaagctgaccgctacgcggcccgccgccttttgcaaatgccaagcgtgaagagtgagcacgtgatccaccatgccctgctggaaatcgcggccggggtggggatctccaagaaggagcgctactacctccgctggcggcggcagatctactccacggaagacaagttctttacttccctgcagctgcgcgaccgcctgccaaagattgagcagcagggggccaagctgccggatacctactcttacgagggcttgaagaaggcctcagagaaggaagccaagaaggataccaagggcaaccgctttgggatccggactagtttttacaaaaagcgcttgaatgccaagctgctcaagaaactgaaggggagccagaagaagttcaactatgttgaatccccggaatactcggacttcgagctgctcttgaaccagttcgccaaggacaagacccaggttctcttcattattccgccagttaacgccaagtggcagaagtacactggcttgtcacagaagatgtatgacacggctacgactaagatcaagcaccagctgatcagccagggctttgacaacatctatgacctgtccaaggacggcaagaagaagtacttcatggaagacaccatccacctgggctggaacggctggctggccgttgaccaggcagtcaagccttttatggagcagaagtacgcggaaccggaatacgcgattaacgactactacctgaccaagacttggcgggaaaagaaaaagctgccgacggtggctttgacgaataaagacgtcctggcaaaattaaaaaaataagctttcggggcgaaaagattgtccgaaagccagtttgagtatataatctatcttgtgtcaaatgcttaggctgttttctccggtagcgaaaacagcccttaatatgtggtttgctttggcacgcactgtgtgggcctgattccaatgttggtggaattgggcttttttgtttgcctattcaagccagtcgtagctgctgaagaactgttccagctggtagtcgctgccgtcttcgctgtccttgagcagctgggcgatccgctttttgcccagttttttgaccagcagctgtttgacggcctggttgatgatggcgtccctgtctgtcccgctttggtcttggtaggcctgaagcaggatggccagttcgtcgtccaggttgaatttgactttagtcatgtggtccacctcctcactctttttagggaaattataacattcttaagcatttttccgcccttagagggaagaaaattgacctggatcaatttttgctgagaaaaaacgtgatacactcaaattatcaaaaaataattaattccgatgggaggtaacaatatggttaaaatgacttttagtccggaagctggagaatttttgcaaaagaagctgggaaacaagccagtcttgatcctggctttaaatgacgggtccaacaagtactcactgcaaggcggaagttgcacgatcggggctaacttccagttcgtcgccctggaccaggcagacgcggactaccaaatcaagatcgacaacgatttaggtctagacttgtacacgggccaggcggaaatgggcttcttggatgacagcttgagcgttggcgaacagtacggtatgctgtccttgagcgacggcagcggcttgattgatagcgcggtcggcgtcaacgtttacgagccaagcaaacttaccgctgaacagattcaaaacggcgccagctgctaagaacgtgaaaaaaacatgacttcggaattttccggggtcatgttttttgttttgcttgacagaagctgggagagggattaatatgacaacatgtcatatgacaagttgtcatatttttgcataaggagacggatagatgacagttcttgaattgaaagacgtcaaaaagtactacaagatgccgggcgggggccagtacgaggccttgcgcggggtcaatgcgaaatttgccgccggggaaatggtcgccatcgtcggggaatctgggtcaggcaagtcgaccttgatgaacacgatcgggggcctggactctgactttgaaggggccattttatacgaagggaagaacctgcgtgatttttcccaaaaggaaatggttaactaccataagaaatcaatcggttttatttttcaaaacttcaacttgatcccccacctggacttgatcgacaacgtgtcaatcgccatgaccctgtccaacgcggatgaaaaaacgcggcgcggccgggcggaagagctcttgacccaggtgggcctgaaggaccacatgcacaagaagcccgatcagttgtccggcgggcagaagcagcgggtggccattgcccgggctttggccaatgacccggacgtgatcatcgccgatgaaccaaccggggccctggacgcggacacgactgacgtgattttgaacataatcagagacatcgcggcttcaggcaagctggtcctgatggttacccactcagacaaggtggccagccactgcagccgggttctgcggatcgaccaggggcagatcgtcagcgaccaggaacaaaagcccctggaccaccgcctggagcagagaactgaagttaagatccagcagatgagcctctttaaggcgatctctttggcttttaagaacatgaaggccaagtttggccgcaacgccctggtttcaaccgggatggggatcgggatcatgtccgtaatcctcatgctcagcctgggcaagggggttacctcttatgtcagcgggcagatgagcgcctactccaaccccctggtcgcggaaatccagaagacttccagccagaagatgcgccagcaggggatgcaggcccagcaaaccggggacaaggcagccctggccaagcagcagcaaaacaatatggcctctttgtccgggaccagtagcgcttcggcttttagcaagcaggacttaaagaagctggagaagatcgcccatgtcaaaaagctgcagaagggctacagcgcgatttccctggggaccaaccagctgaaatacggcaagaagacggccagcatgatctaccttaagacggtcaatgatgggatcgccaagtcagaggtcaagaagggccgcttgcctaaggctggcaaggacgaggtcatgatcgacagcggcagcgccgacaacttgggcaagaagatcttaggcaagaaggtcaaggcaagtttgcagatcgggaccaagactatcaccaaaacggtcaaggtagtcgggatctatgaagcttccggttccggccaggtcagcaccctgcttttgccctacagcgacttggcaaaaatcttcaaagacaacggcttgagcttgaaggcaaacgtggtctacttgacggcaacggacaagcagtacacttcttctatcaagcaggcagccaaggacaagggctttgccggctcaatgcaggagcagatgacggaaatgtttgacagcatcttgagcgttttgacttacgttctgacggctatcgcggcagtttcccttttggtttcagctatcatgatcctggttgtcttgaatatctcggtagtcgaaagaacccaggaaatcggggtcatgaaggccctgggtgcccggcgcaaggacatccggcggatcttctccagcgaagcctttttgctgggcctggcttccgggattgtcggcattgctttgacctggcttttggcccaggggatcaacagcttcacccagtcagcctttaaggcggccgtggtcagcttgaccccgcaatacgccttgactggcttgctcatcagcattgtcatcagcatgatcgccgggatcctgccagccaaccacgcttccaagctggatccagttgaagctttgcggaaggagtaaaaaatgcccagccagacttttttcaacctgcctaaggaaaagcaggaccggattatggcagcggcccgggaggaattttttacccacagcttcgatgaagcttccatcaaccgcttgatcaaggcggcggggatcccccgggggagcttttaccagtattttgcggataaggaagacgtctacttttacctgggtgaccagatcagccagcggatgatcgaaggcgcccggaaagaattagctgcttacggctatgatccttttgccctggccaggaaggtcctgccccagtggctggatgaaatcttctatggggaaaacgcggccttcttctaccggaagattgacatgctgcactcccagcaagtgccccggcccaagcaggcagaagacccgctggcctgcctgtcggctcaggaaattgccggtttgacagctaaggttgctttgcaggaccggactgacttgaaatttctcatgcacagcctgctcttggccttcatcagctgccttagtgaaggagcagaagactatgaagccggccggcccgtcgatacggccaagctggcccaagtcctggac

SEQ ID NO: 2170 - DNA, 114649 bp, Unknown
  gut microbiota DNA sequence
acttaataaagcaagaaaaagagactttcattataaataaaagaaactttctaaaatatcgggtataatattttatagatccgatatgacagaaagatgaaaaacatgaaaagacagccgcaaacaatcaagagaatcatccaggcattggcctgcggtctgctgcttttgctagcgaccagcctaactgcctgttccagcaagcaggagagcagctatgcccgggccaagcagtctaagcagataacctggggggtccggccagacaccaagctgttcggcttgaccaacatcaagaccggcaagatcgaaggttttgaaattgatctggctacggccatcaccaagcagatccttggccctaaaagcaaggctgtcttccggccgatcacggaaaagacccggatcacccttttgcacaacggctccctggacgccgtcatttcaaccatgaccatcaccaaggagcggatgaaggtgatcgacttctctgacgtttactttaacgccaacgaatccatgatcgttaagaagtccagcaagatcagaagcattgctgacttgaataaaaagggagtcgtggttattgccatcaaggggaccgacgtggccaaccaggtggctaagctggcttcaaaggccagcgtcaagcagtttgacgactacgggtcagccttcaacgccttaaaggccgggcaaggggatgtcatgatcgacgacaacgggattttggctggtttgatcgctgataccccggaattcaccttgaccaaggcctctttagctgaggagccatacggcatcggggttgaaaagggccagaccgaaatgcgccaggcgatcaatcaggccttaaagcagctgcgggccaacggaaaatatgaccagctggtcaagaagtggttcggcaaggtctccggctttgacgtcaaacatgcagaaagccagaaggttaagattcaataagacggaaaaactaatacaaaaagtaaaaagctaggagcatctgctcctagctttttagctagcacgtaaattatttgtattttagtattttgatttagatttaaaggatagcgccgacaacgatcaggcagaggccggcaagcgttgcaaccagttccttgccttgcttgcgttcgcccagcagagtcatcccgccgatggtggagatgattacgctcagctggccgtagatgaaggcgttggtcaccccgttgagttgagcggagatgatgtaggcgtaagctgcaatcccgaagctgatgccggcaaagaggtcaaggtagctggtcttttccttgaaggcagccttgttgccgctgaaggccaggtagatcacagaccccagcaggatccccagggtttgcggcaggaacatggattcagcgtctgccataatcgtcttcgggaaggcagagtaggccaggtagccgatcgtggtcaagaccaggaagaggatgtccttgttggtggtcttctgagtgaagccgtcgcccttttcagtgtaggcggtcaagatgacgccgaccatgatgatgaccagggcaatgatcccgaagataaagtcgttgctggtcttccattcaccaaagatcaaagccccgatgatagtattgccgaccagctgcaggccagttgagatcggcatggtcttgctgaccccgatccgggtgaaggagatgaactggccgatttgaccgatcgtccataaagcaccggacagaagggacaggaagaaaactggcatggaaatggccggatgctggattaaagtcacgatgatgccgacaatagtcgcccccatgccgacgccgaagatctggttggccggcttgctgtttggcaccttgttgacaatccaaggcataaccccccagccgatggctggcagtaaggcaatgatgatattcattaattgaaaactcctttaactaataatttgtcgaatagttattagattaacggagttttaggaaaatagcaatagaaaacgccatgaaaatgtcaaccgttttcagaaaacggttgacaaggaaaagacgctttgcataaaacaaaacatcttttcaaaaaatatgagctaatcgagcttgctgaccggcaatactgtattaatcaatatttgttctgtaaagaccgacgaccttgcccaaaatttgtacatggttcaagataattggatccatggcatcattttccggttgcaggcggtagtggaggtcttctttaaagaagcgcttgactgttgcttctccgtcatcagtcatggcgaccacgatttccccgttctgggccgtggtctgcttgcggacgatgacatagtccccgttcaagataccggcattgatcattgaggtgccgtgtacccggagcatgaagagctcaccggcatcactggccaggttcggtggaagcgggaagtagtcttccacgtcctggacagccaggatcggctggccggcggtaacaaccccgatgaccggaatgtctttaggcttgatgcccaaggcgtcaaggccggcgtgggtgatttccaaagcccggggcttggtggcgtccttgatgaggtagcccttgcgctccagtctggtcaaatggccatggacagtggaggttgaagacaggccaactgccgcgcagatttcccggaccgtcggcgggaagccgcggttttcaacggtatcgtagatgtattgcagaatttctaattgttttgagtcgtgagttgccatagttacttttccttcgtcaaaaatcttattgtcggttattacttattttagcaaatattcgggaagtttgcaaacgggcgttctgggcttaaaactttttttatttttgcaaagcgagtacactattcttatcactagaaaggcggatatatatatgacagaagcagatcaagtcagaaaaagaatcaatgaattatacaagaagaagcaggaaagcggcttgacggaggctgaagaggctgaacgcaaagaactgcacaagcagtttatcgccaacttccgggcaggtttcaagcagcagctggacagcctggtaattgttgacgatcaaggcaaggacgttacgccggagaaagccaagcaaattcagaagaaaaaggttctcagataagatttatcctttaaaaatggtctgaagttttgtaagatagtatttgtgtgactaacgaatgcatctccgctgaggcggataacaaattaagaccaatggaggtttagcgataatgaatttaggtttggcgattttcttgattattttggcagctcttctgggtgcggttgctggtttttacggtgcccggacttacatgaaaaactactttaagaagaatcccccgattacccgggaaatggttgaaaccatgatgtcacaaatgggccagaagccttcagccaagaaggtcaaccaagtgatgaacatgatcaagcaccaggcagccaagaactagtctagtcagccatagagcgctaggggaatcctggcgctctttttttcgggctagggggattagaaaagaaggagaaaaagataaaacacaaataaaagagggaggaaaaaatggatactttcagcaagctgggctggttctttaaagcccaccgcaagcgctacgccttagggatcatggccttagtcctgacttcggcagccaacctggtctcgccgcggatcctgggcatgatggctgaccagctggataaggggagaatcagctggcagcaattttttagctatgttctggcaattttgctggcggctttggccctttatgtctgccgctatttctggcgcaagcagatttacggcggagcggcgattttggaaaaagaactccgcggccggctcttctggcattttatgcagatggaccggaccttctttcagcgctaccgtaccggggacttgatggcccgggcaaccaatgacgtccaggccgtgcagaacgtagcaggtgacgggatcttgactttgatcgacgcgatttttaccggggggaccaccttgctggccatgatgatcctggtagactggcgcttgaccctggcggccatgctgccgctgccccttttggccttctgtgcccgctacctgggtgatcgcctgcatgacgcctatatggattcgcaggcggccttttcccgcttgaacaacaagactcaggaatccttgtctgggattaaggtcttgaagacttttggccagggaaaggaggatgcggcagcttttaacaagatgacctatgaaacggtagatatcaataaaaaggtcttccggatcgactcactctacgacccaatgattaccatgatcatcgggattacctacatcattaccatcatctacggtggccggctggttctcagcaaagcgatcagcctgggccagctgatttcctttgtatcctacattggggccatgatctggccaatgtttgccattggctacctgtttaatgttcttgagcgggggagcgccagctacgaccggattatgagcctgctcaatgaaaaatctttgatcgtggactcagattcaatggacaaggagcagaagctgactggcgatttgcgctatcacgtgaccagttttgcctacccggatgaaccagacaaggctgccttgggggcagtggactttgacttgaaaaacgggcagactatcggcctggttggccgggttggctcaggcaagacgaccattatccagcttttgatgcgggagtttgataactacaagggccggatcacttttgccggccacgacatccggcagattcccctggacgtctacttaaaagaaatatcttacgttccccaaaacaacttccttttctccatgtcggtcagagacaatattgcctttgccaagccggatgccagccaggaagaggtcgaagtggcggctaaaaagagcgcccttcacgacgatatcctggcctttccaaatggctatgagaccatgatcggggaaaacggggtttccctgtcgggcgggcaaaagcagcggatgtcgattgccagagccctgcttcatgacagtgaaatcttgattttggacgatgctttgtcagctgttgacgccaaaactgaaaaggcgatcttgactaagcttcggcaagaacgggaaaagaaaattaccgtcatcgctgcccaccgcttaagcagcgtaatggatgctgacttgatcctggtcatgcaagacgggcaggtggcagaaagagggacgcatgaagaattgctggccaaggggggctggtatgcccggatgtggcagcggcaggaattagcccagaaggtaggtgaagatgacgatgaataatgaggacttccagtcagtctggcagcagccgatttcgaccaaagagcaggggcagattttaaagcggctctggacctttgtctggctttacaagggggaattactgactgccgtcttagggatggtggcagtttccgtgatcaatatgctcttgccgacctggctgcggtattacatggaccactatttgaagacgggcaaggttgacttcagcacgttttattatgttgccttgatctacggcattggcgtggtatttaaggcggtctgccaatttacctatgaatacctttatgccctggccggggaaaaggcattggaaaaggtccgccgggtcctttatgcaaaaattcacaccctggggatgcggtattttgaccagactccagccggatcgattttgtcccgggtaaccaacgacacgatgaccctgggcaactttatgcaggttttctctgcctttctgttagggattgtctccatggtaaccgccttgattgctatgtatatggctgacccggtggccggggggatcgtgacggcctttattccacttatcgttggggcaatctggctttataaccgggtcagctccaaaatctaccacgaataccgggcccgcaactctttgatcaacaccaagctggaagaaagcattgccggaatttccgtgatccagcagttccgccaggaaaagcggatagacgatgattttgaaaaaatcaaccgccagcagatgcagacccgcttcaagctgatcagaaccaacggcctgctcttgtcgccgtttacgaccctgctctattcgttggccttaacctgcgttttggtctggttcggttaccccctccgggcaacttttgtcccggccgggatgatctatgcttttgcaaactatgtgcagaacttttttaaccccttgtcggacatgatgaactcgctgaccttctttaccgacgggatcgtggctggcaagcggatcttcaagattttggaccaggaagaatacgagcctgagcaaaaagagctggccaacgccaagattacggaagggaaaattgagtttaagcatgtgtcattctcatatgacggcaagcatgacgttctccgcgatgtttccttcacccttaatccaggcgagaccctggggatcgttggccacacgggttcaggcaagagttcgatcatcaacgtcatgatgcgcttttacgaatttcactcgggccagatccttttggacgggaccgacatccgggacttttccaaggcagaattacggcaaaaaatgggcctggttctccaggaacccttcatgttctatggggacgtggcttccaacatccgcttgtacaatgacaagatcactgatgagcagattgaagaagccgccaaaactgtccaggctgaccgctttatcgaaaaattacctgggaaataccatgccaaggtcattgaaggcggatcggaattctccagcggggaaagacagctgatttcctttgcccggaccctggtaaccaatcctaagattttgattttggacgaagcaacggccaacgtggacacggaaacagaaagtttgattcaagcaggactcaaaaagctccgccagggccgcacgactctggctattgcccaccgcctgtcaacgattgctgatgctgaccagatcattgttttagacaaggggagaatcgtcgaacacggcaagcacgaggacttgctggcccaaaagggctactactatgacctttacaccctccagcaaaaccgggaaaactaagaatgaattaagacaaaaaagagcgcgcccagaagacgcgctctcttattattctaatccggcaagctggagatttttaacaaaggggagacttttcaaatcagccaaaagggtgttgatgtctccttcaaggccggccaggtccagggacatcaagacgctggcgtggctggccaaagggatggcctgggaaatagtcaaaaccgaggcccggtggtcggtcacgcaggtcaaaacggctgacagggtcccaggcaggtcagctaaaagcagagacaagaccgcctgctggccccttgcagggtccttggctctaaaaacatagtctttatagcggtaataagtgttgcgggagatgccgacccgctcagtcgcctcggtgacggtggctgcttcccggctgtccagcatttcccttgcctctaggaccttctccagatagtcgggcaggatctttttatgaacgtaaaaatagtcggccatggcaaattctcctttgacatattgctttaatttttgtttaataataagtgacttttcccttgtcaagccttgcggataatgatactatgtttttaattcaaaaacaagtgtccctagattagaaacaacggaggcgggtatgcaaattgcaatcttaggccgcggcgtggttggcggcggtattatcaagctagttgaagaggctgaaactccgcttttgcagaagattaaaattaaaaaaatcctggtccacagagatgaacagatcctggatgaccagcatacgactgactttgaggaaatcgtgaacgatccggaaatttcagtggtttgcgagtgcatcgggggggtagaaccggcacacagctatgttaagcgggccttggaagccggcaagcacgtggtgacggctaataagaagatgctggcggtctatgccggcgagctctttgacttagccaggcaaaagggcctggtattggcctatgaggccagcgttggcggcggcatcccctggattgacaacatcaagcacattcagcgcctggagccggtcacggccttccaggggatttttaacgggaccagcaactatatcctttcccagatggcagaaaaggacctggactttgctgcttgcttaaaagaagcccaggagctgggctacgcggaaaaggatcccagcgatgacatcgacggcggggacgtctgctacaaggtctgcttgtcagccttgactgcgtttggcaaaattgctgatccaagccaggttgaccagtgggggatacggcatttgaccaaggaagactttgcctgggccaaggcaaatggccggaccatcaagttgctgggccggggccggcagacaggtgagaagctgtccttgcaggttttgccggtcatgctgaaaaagaccagccttttagccggagtgggccttaacttcaatgccctggaaactgattccgcctccctgggtccggcaacattcgtgggccagggggcagggtctttgccaaccgcccacgcggctgtccaagacctcttggatctggctgaagggaaaaaggaaatcgtgcaaagtgctgaaccgggtcagctgactgatgaagaagagcagactttctacctgcggactaaccgggctaattttttccaagatgtagtagcagaaagaatcagcgaaaaggcatttttgaccaaaaagctgactttggcggaaatttcaagcctggtcaaggaaagcggggacccgtcgtcctttttggcgggagtggcagatgagtaaagcagtcaaattcggcggctcttcagtcgccaacagcgaacagtttaagaaggtcaagcaaatcattttggctgatccggaccgcaagtacgtggtgaccagcgcctgcggcaagagcgggcaggaggaccataaggtcaccgacctcctctacctctgcgcggctcacattacctatgacgtcagctatgagtcgattttccagtctatcgtggacaagtacatggaaatcaagcgcagcctgggccttaaaatcgacttggctggagaattcgccaagatccggcagaacatggcccagaacttgaacttggactacctggtttcccggggcgaatacttgaccggcctttgcctggctgaatacctggacgcagactttgttgacgccagctgggtgatccgtttccattatgacggctcaattgacctggataaaagccaggaactgttaaaagcccaggttgaccccggccggcgggtggtgatccccggcttttacggttctttgccaaatggggtgattaaggtcatgagccggggcgggtcagacattaccgggtcaatcgtggccaatgccttcgacgttgacgtctatgaaaattggactgacgtttcgggcttttacgtggccgatccgcgcattatcaaagatcctgtccagattccccggattacctactcagaattgcggcagatgagctatatgggagccaatgtcctgcatgacgacgcggtttttcccgtccggcagaaaaacatcccgatcaatgtctgcaacaccaatcatccggaaaatcctggcaccatgatcatgaatgattgcagtgaacttgacgcgcaagagccgcctcatgtcatcaccgggattacaggcaagcaggactttacggtcatcaccatggttaagtcgcatgtttcagctgaggcaggcttcttacgcaaggtcttagccgtttttgaaaaatttcagatctcgattgaaagcgttccggtcacggtcgataccttttccattgtggtccagaccaagaaaatcgagcgctatctctatgagatcgtggcggaattaaagcaggacctgcacctggacgatatccaggtcgaaagccagcaggccatgctggccgtggttggccgggccatgcggcaaatgccggggatgtcgggcaaaattttgtcaacactgggtgaccagcagatcaatatccgcaccatcaaccaggcctgcgatgaacaaagcatcgtcattggggtcaacaaccaggacctggtgccggcaatcaaggcgatttatcagcagtttattagtgaagaaagagtggaacgataaatgaaaattggtattttaggagctacaggggccgttggccggcagatgttggaatgtattgaagaaagacaattgccggttgaagaactgcgcatttttgcttccgagcgctccaagggtaaaaagctgccctttgctggccaggaattgaccctggaagtggtcagccaggaaagactgaatggcctggactacgttttgggggcagtttctaacagcctgtctaaggaataccggcccctggtcgaaaagagcggggcagtctacattgacaacagctcagccttccggcaagaagacggcgtgcctttggtagttcctgaaattaatggccaagatgctttagaccaccacggcgtgattgccaatcccaactgttcaactgccattaccttgatggctctggctccaattgccaagttgtctccgatcaaggctatcaacgcctgcacctaccaggccgtttccggtgccggcatgggcgggatcagcgaactgaaggatgaagtgacggctttgaccaagggcgagagcgtggaagccaaggtcttcccggcccagatcgcctttaacgtcatcgctgacattggcagtcctttggaaaacggctatacgactgaagaaatgaagatgcagaatgaaggcagaaagatcttgcacttgccagacttgttggtgacctgcacctgcgtccgggtcccggtctaccggtcccactcaattgcggtgacggttgtcactgaagaaccggtctcagttgaagctgctgaaaatgccatcgcggcttttgacggcgacctcctggttactgatcacactccaactcccctggaaaactccgacaaggatatcgtgcaagtcggccgcctgcgccgggacttgaccaaccctaacggccttactctttggtgcaccggcgaccagatcagaaagggggcggcaaccaacgccgtccagattatggaatacctggaaaataacaagtaataagcagcagtaaaaaagcataaagaaaaaggattgagcgtccatgctcaatcctttttcttgttgttttgtcatttttaattatttagcttcatagtggaaatccggatccagttcctggtcgatccgcttccaggcgtcttccagctgctggttgtaggcagcttcggtttccggggtcaatttggtcttgcggtcaatgacgatcgggttgccaaagttgatttccatgccttttctttgtaagacccctttaaaagtaagcgggccctggtagacagccggaagcaggggccggccggacattctggcgataaccagggcgccggacttaagggaggctgagtgccgggtgccggatgggaacatgatcaaagacaggccttctgactttaagcccttgaccgggatcttgataacggaaggacctggatgctcccggttgaccgggaaggcgtgggcattgtttaagatccagctgaggaccggatttttaaacagctcctgcttggtcatgaacatgaattccgtagggctggcggccagggcgaaaagaatcggctcccaccagttccggtggggggcaaccaaaatgtaggtgccttcgggcagtctttccttgtggtggacatgcaggtggccgtttaagacccagacgatgaagcgggcgatcggtctgaaaatacgataaagcataaaagaacctccaaatgatgtagaataaattataacacatctaagaataagggacgggcttcagaactatatgattgaactaaaggaaaatgaacgtatcgattacatgctgggcgagcagctgaaaatcatccaggacgggcagtcttttgccttttccctggataccctgcttctggcttactgggccaaagaagccatcaaaaaccggtccaaggtggttgaactctgcagcggcaacgcggcagccagcctctacatggctgcttttaacaaggcccattacgacgatgttgaactgcaagaagacatggtttccaaggcccggcggtcggttgaattaaacgacatgcaggaccggatcacggtccaccagggcaatgtcaaagacgcgggcagctttttgcgaaaagacagctatgacgtcgtcgtggtcaatccgccatatttcaaggccccggccggccacaagctgaacccggaccggtctaaagccattgcccgccatgaactggagatcaacctggaagaaatcatcgccgtttctgccggcctcttgaaaatgaaggggaagatgttcatggtccaccggccagagcggctgggtgagatcatcaattacggctttaagcatgacctggccgttaagactgttcagccctttgtctccagaagagggcaagacgccaatttagtcatcgttgaagcggtcagaagcgggaaaggcgacgggctggttctgcgcgacgccatcgaagtccatgaggcggacggcagcaataccccggccatcaaggaaattttagaggccaaattgccagaggaaaagcattacttttatgtccttttatgcagcgacggcagcttttacggcggctacaccaatgatttaaggaaaaggctgaaggctcataattctggtaaaggggccaagtacaccaagagccggcggccggttgaaatgatctatcttgaagaatatgccgacaagcggacggccatgcagcgggaatattggttcaagcatcatgaccgggcctggaaggaaaaatttttgcacgagcaaggggttaaattttaggcggaaaagcttgcgcttaaaggaaaaatcgagtatgctagataagcgtgcgattgcacgctagaaaacacatcaagagcgatcggcgttcaggtgcctaaagacaaacggttgaatgctgaaatgaacgcttgagaggaaataacctaggaggaatttatttatgtcagttgtatctatgaagcaattgcttgaagctggtgtacactttggtcaccaaactagaagatgggacccgaagatgaagccatacatcttcactcaaagaaacgggatctacatcattgacctgcaaaagaccatcaagatgcttgacgacgcctacaactacgttaaggctgttgctcaagacgacggtgttttcctgttcgttggtaccaagaagcaagctcaagaagcaatcgctgaagaagctacccgtgcaggtcaatactacgtcaaccaacgctggttgggcggtactttgaccaactggactactatccaaagccgggttaagcgtctgaaggacttgaagaagatggctgaagacggcaccttcgacgtactgccaaagaaggaagtttctttgctgaccaaggaaatggacaagctgcaaaagttcctgggcggtatcgaagacatgcctcggattcctgacgtaatgttcgtcgttgaccctaagaaggaaaagatcgccgttcacgaagctaacaagcttggtatcccagttgtagccatggttgacaccaacactgacccaactccgatcgacgtaatcatcccttcaaacgatgacgctatccgtgctatccgcttgatcgccggtactatggctgacgccgtaatcgaaggcaagcaaggtgcagataacgccgacgttgaaaaggaattgtctgaaagtgctgaagaaaactctgctgaagaagtagacgacgctgaataatttgtcgtaaactatctttggaagaattctgttatttagtttgacctggaggacttttttaaatggcaaacattactgctaagcaagtcaaggaattgcgtgaaaccactggtgccggcgtcatggacgccaagaaggccctggttgaagccgaaggcgacatgcaaagagctatcgaaatcatccacgaaaagggtgaagcaaaggctgccaagaaagctaaccggatcgctgctgaaggtttgactggcgtttacgtagacggcaacgttgctgctatcgttgaagtcaacgctgaaactgacttcgttgcgcaaaacgaacagttcaaaactttggtcaacgaaactgccgaaactattgccaagggcaagccagctaacaacgaagaagctttggcattgaccatgccttcaggcgaaagccttgaagaagcatacgtaaatgctactgcgactatcggtgaaaagatttccttccgccgcttcgctgttcttgaaaagactgatgaccaacactttggcgcttaccaacacaatggcggccacatcggcgttttgactgttgttgaaggcggcgacgaagccttggctaagcacattgcaatgcacattgccgcaatgagcccaaaggttctgtcctacaaggaacttgacccagctttcgtcctcgaagaactggctcaacttaaccacaagattgaccaagacaacgaatcacgtgccatggtcaacaaaccagctttgccacaccttaagtatggttcaaaggcgcaattgactgacgaagtcattgctcaagctgaagaagacatcaaggcagaactgaaggctgaaggcaagccagaaaagatctgggacaagatcatcccaggcaagatggcccgcttcatgctggacaacactaaggttgaccaagaaaacaccttgctcgctcaactttacgttatggacgacagcaagactgttgaacaataccttgaatcagtcaacgcttccgtagtaagctttgttcgtttcgaagtcggcgaaggcatcgaaaagaagcaagaagactttgctgctgaagttgctgcacaaatgaagaactaatttcttctagcaagaaaaaggatggggaaacccatccttttttttgtcggcaaatttgcttttgcaaatttaagctggtgaaataggataaataggagagacagttttctgttttatggtaaaatagttagagctaattaggagggcattatgagtcaagttaaatataatcgtatcattttgaaaatttccggcgaagctttggccggggaaaagggaactggcattgacccaactgtgatcaagaaattggcgcacgaaatcaagctggttcatgacatgggcgtgcaagtcggcgtcgtctgtggcggcggcaatatgtggcgcggtgaaaccggggccaagctgggcatggaaagagctcaagctgactacatgggcatgctggccacgatcatgaatggcctggccctgcaagatggcctggaaactgctggcgtgcagaccagactgcaaacctcaatctccatgcggcaggtagctgaaccttacatccgccgggtcgcaatcagccacatggaaaagaaccgggtcgttattttcggcggcggcactggcaacccatacttctcaactgacaccacggctgctttgcgggcagcggaaattaacgctgacgtgatcttgatggccaagaacggggttgacggggtttacactgctgacccgaacctggacccaagtgccaagaagtttgctgaactgacccagctggacatgatcgccaagggcctgcaagttatggacagaactgccagctccttgtccatggacactcatattccattgatcgtcttcaacgtcaacactccaggcaacatcaagcgggtagttgaaggcgaaaacatcgggacgattatcagaggtgacaagtaatgaacaacgaaacgattgctaaagccaagagcaacatgaacaagtccatcgaagtctaccagagcaatctggcaactgtccgggccggggtagccaacgcctcccttttggaccgggtgttggttgaatactacggggtaccaactccgctggtgcaactggccgggatcaccattccagaaccacgggttttgatgatcactccatatgacaagacttctttgaacgatattgaacacgctattttggcctcagacctgggccttacgccagctaacgacggtaacgtcatccgcctggttatcccgcaactgaccggggaacggcggcaggaaattgccaaggaagtcggcaagctggctgaagaagccaagattgctgtccgcaatgtccgccaggaagccatgaaggctttgaagaagcaggaaaaagacggcgaaatcactgaagacgaagaacggcgcctggaaaaggaagtccagaaggttactgacgaatcaaccaagaagattgaccagatggctgacaacaagcgcaaggaaatcactcagggttaattatggataagaataagcagctgaatcatttggcgatcatcatggacggcaatggccgctgggcaaagaagcggaaaatgccgcgcttcatgggccacaaggccgggatggacaacgttgaaaagattgcgctcgcggcagatgagttgggaattaaagtcctgactctttatgctttttcgacggaaaactgggcccggcccaaggatgaggtcaattatttgatgaacctgccggtcaagttctttgacaagttcatgccccgcctgcaggcccacaatgttaaggtcaacatcatgggctatctggatgccctgccggaatcaaccagggaagtggttgagcgggccatggcggaaaccgcggccaataccggtctggttttgaactttgcctttaattacgggtcaagaaaagaaatcgtttcagccgtgcaggctctggcaaaagaggccgccagcggggaaatcacgccggaagaaattactgaagacatggtctccgccaagctgatgaccgccaagtttgccccttattctgatccagacctcttgatcagaacatctggcgagcagagaatcagcaacttcctgctctggcagattgcttactcagagcttgcctttacggacaaggcctggccggacttcgacgaaaacgacttggccgaaatggttaagatctaccagcaccgggaccggcgctttggtaaattagatgaaacagatagttaggtaatatgaaacaaagagtaattacagcagttgttgctttattgatttttatcccggtcctggttgccgggggcatgtggattgactggctggctgcctttttggctgccgtcggcatcagtgaagtcttcttgatgaagaagcagatcctggtctcagttgactttaccctggctgccctggccaccttgacctggaccgtgcccaactccttctttggctttttgccaaaaaactggagcaagtggggcgtcttctatgccttggtaatgatgcttttgacctggacggttctgtctaagaacaagacgacttttgacgatatcggcgtttacgtcctgtcaagtttgtacatcgggactggttttcactacctggctgcgatcagaaacagcgatccagtccacggtttgtggcgcttgctctttgccttcgtgattgtctggacgactgacacggctgcctatatggttggccgcaagttcggcaagcacaagctttggccagtaatcagcccgaacaagacttgggaagggtcaatcggggccgtgatcatcgcggttatcgtgacggcaatttatgtcaacctggctccagtcggcggcgacaagaccagcttgatcattgcttccttcttcctgtcaatcgccggccagatgggcgacctggttgaatcagcctacaagcgcttctacggggttaaggactccggcaagatcctgccgggccacggcgggatcctggaccggtttgacagcacgcttttcgttttgccaatcgttgccttgatctttggaatttaggaggtcgctgtgaaaagtattctagccttcattatagtttttggcctggtggtctttgtccacgaattcgggcactttttcgtggcgaaaaaggccggtattttggtgcgcgagttttcaatcggcatggggccaaaattggttcagtggcggcctggtcaaacgacttataccatccgctggctgccgctgggcggctatgtccgcctggctggtcctgacgagcagagtgaaatcgacccggggacggcagttgtcttggaactgaatgaggctggaattgttacgcgaatcgatgcttcagaatcagacctgccgatcgaaggccgtcccttgcgggtgactaaggccgatctggttgatgacttgaccattgcagggtatgaaaatggcgatgagagccagctggtgacctacaaggtcgaccatgacgcgaccatgatcgacgacacaggcaccgagctgcagattgccccccgggacgtgcagctgccggcagccaaaccatggaagaaactggcaacctcttttgccggaccgtttatgaatgttgttttgggctttgtggccttgatgatctacagctttgcttcagttggcccggcaacaacgaccgtgggccaggtagcggcaaactctccggcccagcacgttctgcaaaaaggcgaccagatcgtggccatcaacggccggaagatcagtacttttgaccaggtcagccaggcgattgactcttctaagggtaagaccctgacggtcaaggtcaagcggcagggaagcgaaaagtcagtccagctgacgccaaagtactcaaagaagaccaagtcatacctggttggcatcgtggctaaggccgacaactcattttccgccaagctgaagcggggctgggacttgagctggcaggtaacaggaatgatcttccaggccctgggcaacttgttcaagcacttcagcttaaacaaattgtctggcccagtcgggatctactcggagacttcaaaggcaacttccatgggtctgatctacatgctggcctttgttggcatgctgtccatcaacctggggatcgtcaacttgattccaattccaggtctggacgggggcaagcttttgctggaactcatcgagctcctgcgaggcaagccgattccagaggagcatgagacagtcgttgacttgatcggggtggtcttcttgctgattttgattatcgccgtaactggcaacgacatctaccgctactttatcaagtagtccttgaaataataaatgtttaggagaatttaattaattatgcgtcaatcaatctttttcatgccgacgctgaaggaaactccagccgacgcggttgcaaagagccaccaagtaatgctgcggggcggctacatccggcaggttacggctggtgtctactcatacctgccgctgggttacaaggtcttgcgcaagactgaaaagatcattgaagaagaaatggctaatgccggcgtcgttgaaatgatcatgccgcacatgctgccagcttcaatgtgggaagaatcaggccgtctgccaaagtatggtccggaaatgttccgtctgaaggaccggcatggccgggaaatgctgctggggccaacccacgaagaaaccttcactgacgtggtggctaagagcctcaagtcttacaagcaaatgcccctgcacctttaccagattcaaaccaagttccgggatgaaaaccgaccacgtttcggtcttctccggggcagagaattcgtaatgctggacggttacagcttcgccgccagccaagaacagctggacaagcagtttgatgatgaaaaggcagcctacctcaagatcttcaagcgcacaggcgttgaagtccggccagttatcgctgactccgggactatggggggcaagaactctattgagttccaggcacctgccgctgttggtgaagacactattgcaaccaacgcttccggtacctacgccgctaacttggaaatggccgtcagcgttgataccttcaagcaagagcctgaagaactgaaggcaatggaaaaggttgctactccaggctgcgactccattgacaagctggcagaattcctgcaagtgccagccaccagaattgtcaagagcgtcctctacatcgttgacgaaaagaagaaggttctggttttgatccgggctgacaaggaagtcaacgaagtcaagctgactcacctcttggactgcgacagcctgcgggttgctgaaactagcgacctggaagaactgaccggggccggaaagggcggcgttggcccggtaaatgctgactgggctgacgaaatcgtggctgacgaaactgtcaagggcctctataacgtggtcgttggtgctggcgaaagcgatgctcaattcatcaacgctaacttggaccgggacttcaaggctgaccgctttgctgacctccgggttgccaacgaaggcgaacctgacccggttgaccatgaaccgctcaagtttactacctcaattgaagttggtcatatcttcaagctggggacctactacacggaaaccatgggggccaagttcctggaccagaacggcaagtcccagccagtcatcatgggctcatacgggattggggttacccgcctgctttcagccgtcgtcgaacagcacgcgactgaaaatggggttgcctggccaaaggaaatcgcgccattcgggattcacatcatccagatgaagatgaaggatgaaatccaaagcaagctggccgaagacctggaagccaagtttgccaagtatgacgtcctttatgacgaccgtaacgaacggccaggcgtcaagttcaacgatgctgacctggttggcgcgccaatcagaattactgttggccgcgacgcggctgacgggatcgttgaagtcaagcgttcaggcgacgaccaggcacaaaagctggccgttaccgacctggaagactttattgccagtgaattagattaggattgaactctcgtgactgataaaaaccaactttttctcaaattgttaaaacaagtcggcttttcggcaggggcagctgacgaagcggttttacaggcaggggagataaaaaacgtggatgtctacagaaaagaacgtagatgggatatccacgttttttttactactccactgcgttttgaaagctacaatgccttgaaccaggcaatcaagcatgaatttaatgactttgttgatactcggctcatagttgaaacggctgatggccagcagcaatacctgccagactactggcagtacgcggttgaaaattcagaagtcttgtccgccaatccggcagcccagaacttcctggtcgggcaggcgccccatgaagatagtggccgctgggttattccaatcaatggccagctttttgacaagatgctggagcagcggctcttggacagcttctctttagagctgcgcaattacggtttctttaacgtcaagcttttgatggaagttactgaccagggcgggcaaagtgactttgaaagcctggcccagctggtggaagcccatgagaagaacatgcagaaagccttccagcaggccccggccaagccaaagccagctccccggcccagctaccaaggccggcgggggaagaagaccagttttggcccaggcgccatcagcgacaaggcagagattacccagctaaaagacttgtcagaagaccagcgcagcgcggttgtcgaaggccatgtcttcaaggcggaaatgcaggaactgcggtcgggctcctttatttttaacggggaaatgactgactataccggttctatttcttttaagaagttcgtccgtgattctgacaaagaagaaatcgaatatttgaaaggcattaagcctggtgtctggatccgcatgcagggcagccttaaggatgaccagtatgcccatgacttgatcttcaacatctacagcatggaattaaccgagcacgtgggccggcaagaagcctaccaaggtgaagaaaagcatgtggaattgcacgtccacaccaacatgagtcagctggacgcgactagcgatgtagcagacatcatcaagacagccaagaagttcggtcagccggccgtcgccatcactgaccatgctggcctgcaggccctgccgaatgcttttgaagcgggcaaaaagaccgggatgaaggtcatcatgggcctggaggccaacatggttgaagaccacggcctgctggttttaaaccccgccagcatgaagtatgaagaccaggaattcgtcattttcgacgttgaaacgaccggtctgtcttctgtttacgatacgattatcgaaatcggggcggtcaagatgaaaaacggtgaagttatcgaccgctttgacaagtttatcaaccctcaccatccattgtctgaaactacgattaacttgacttcaattacggacgagatggtccaggcggctgacgacgaagctgtcgtaattaagcagttcatggacttttacggcaatgacccgctctgcgggcacaatgtccagtttgacgtgggctttgttgatgcggccttgaagcgctgcggttatccggaaatcagccagccggtcgtcgacactttggaagtttcccgtctcctgcacccggaacagtcccgtcacactctggattcgctttgccgcaagtacaatgtggccctggagcaccaccaccgggccaaccaggacgctgaagcaaccggctacctgatgttcaagcttttggatgcctttaacgacaagtaccaggaagatgacctgggcaagatgaacgactacagcaacggggaaggctacaagcgggcccggccgacccatattacggtcttagcccagaaccaaaagccaggcctgcggaatttgtatgaactggtctctctggccgggatcaaatacaacttcaaggggctgagaacccctaagtcagaactccgccgcctgcacgccggccttttgtacgggtctgcctgcagccagggggaagtctttattgccatgatgcagaagggctatgaagaagccaaaaagaaggcggaattctacgactttttggaaatccagccgccgtcaaactactccagcttaattgccgatggcttgattgctgatgaagcccagctggaagaaattctgaccaatatttacaagctgggcaaggaactgaacaagccggtcgtggcaactagcgatgcccactacatcgacaagcatgaagccatctaccgggacgtattgctggctgcccaaaggggtaacccaaaccgcaaaaagcagcaccctgacctgcacttctataccacccaggagatgctggatgaattcagcttcatgggcgaagacattgctaaagaagtggtcattagcaacccgaacaagatcaatgccatgatcgatgagggagtgcagccggttcaagacgaaagcttcccgccaaagatcccgcatacggctgaacgggtacgcaatctgacctatgacaaggcccacgaactttatggtgatcctttgccggacaatatccaggcccgtctggaccgggagctggatgccattatcggtaacggctacggggtcgtttacctgatttcccagatgctggtggccaagtcagttaaggacggctacttggttggctcccggggttccgtcggttccagcctggttgccaccatgatggggatcactgaaatcaaccctatgccgcctcactaccgctgcccgaagtgcaagcagtcagaattttttgaaaacggcgaatacgcctccggttttgacctgccggataaaaagtgtcctgactgccaggtcatgatggttaaagacgggcagaacatcccatttgaaaccttcctgggcttccacggcgacaaggtgcccgacatcgacttgaacttctctggtgactaccagccagttgcccacaatttcatcagagttatgtttgggccaaaccactcctttaaggccggcaccgtaggtaccctggctgataaaaaggcgattggctatgccaagcactatcaagacgagcacccggaaatcaagatgaacaacgcggaagttgaccgcctggccatcggggttaccggggtcaaggccacgaccggccagcacccggccgggatcgtcgttttgccggatgacaaggacatctatgaactgactcccctgcagtatccctcagacgatatctccaaggaatggaagacgacccactttgacttccaccagatccacgacaacctcttgaagttcgacatcctgggtcaccaggacccgaccatgatcagaatgctgcaggacttgtccgggattgatcctttgacgattccaactgatgaccctaaggtcatgtcccttttctccagcccggaagccctgggcgttactccagagcagatcaattccaagaccgggaccctgggcctgccggaattcgggaccccctttgtccgggggatgctggaagagaccaaaccgtcgacttttgccgagcttctgcagatttccggcctgtcccacgggacggacgtctggctgggcaatgccgaggaactgatcaacaacggcacttgcaagttaaagagcgtgatcggctgccgggacaacatcatgactgacttgatccactggggagttaaggaagaagtcgccttttcaactatggaaactgtccggaaggggaaggggatttctgatgagaacatggccgtcttaaaggaaaacaagaacattcctgactggtatattccgtcttgcttgaagatcaagtacatgttcccgaaggcccacgcggccgcctacatcttgatggctctccgggtggcctggttcaaggtctactatccagagatctactatgccgcttatttctcagtcagagccgacaaggtcgacctggaagccatgagccggggcaagaacacggttgtggccttgatcaaccggatcaaggaaaaagggacggcagcgaccaagctggaaaaggacctgcagacctacatggaactggtcaacgaagccattgagcgggggatcaacttcaagatggtcgacatcaacgagtctgaagctacgacttacaagatcgtggacaagcacaccattctggcgccgtttaatgccgttgatggcttaggtgactccgcggccaagcagatcgtggctgcccgcagtgaagcgccatttttgtcaaaagaagacttgcaggtccggggcaaggtttcccagaagatcatggacttctttgaaaacaacaatgtcttagaggggatgcctgaccagaaccaactttccctcttctaagagcttcttatttacaagtagggaaaattctgttataatcttttttagatcgaatatggtaaattcgagtgagcagcgatgctcactctttttattacggaggaaaattttgcccaaaaacttaacacctatccaagaagcaatcgaaccggtcattatcggtcatgactgtgaacttgttgatttggaatacgtcaaggaaaagagtcaagactatctgcgaatctacgtggacaagcagccaaacggaattgacatcgaaacgattgcggagctgagtgagttggttggagagaaattggactcaatgcagccagatccgctgccagacccgtatattttggaactatcctcaccgggcctggaaagaccgatcaagaaggagcaggactgggagaaggccaagggccagtacatccatgtcggcctctaccagaaattggaaggcgagaaggtctttgaaggtcatttgcttgacctggacgaccaggagattaaactggaaattaagatcaagacccggcgcaagcagctgactattccgcgcaagcagatcgccagcgcccgttttgcaatcgaattttagaaagagtgatccaaaacttatgtcaaaagaaatgctggaagcctttgacgtcttggaaaagaccaagggtatcaaacaagacgttatcgttgaagccatgaaggctgctttggccgctgcctacaagaagaactacggcctagcggaaaatgtcgaaatcgactttaatgaaaagaagggcgattttaaggtcatggctttgaagacggtggttgacgaagtgcaagacgaccgggtggaagtcagcttaaaggatgccctggccatcaaccgggcatacgaagtcggcgacacgatcaagttcgaagttaccccaaaggacttcggtcggactgcggcagctacggctaagcaggtcgtaatgcagcgcctgcgggaagcggaaaatgcccacatcgtcaacgaatactcccaatacgaagatgaactggtcaccgggacagtagaaagaactgacaaccgtttcgtttacgtcaacattggcaatgttgaggcagttatggacatcaagcgtgacactattccaggtgaacactacaacccgcaagacagggtccgcgtcctggtcaccaaggtcggtgctgacggcaagggagcccaaatccgggtttcccggaccgctccggatgtcgttaagcggctttttgaacaagaagtgccggaaatctttgacgggaccgttgaaatcatctccatcgcccgggaagccggcgaaagaaccaagattgccgttaagtccaacgacccgaacatcgacccggttggtacctgtgttggcccacgcggcagccgggtgcagaacgtggtcaacgaactgggcggggaaaatatcgacatcgtgcagtacgaagaagacccatctgactacatcgccaatgccttgaacccggctgaagtcatcgctgtccagtttgaagacgaagacgatgaaaggaaagccttcgtgatcgtgccggactaccagctttccctggctatcggcaagaaagggcaaaacgtccgcctggccgcccgcttgactggctacaagatcgacatccggccagaatccgaagtcgaatttgttgacgaaagcgaagtagaagacgaaactgaagtagcagaagatcaagatctccagcaaacagaagctgaagaagcagatgaccaagcagaagctgaagcgactgaagctgatgaaaatacagaagctgaagatgcagaagacctggatcttgatgatgaagaataggtgatttccttgaaaaagagaaaaatccccatgcggaaggacttgttgaccgatacgatgcagccgaagaaggatttggtcagaatcgtcgttgacaaggaaaagaatgtttctgttgatccaagcggcaagaagccgggccgcggcgcttatgtttccttagaaccggagaagatcgctgccgcccgaaagtcaaaggtgctggaacgcagtttgggcgtgaaggtagccgatgaattttacgacgagctcttcgcttacgtggaccaccagaaggcaagaaaagaattatttggtgatcaaaaataattaacaaccgagagaaagccttaaatttacttggtttggccacccgggcggggaagaccgtttcgggcacggacatcgttttggccaaattgaagaagggcaagcttaagtgcattatcatcgcgaataatttatcagaaaacagccgcggcgagattgaagctgctttaaaggcccacccaacgccattggtcgacgtctttacggaagctgaactcagtcaggctgtaggtaagaaacgcaaagttttggcattaacagatcgtggttttgcgaaaaccttgctggataagattaaagaaggagtgtgatctaatgaccaagaaacaagaaaacgaaacttcaaaggaattgggcatggataacaagaaaaccagcggcaagtctggtaaattaaagatttcagtcagtgctattcgcaagggcgaaaagaagactgagggcaagagatcaaatacccgccgccgggctaacaaccactctaacgaccacagcaagcgccgccggccagctgcccaggatttgctgaaggacctcaagcaaaagcagcgggctgacgaagtccatctggaccaggaaagcaaggctgctaagcaggaatacaagaagtccttgaacaaggctgctgccagcgaaagcaagccggttgtcaagaaggtcgaaagtgctgaaaagccagctgaaaccgcagctgaagcaccaaaggtccgtgggccaaagatcttgaagccatccccagcccgcttgaagcaaaaccaggcaaacagtgaaaagcctgctgccaagccttcatcttctcgccggccaagttcccggccaagcctcactgaagcgccaatgccggaaaataaggaaggccgccgcagaaccagcggcaagccaggccgcaaggggcaaaactcttacgctaaccaaggcagaggggcaaatagcgaccgcagtcaacagcgcaagcgcaagaacaagaagcaccaaagtgctccgcaagttaagaagcaggttacccaaagaaaggaccgtccacttccagaaagctttgaatacgaagttggcatgaacgcccaagacctgggcaagatcctccaccgggagccagctgaaatcgtgaagaagctcttcatgctggggatcatgatcaaccagaaccagtctttggacaagggcaccattgaactgctggctgctgactacggcatcgaagctgttgaaaaggtccatgaagacatttccgacatcgacaatatttttgcccaggaaatggaagagtccaagaactctgaaaaccaggttgtccgtccgccagtcgtaactatcatgggtcacgtcgaccacggtaagactaccttgctggaccgtctgcgtcacacccgggtttctgaacacgaagccggtgggatcacccagaacatcggggcctaccaggtccggatcgacgaccgtttgatcaccttcctggacactccaggccacgcggccttctcaagcatgcgggcccgcggggcggaaatcaccgacatcgtcgttttggtcgttgccgctgacgacggggttatgccgcagactatcgaagccatcgaccacgccaagagtgcgggcgtgccaatcattgtggccatcaacaagatggaccggccaggcgccaaccctgcccacgttactgaacaattgatgcagtatgaactgattccggaaaactacggcggctcaactatcttcgtcaacatctcagccaagaccgggatggggattgatgaacttttggaaaacatcatccttgaagccgatatgctggaactgaaggctgacccgaagcaaaaggcgatcggtacggttgttgaagcccgtctgtcccggggcaaggggccagttgccgacgttttgatccagcagggtaccctgcgggtcggtgacccaatcgttgttggtgacaccttcggccgggtccggacgatgaccaacgacaagggccaccaggtcaagaaggctacgccatcaatgcccgttgaaattactggtttaaacgacgtgccggaatctgccgacaagctggttgtctttgccgatgaaaagactgcccgcgcggttggtgaagcccgggcacagcaatccctgcaaaagcagcgggaaaacgtacagcacgttactctggacaacctctttgacacgatgaagcgggaaagcatgaagtccgttgacatcgttttgaaggctgacgtgcaagggtctgccgaagccttggctcaatccttccaaaagattgacgttgaaggcgttcgggttaacattatccactccggtgtcggggccatcaatgaaagtgacgttaccctggccagcgcttcaaacgccttgatcatcggtttcaacgtccggccaacagctacggccaagagccaggctgcccaagaaggcgtcgatatccgcctttacagtatcatctacaaggcgatcgatgacgttaaggccgctatgcaagggatgctggaaccaacttacgaagaaaaggttatcggtaaccttactgtccgcgaaacttggaaggtctccaagatcgggaccatcgccggtgcttttgtcgacaacggttacgtgaccagagaatcaggtatccgggtcatcagagacggcgtggtcaagtacgacggcaaggttgcctcactgcgccggttcaaggacgacgtcaaggaagtcaaggcaggctttgactgtggtttgaccattgaaaacttcaacgacatcaaggaaggcgacgaactggaagcctacgaaatgcaggaagttaagccaggttaacaggaggctgaaatgaagcacagaaaaggacgggttgaaggcgaaatcttgcgggaactgactaagatcatccgcaagaacatccgcgatccccgggtcagcaacgtgacttttaccgccgtggagtgcagcaatgatttttcatacgcgactgtctactacagtctgctgactgaagatgaacaggcgcaaaaggaagcggaagccggcttggaaaaggctaagggaaccatgcggcacttgctcggccagagcttgaccatgtacaaggttccggaactgattttcaagcgggaccagtccgtgatctacggcagcaagatcgaccgtttgcttgctgacttgaagaagcaggaacaagatcgccaaaactagcaaaaagcgccttcgggcgcttttttgcgtttatagaagaggagaaaaagatgttcaatggaattatcgtaatcgacaaggcagcagggatgactagcggggatgtggtttataagctgcgccggctcttaaagcaaaaaaagatcggccatgccggaaccctggaccccgaagtcaccggagttttgccaattgctttgggtcaggcaaccaaactgatcgagctgatgcatgagcggccaaaggcttatgttggtgaagggatgctgggcctggccacggactcttatgacctggaggggaagattttggcggaaagagccttgtctcagccagtcagtgaccaggccatcaaagcagcaatggaaaagttgactggggaaatcgtccagcagccgccgatttattctgccgtcagggtaaatggcaagcggctctacgaatacgccagagaagggatcccagttgagcggcccaagcggactgtccaggttttccgctacgacttgacggcgccaagtcagttcgacccggagaagggccggcagacttttacttatgaagttgaatgctctaaggggacctatgtccgcagcctggttaacgacttaggcgaagaactgggcctgccggcagtgatgaccaaactgcggcggacggccagttccggttacaagctccaagacgcggttactttggaagaactggcggataatttggaccacgctgaagattatattcagccaatcgacagctttttcgctgactaccagcaagttgatttagatgccgccttatggcagcaggttaaaaacggggcctggatcaaactccctcttgatgcagacaaggtcgctttgcggtataataaaacagttaaagcgatttaccgggccaagggacaaggtctctactgcccggacttaatgcttttaagtaatgagtaattgagggattaagtttgaaagtaataaatctaagctatccgttcaagaaagagctgacggcctgcaaggttgtgctggccctgggcttttttgatggagttcatatcggccaccagaagttgatcaaggaagcccggataattgcagttgagaaggatctgccattgatggtgctgacctttgaccgccaccccaaggaggtctatgccggagttaaggactttgagtacttgaacacaccggaggaaaaggcctacgaaatgtccaagatcggggtcgactacctggtgattctcaagtttacgccggggttcagccacctggctccccaggccttcgttgatgagatcatcatgggcctgaaagcagacacggtggtagccggctttgactacagctacggcccaaaggacgtggccaatatggaaaatctgcctgcctttgccaagggccgctttgacatcaaggtggttccaaagcagatctttgccgggaaaaaaatcggttcaactgaaatccgccaggctgttaaaagcggcaatctccgcttggccacggaacttctgggccacccgtatttgaccagtggcaaggtcgtccacggcttcaaaaacggccacaagctgggcttcccaaccgcgaatttggagctggcctggccaaaagttttgccgaaaatcggagtctacgcgaccatgacccaagtaggggacagctggcaccagtcaatgaccagtgtcggctacaatgtcactttcaatgatgagaagaagatttacatcgaatccaacatctttgattttgaccaggacatttacggccagcaaatcaccatcgcctggtacaaatacttgcgcggggaagaaaagtttgccgatatggcggctttaagcgagcagctgaagctggaccaagtcgctagtgaaaactattttagttcactgattgagcagtaataagaacggtcttttaggcgagaccgtttttttgcgggatttttttagcattctccttgactaactgctaatttcttgttaatctatgccatgttagcacatgaaagttgtgagtgctaaaagcgagggcgatgttatgttgaccgaacgtcaagaacttattctaaagacaattattcaagactttaccaagacgcatgagccggttggctcaaagacagtcatgaatcaattgccgattaaagtgtccagcgcgacaatccgcaacgagatggcggttctggaagagcatggcttgattgaaaagacccactcctccagtggccgggtgccatcgactgagggctatcgctattacctggacaatttggtgcagccgctgcagctgccggaagaaatgtacaatcaaattggctaccagtttgaccagccgttcaaccaagtggacgaaatcgtcaaggaagccgccaggatcctgtcagacttgactgactacacggcctttgcagaagggccggaagctaagaatgtcagcatcactggcttcagaatcgtgcccctggctccccggcaggtcatggctattctggtaaccagcgatggcagcgtcaagaaccagctctacaccttgccgcggcacatctcaggggatgaaattgaacaggcggtccgcttgatcaatgaccagctggttggcaagaatttaagcgaaatcaacaagcagacctttgagcagctgtccagcagccagatcgtgggcaagaatgccccggaatttctggaattgctggaagccgtcattaaggacgcggcaagcgagcagatgtatgttgacggtcagctgaacctgctcaacaatactgaaaacagcgatttaaaagccatcaagtcgctatatgaactgatcaattccagctctctggctggagaactgatcgatctgagcgaccgtccccgtcccagccattaccctgtccatgtccgcttaggagcggaactagagaacgacctgctgaaggatttcagcctggtaacggctgaatatagcgttggccactacgggcgggggacgatcgccctgctggggccgagaaacatgccttactcggaaatgatcggattgatggaatacttccgccaggaactggcccgcaagttgttagattactatggcagatttaaataaggaggtttgtcgtgagcaaagaagaatttccaagtgagaaagatttgccgcaagaagaccaggaaaagcaagccaagtcagctgaagctgacaaggccggcgtaaaagaagacaaaaaggcaaaagacaacaaagaagaagcagccaagccagctgatgcagaactggaccagctcaaggctgaagttgccgctttgacccagaagaacaaggacctggaagacaagtacttgcgcagcgaagctgagattcaaaacgcccagcgccgctacagcaaggaaagagccaacctggtcaagtacgagtcccagcgtctgggcaaggatatcctggccagcgtggacaacttggaaagggctctgcaggtcaaggccgacgacgaggcttccagtcagctgaagaaggggatcgaaatgaccctggaaggcctggtcagagccttgaaggacaacggcattgaagaaatcaaggctgacggcgaaaagtttgatccgacattgcaccaggcggtccaaagcgtaccggctgaaaatgatgatcaaaaaggccatgtcgttcaggtcctgcaaaagggttacgtctacaaggaccggaccctgcggccagccatggttgtcgttgcccagtaaggcaattttttaacaaagcaataaacaagcaaaaataaagcaaaggagataaaaagacaatgtctaaagttattgggattgacttaggtaccaccaactcagcagttgcggttttggaaggcaaggaaccaaagattattaccaacccggaaggcgctagaactaccccttcagtagttgccttcaaagacggcgaaattcaagtcggtgaagttgccaagcggcaagccatcaccaacccgaacaccattgtttccatcaagcggcacatgggcgaaagtgactacaaggttaaggttggcgacaaggcttacaccccgcaggaaatttcagccatgatcctgcaatacatcaagaagttctcagaagactaccttggtgaaccagttactgacgcggttatcactgttccagcctacttcaacgacgcgcaacggcaagcgaccaaggacgccggcaagatcgcgggcttgaacgtgcaacggatcatcaacgaaccaactgcttcagccctggcctacggcttggacaaggatgaagacgacgaaactgttctggtttacgaccttggtggtggtactttcgacgtttccgtcctgcaattaggtgacggcgtcttccaagttctgtcaaccaacggtgacactcacctgggtggggacgactttgacaacaagatcatcgactggctggttgatggcttcaagcaagaaaacggcgttgacttgtccaaggacaagatggcaatgcaacgtttgaaggatgcggctgaaaaggccaagaaggacttgtcaggcgtatcttcaacccacatctcccttccattcatctctgctggtgaagcaggtcctctacacttggaagcagaccttacccgggctaagttcaacgaactgactgacgacttagtgcaaagaaccaagatcccatttgacaatgccctgcgtgacgctggcctgtcagttggcgacatcgacaaggttatcttgaacggtggttcaacccggattccagcagttcaagaagctgtaaagcaatgggccggcaaggaaccagaccactcaatcaacccagacgaagccgttgctttgggtgccgcaatccaaggcggggttatctccggtgacgttaaggacatcgttttgcttgacgttactccgctttccctgggtatcgaaaccatgggcggggtcttcaccaagctgatcgacagaaataccaccatcccaacttccaagagccaaatcttctcaactgccgctgacaaccaaccagctgttgacatccacgttttgcaaggtgaacggccaatggcagctgacaacaagactttgggccgcttcgaactgactgacattccagctgctccacgtggcgtgccacaaatccaagttaccttcgacatcgacaagaacggtatcgttaacgtctcagccaaggacatggggactggcaaggaacaaaagatcaccatccaatcagcttccggcctgtcagacgaagaaatcgaaagaatgaagaaggaagctgaagaacacgctgacgaagacgccaagaagaaggaagaagttgaccttagaaacgaagttgacggcttgatcttccaaaccgaaaagactttgaaggaagttgacggcaagctcgcagacagcgacgttcaaccagttaaggatgccctggaagacttgaagaaggcccaaaaggacaacaacctggacgaaatgaaggaaaagaaggacgctttgagcaaggttgcccaagacctggctgtcaagctctaccagcaaaacgcccaaaaccagcaaggtcaaggcggtcaagcaggcccaactgacgatggttcaaatggcgcaaacggcgacacggttgacggcgacttcaccaaggtagacccagacaagtaaagcgactataattaaacaaaaggagaagaactgcttgatgtagttcttttcttttgttagtaaaaggagcaataataaacagatggcagcaaaccgtgactattatgacgtcttaggcgtgagccgggatgccagtgacgcagaaatcagcaaggcctaccggaagttggccaagaagtatcacccggacttaaaccacgaagcaggggcagaagaaaagtacaaggaagtcaacgaagcttacgaagtgcttcatgacccgcaaaagcggcagcagtatgaccaatttggccaggctggcatgaacggccagggcggctttggcggccagtacgggggccagggctttggcggagctgattttggtgactttggtgacatctttagcagcttctttggcggcggcgcccgccagcaggtagacccgactgctccgcagcggggggctgacctggactacaccatgacgatcgactttatggatgccatcaagggcaagaccagtgaaatcagctacagccggtcaaccacctgtgaagtctgcaagggttccggggctgaaaagggcacccacccgatcacctgcgacaagtgcgggggcagcggcatgatgaccattacgcaaagaagcgttttgggcataatccagcggcagacgacctgtgacaagtgcgggggcagcggggtcatcatccagcatccatgccagaattgccacggcaagggggtcaagacccagaagcagaccctgcaggttaaggtgccagccggcatcgacaacggccagcagatccgcctggccggccaaggcgaagccggcaagaacggtggcccatacggggacctgtacatcgtctttcgggtgcggccaagcaaggacttcaccagacgtggccagaccatctacacgaccgtgccgatttcctttgcccaggcaaccttgggtgacgagatcaacgtcaagacagtttacggcgacacgaaactgaagattccggccggcacccagccaaaccagaagtttactttaaaggaaaagggtgttccgagcctgcgcggcggcagcactggtgaccaggtaaccacggttgagatcgtgattccgaagtccatcaacgaggcccagcgcaaggccctgctggaattcgtcaaggccagcggtggctccattgccccgcaggaaaaaggcttctttgaacgcttgaaggagaagctgagctaaatttttaagcaaattaaggaggcagtctgcaaggactgccttttttgatgactgggaaaagacaaatgctttgttttcgggtataattgtttagtactttagtaaggatgcgagaaaatatatggacttagaaaaattaaaagactaccaaaagcacatccgcaatttttcaatcgtggcccacgttgaccacggcaaatcaacgattgccgaccggattctggaactgacggacacggtttccaagcggcagctgaaaaatcaaatgctggatgacatgccccttgaacggcagcgggggatcaccatcaagatgaactcggtgcaggtcaagtatcacgccaatgacggggaagactacattttccacttgatcgacacccccggccacgtcgacttctcctatgaagtttcccggtccctggctgcctgtgaaggggctgtcctggtcgttgacgcctcccagggtgtccaggcccagaccctgtccaacacttacctggctttggaaaacgacctggaaatcctgcctgttttaaacaagatcgacctgccaagcgccgacccggacatggccaagagcgaaatcggcgacatgctgggcttagacgccagcgacgccgtggaagtttccggcaagaccggggcagggattccggaacttttggaaagaatcgtgaccgacatcccagcgccgaccggggacttgaccaagcccctcaaggccttgatctttgactccaagtatgatgactaccggggggtggtcatgtcagtcagaattgaagaaggcatggttaagccaggcgacgaaatcatgatcatgaacaccggcaaaaagtatgaagtaaccgaagtcggcgtttccagcccccacccggttaaagaagatatcttgattgccggggacgttggctatattactgccaacatcaagtctgtccgggaaacccgggtcggggataccatcaccagcgctgaaaacccgacggcagaagctttgccaggctaccggcagattcggccaatggtctactctggtatgtatccaaccgacaaccgggactatgacgacttgaaggaagccctacagaaattacagcttaacgatgcgtctctggaatttgagccggaaacttcccaggccctgggctttggtttccgctgcggatttttgggccttttgcacatggacgtcgtgcaagagcgcttggagcaggaatttgacctggacctcatcatgaccgcgccgtcagttgactaccacgccatcatgccgactggggaggtcaagctgatcgacaacccggctgacctgccggatgccggtgaatacaaggaattgcaagagccttacgtcaaggcggaaatcatggcgccaaacgacttcgtcggtgctgtaatgcagctgtgtgaaggcaagcggggcgagttccagaccatggactacctggacaagtaccgggtcaacgtgatctacgaaatgcccctggcagaaatcatttacgatttctttgaccagctcaagtcttcaaccaagggctatgcttctttggactatgaaatcatcggctataaggccaccaacctggtcaagatcgacattctcttgaacaaggaaccgatcgatgccttgagcttcatcgcccaccgcgaagaagcccgggaccgggctgtccaaatgtgcagcctgttgaagaagctgatcccgcggcaaaacttccaagtcgacatccaaggagcaatcgggtccaagatcatttcccgggctacgatcaagccttaccgaaaagacgttacctggaagatccacaccggtgacccggaccggcggtccaagcttctggagaagcagaagcggggcaagaagcggatgaagtcagttggccgggtggaagtcccgcaggacgcctttatggcagtattacggatgaatgacgatgacatcaaaggcaagtaaaaatacaaaaggccacccagttcgccgcattattctgcgcctagttgccgtaatcctctttttgctgggcctggctttggtctttaaccagcagatcagcgcgtttttggtcaagcagaaccagaccgcggctttaaagggcctgacccgggaccaggtcgtgcagaaccagaaaaagaaggggatgtatgacttcaagaaggtcaagtcaattgactttgcccagaccacccgcagccgggtcaagaacacagctggcgcaattggggcaatttccatccccagcgtcaagctctacctgccagttatgcagggcctctcagacgcggctctgtcaacagggggcggcaccatgcgggctgaccagaagatgggcaaggggaactaccctttggccggccactacatgaccgaccagggagcccttttttcaccccttgaaagggtcaagctgggcagcatggtctatttgactgatttaaagaaggtctatgcatacaagatctactacaagaaggtggttgaccctagcgccgtctggctggttgccaacaccaagaaggagatcgtgaccttgatcacctgtgccgatggcggggtaaaccgctggtctttaagagggaagctgaccgcggtcaagccggcaagcaagcagaatttggagatgtttaaacttcgatgaaatggcaagaaagaacagctgctcctttggccagtgacctggttgaggaatttcaacttagcccattaacggctaagttgttttctttgcggggaattgacaacgaggaaaaaatcgactattggctccacgccagtgaaaatgacctggctgatccctttttgatgcatgatatggacaaggcagtcggccggatcaaccaggccctggacgagggcgaaaagatcactatttacggggactatgacgctgacgggatcaccgccacggccatcatgacggaaatactgaccatcatgggggctgatgtccattacttcattcctgaccgcttcaaggacggctatgggccaagtttagaccgctacaaggatattgtggcagacgggacgaaattgatcatcaccgttgacaatggggtaaccgggattgaagaagtggcatatgcgcagtctcacggcgtggacgtgatcgttaccgaccaccacaccttcaaggaggaaaagcccgacgcttatgccctggtgcactgcaactacccaggccaggcttatccttttgacgactattgcggggccggggtagcttatactattgcccgggcagtcttagaagacacggccagcgaatttttggaactggccatgatcgggaccgttggggacatggtcaaagtttccggtgaagggcacgttatcgttaagcggggcttggagatgctgaatgaaagctcccggccgggcctggaggctcttatccgcaatgccggccttaccccggggatgattgatgaagaagacgtcggctttagcatcgctccccgtttaaacgcctgcggccgcctggctgatgccagcttggccgtaaggctgcttttggcggaaagcccgggcgaggcccaggaattagccgatcagattgaaaagctgaacaatgagcgaaaagacctgacccaagcgaccatgcaggcggctgaggctcaaattaagagccggggctaccagagagaagcgacattgaccctgtatgacccggcctggcatgaaggggtcatgggcttagtcgccaacaagatcgtggaaaaataccacaagccaaccttgatgctgacgaaaaacgaggccggcctggtcaaggggtctggccggtccagccagggcttcaacttgttcaatgccttgaagccttttgaaggcaagtccatcacccagtttggcggccacgactttgcctgcggcctgtcgacgactgaggaaaatctgaaccagctcaggcgcgactttaaccaaagctataaggcaggggagaaggctccggaaaaggtccaggaatatgatggcacgatcagtccattagatgttgatttgaccagcgtttatgacctggcccaggccgggccttttggcacggacaacccccagccggtctttttgcttgacaagccgcagatctctaacttccgccctatgcggaagggctgcagcttcatggtgggcccggtcagggcggtggactttgaccacggcttaaaccaaactgtcctgccttatttgcagcagatgttggttaagcttgcttctaacacttttaaaggcaagaccaatgtccagttccggattgttgacctgcattacggccagtccttgtacgcgccagccgcccggattgtggactttcgcgggcaggagaatttgctgggttttgcggacaagtatctcttatttgatgagaaaaatctcagccaggccatgaatcattttggcataactaaagagcagatttccctggccaaggacaatgaagacctcagccagcaggtcgtgtcagttcttgacgtgccggccaatgaggcccagctgaactttgtcctggccaagccttaccgccagctctacctgcgctttcagttggaccagctgccaggggagaccctgcccagccggggcaacttcggcctggtctggcagtactttttagcccacccgggactaaaaccgaatgattacatgcaggctgccggccagctggggatggatccggacagcatcatgtttattttgagggtgttttttacccttgattttgttaaaatggaagaggacagattgctccctaaaccgagtccgacaaagaagtctttggacgattcagcctattaccggtcagtgaaagcagaatatgccttcgctaacaaattacgaacaatctcttcggatgaattaattcgctatgccagtggtctagcaaatggaggattacaaaatgtcaattgattttaagaagtacattgccagcgtcaaggacttcccgaatgaaggaatcatcttccgggacattaccccgatcctgcaagacggtgaagccttcgcggcagctactcacgaaattgctgaatacgccaagagccggcaagctgacgtgatcgtcgggccggaagcccggggcttcctggtcgggactccggtagcaatcgaactgggtatcggcttcgtgccagcccgtaagccccacaagctgccacgggaagtagaagctgcggcttacgacctggaatacgggtcaaacgtcctggaaatgcacaaggacgcgatcaagcctggccaaagagtagtcatctgcgacgacttgatggctacggccggcaccctgcacgccactaaggaattgattgaacgcctgggcgggaaggttgtcggggcagccttttacattgaactgaccgaccttaagggcagagaaaagttcccggacgtggacatcttctccctggttaaatacaacggcgcttaattttacgagcaagacagaaaaaacggctttaccggaaggtagaagccgtttttatttgtattaaaaataaaagtaaaactattgcagccggtccaggtggtccaggtgctcggtcatcgcgtcgatgatctgcacgatgtcctggtcgttgattgaatagtagacaaaagtgcctgctttgcgtttctgcacgaaatcgtattttctcaaaataccgagctgcttggaaattaccggctgagagacgcccaggtggccgacgattgccgaaaccgggctttcgccgtgttttctcaggtaaaagagaatatggatccgcaggctgttgcccaagaccttgaaaaggcgggccgcctggtcgatcagttcttcgtgtgtcatgcgggtctcccttccagtttccccttgattatatatcatttttgtaatatagtgtaggcaagagtaaatataccaaaaacgatatataaaagattgcgcaggtaaaaatcatgaaagaccaagcatcaaaaaggtatttgtgggtgactgtcttcaatgtcatcattactgccgcggaaattgccggcgggattatctccggttccctggccctcttgtcagatgctttgcataacttgagtgacgttgtttccatcgtggttgcctttgcggctaatttgatcgccaaaagaagcaaggaccagcacaagacctttggctacaagcgggccgaaatcctggctgcctacaccaacggcctcttcttgctggccatcagcatctatctctttatttcagccattaagcgtttcagcaagcctgaaccgattgaagggggcgtcatgttcatcgtctccttgatcggcctggccggcaacttgatctccatgctgatcctgggcaaggggagcaaggagaatttgaatgcccgggccctctttttgaatatgatgtcggacaccttgtccagcgtggctgtcgtggtggggtcactcctgatttactaccaaaactggaccctggtggacccggtcttaactatggccgcggcaattttcctcttgaaagaggcttttgaagtcaccagggactcagctaacgtcttgatggaagctaaccccgacctggacctggaagccattgaagaggctggtttggcctttaaggaggtaagacagctccaccacctgcatgtctggcgctacagtgatgacaccatcatgctggacgcccacattgtggttgactccggtttaaccgccaagcggattgaagagcttgatgaagagattgctgcttgtctgaaggaaaagtttgccatcaaccacgttaccctgcaggcagaatgcagccggggcctggacgaggaccttttgtcaaccaacaaggaaaattaagaaaagattagctaacttcaaaaaaagagaaaattagggtcaaaaggcttgtcttcacaaggcttaggccttagaagaattaaagttagcaaaaaatagcaagaaaatgaaaatgattttaaaaaggccttgctaaccttcagaaagagtattatagttacaactataaaaactagtgattgaatttttaggaggtaatatcatggcaaaaaaagatctcgattgggcaaatatcggctttggctatcatcaaaccgacaagcgctacgtggactatttccacgacggtgcctgggaaggcggcaagctgaccgacgaccctaatgtcgtattgaatgaatgtgctgaaaccctgcaatacgcccagcaagtttttgaagggatgaaggcctacacctggaaggacggctctgttgttgtttttaggccagaccagaacgcggaacggatgtacaactccgctaagcggatcgaaatgcagccttatccaaaggacaagttcgttgaagcaatcgaccaagtagtcaagggcaatattgactgggtaccgccatacggttcaggcgcgactctttacctgcgtccatacgaaatcggcactacaccaatcatcggcgttgctccggcaactgactacatgttcagaatctttgcaactccagttggcccatactacaagggcggggctactccagttgccgttcaggttgcccaatatgaccgggctgcacctcgcgggactggcaacgttaaggccgctttgaactatgccatgagtttgaaggcgactgtcgctgcccaccaggcaggttttgctgaaaatatgtacctggacccagctacccaaacttacattgaagaaacgggtggctcaaacattatcttcatcgaccaaaacaaccacttggtcgttcctaagtcaaattcaattttgccatcaatcactagacgctccattgtatacttggctgaacactacctcaacttgacggttgaagaaagacaagtccgcttcgacgaagttccatccttcaaggaatgtgctttggtcggcacggctgccgtattgtcaccagttggccgcatcgtcaatggcgaccaggtcatcgacctgccatcaggcatggacaagccaggcaagttcatggaagaactttacaacactttgactggcatccaaaacggggaagtcgaagccccagaaggctggatccaccacgtgatgtaaaaatcataatcgagaagaagataaaaaatagcagttttcgcaactgctattttttattgctttggccagggccggaaactgttataataaaagctagtcaaactagcgaggtgtatgatgaacaaattttggaaccacattgatcagaagtattttaagattgccctctactgtctgggcacggtctttgccggtctcttcatcctgcttttagcctatgagtcaactggcttctgggtccgggtaggcaagattctggcagcaattgcccagcctttgacttacggcttagttttaacctatctcttgctgcctttgaccaacttctttgaccggaagttttccaagggcagcagccggggggcagtggcgacggccagccggtcagccgcagtggccttgaccctgctcttgctcttgctggttattttactggccgcgacagcggttttcgtgaccttctccaagcagctgagccatttcagcctgggcagcttagaaagcctctatgaccaactgaaagcccagtacagcagctttatcaacgaaatcttagcctacctgcaaaagcagggctggtcgaccagcggcctggtctcttatatgcaaaaggaggtcggccgggtaactggctttttgagcgacttcttcttcggggtgatttttgccatctacttcctctacgatggccagcggatcgcggcatactggaagagaaacctgggcaccctcttaaacaaaaaggtgatcaagggaatcaagctcttcttagcagacgctgaccgggccttctccggctacatcagagggcaaattatcgatgcttttatcgttggccttttagttagcctggccatgctgattgccaaggtcccatatggccttttgatcggcttggtaaccgggctgggtaacctaatcccatactttggtccgattttaggctatgggatggttatcttagcctgcaccctcagccagaatatgacagctttgatcgtggggatgattattctcctcttgatccaggcgattgatggcaatattcttaatcctaagcttttgtcttcagccattcacatccaccccctgtacgttatcgcctgcgtgattgctggcggggccatgggcggctttgtggggatgctaattgccgtcccgataggggccttgctgaaaacggaattcgagcgcttgattgcctaccggcaaaagcagctggaaaagagcaaagaggcaagtgaagagtaagcagtaagcagaaagtagatataagaactaagtaaaaggactcgcaaaagcgagtcctttttgtcagattaaacagtaataagtataaagcatttagtagatgatatagtttgtcttactggccattagccagctgaacttttttcaggccagcagcctggcggaccaggtcgctgattctttgccgctctgccagactgatgtgctggtaggaaaccccgtcctggttaaagccggtcccgtgggtgtagtcggtttccagctggtcgccgcttgcccggtaggacttggctatctgggccaagtcgctgaaagtcaaatcagttctgacctggctggaaacagagttgaggaaggccggctttaagaggctctggacgtcagccccacttttaataatcgcggtcaagacctgtctttgccgcttttgccggccgtagtcgccttcagggtcgtcataacgcatccggcagtattccagggccttgtccccgttcatgtgggtcgtcacgccctttttatagctatagccctcgtagtcaaagctcaaaaggggagtaatgtcgaccccgcccagctggtcgatgatcgacttcatcccgcccatgttgatcaaggcataagtattgactggaatcttgaaataccggtctaaggtttggctgagcagcttgaccccgccgtaagtataggcggcattgatcttagaaggggagtattgaggatattgcgggaagttgacctggaagtcccgctcgatgctgacgatggtcgacttcttggtccggggattaaggactaaaaccatgatggagtcggtccgtcccttgtagtcccggcccagggccccggtgtcagtccccatcaggaggacgactaagggcttttttccctttaatacttcttccttgctcccattttcagcggcttttaagccgcttttttgataggaccggctgacggctctttcaacattgaagtagctgtaggccagcatgccggataagatgaccagcaacagaattgccagactcatgatgattctaaaagttctcttgcgcattaaattcttctttccctgtaaagctaattggcaaaaaatagccaaacacacatttatttgttacttgttcttcatgaccggctggtagaccaggtcgatcaaaatggcggccaggaaggctacggccaaaggggtcaagagctccttaatcccgatggccggcatggcgatgcccaaaagtgctaaaaggcaggtcaaaaggatatcggcgatctggacactggctaccggcttagatggggcagactgccagaagaagcgcttggtccgggtgatcaagacgatcatcatggcgctcataactaagaagacgtagaccatggtcccaacttgatcatgatttactccggcctttgttaaggcagagacgaaggcaaaaccgatgattgtccaggctccggccaaggagaaggcaattttagccagcttgcccatatcccagttctccggcttgtaagtgatgtgagtcttgtcggttccgatcatcatggtgaccatgttgttcatgatcgtgtagatgaccatggcatttaaggccatcggcaggtagccgaaaataagataagagaaggtcaagagcatggtcagttcagccgttctggccagtttggtcaaagaccaggtggtcatccgctggtaaacccggtggccggcatccaagatcttaacgatagggctaaggccctcatccaaaaggaccatcttgctgctcttttttgctacgtcagcggcatttgatacagctatgccgacttcggcctgcttgagggcaggggagtcgttaaccccgtccccggtcatgccgacgatatagccagccttttggaagtacttgaccatatccagcttgtcttccggcaaaacgtcggcgatcccggccaggtcttccgcctttaccccctctttaaagtcgctgatcgagatgaccttgccagtcaagccgacttcttcagccacgctggccgcggttttctggttgtccccggtcagcatgattggcttgattccccgcttgaccagttcggccagggcggcttttgaatcagctctgaccttgtctttagtgataaaaatacccgccaaacggtcgtcgagcaaaatcccgactgaccggcccagactgaggtcgacagctgccatttgttcagaaatagccggatcaatcttactgaactgcttgactgaacccagcttaacgtcgtggccttctcctcggccttcagaatagccctggctggaagtgaagggggtaaaggcttctgcttctttaactggtatctttttctcttgcagaaagtccattaaggccaggtcgatcacgctttggttgcgctggtcgatggccaggctggtcaaggctaggacttcttcatctgagagctttgaaaaattagcaaaagaggcgacagccgtcttgttttcagtaatggtcccggtcttgtccagtaagagcaggttcaggttggccgcgtcttgaatcccggttaagtcactggtcaaaactccttctttagacaggcgggtggcctcaaaggaattggagagggcaaaagttgacggcatagctactggaatagaagcgatgaacatcatggccaggaagggcagcatttccaagatattttcaccccggattacggccgcgatcaagaggatgacggtcaaaaccccgtctaagaggcagaggtagtagatgatcttggtcaaaagctgctgcaggtggccaggtgccgcggacgtgttgatcaagttgatggtctgcccgcttcttgaattggtcccggtcgcgctgactctgcccagggcctcgccgtccatgacggtcgtgcccgcaaaagctgtcgccccggcttttttatggacattttttgcttccccggtgattgaggattcatctaaggtcaagttcccgtccaaaaggtcaatgtcggcggccaaaatatcccctttttgcaggttgacgatatcgccgactaccaggtatttggagtcaattttttgccagcggtcatctcttaaaacagcgacaaccggggtcagctgctgggaaattgaactcaggaccttgcgggacttcttcttctgcgtggccccgttgtaggcggcaaagagcagcataagcaaaacgaagagggactggatccacttgcctagggcacattccaggaggagtgccgcctccagaatccaggcactgagattccaaagtttgccggcaaattccttccagaagctgaattccggctccggcacctggttgagtccgtctttttttaagcgcaggtcagcttcagcctgcgtcaagccttttactttcatgcaaagatctccttgtaattattcttcagtcgtgacgtgttacatttagaagttgtttttctcactgttcattgtagcccccaggttgatataaataaaatactgatttatgatgttagatatctaaagagttgatatctactaagctcaaagatcattaaaaagagagggaagaaaatgaatttcaagcagctcaattactttctggtcgtagccgaggaagggcagattacttcagccgccaagcggctctttgtcggccagccagccctcagctaccaattaaagcaattagaagaggagctaggggctaagctctttatccgtcagccttatggaattgaactgaccgaggctggaaaaaagctgcgggattatgctggtcagattttgaccttagccaaaaacgtccaaaccgaaattacggagctggaccggggcgggcggggaagggttaaattaggttccgtctcttcttcaatcggcgagcttccttccgccaaattgacggcttttgcccgccagcatcccggcgtctcctttgacatctacgaagacaacactttcggcatcctggacaagctgcagggcaacctgctggacctggccatcgtccgcaccccctacaaccgggtcaacttgaactttgtcgacatcagcgatgagccgatgaccgcggttacctgtcaggacttttttcctggcaaggaaaaagtagggctgcaggacctggccggccagcccctggtcatctaccggcgctttgaggacatgttcaaggaagccttcgcggaaaaaggtcttaccccaaattttgtggttaagtgcgatgattccagaaccgctatccgctggagcgactctggcctggggattgccctggtgccggaatcaatcgccaaaacttatgccaaaggccacatctacctaatcgactcggctaagtggcggacccgcctgcagctggtctggcgcaaagaccgggtggttacccccttaatgcggcaaattattgccctatatgcaaaataaaaactggaagccaatctaggtttccagtttctttctattgtttgtctttatgcccggcttgaagtcaggttcatccgccgttcaaagtagttgagcagacgggtcaaaataaaggtgaccacgaagtagatgcacatggtgataaaaagcggcatgaccccgcggtaggtcgcggtttggaccaggccggtctcgtacatcaattccccgaccccgatgacggagaccagggagctgtccttggtcaaggtaatgaattcattgcccagggctggccagatattcttcaaggcttgcgggaagactacgtagcggtaggtcttggcctggctgaggcccaaggaccgggcagcttccgtttgccccttggccacggaattgatcccggaccggatgtcttcagccacgtaagccccggagttaaggccgatggcgatgatcccggcggccagggccggcatattcttgatcagcatcccgaccccgaagtagacaaacatgatctgaaccatctgcggagtgccccggaggaactcaatgtagcaaacggcaatggcgtgcaaaagcttgttcttagacagacgcatcaaggcgaagatgacacccaggactaaaccaatcgtgatggagcaaatcgtaataatcatggtgtagcccaggccagtcgcgaagtagctggcgtacttgctcatggagttgttggtcttgcttgaggcctgcttcatggccttggcagcggctgggatgtacttcttgttaaacaggtcctgcttttggcaattgttgatggtcttgttgatggccttaaccaggtcgccttgccccttggccaccccaacagcgttgcccatctgagcctggctgaggctggacttgaccaaagacagggaagtgtcgttagtggcgtaagtcttggcgttcagttcacctaataaaacagcgtcaaccttaccggacttaagcgccatgagcaggttgctgatctttgccagccccttgaccttgatcccgctcttagcagcgtttttcttcaaggaagtgtactgaagcgaaccggtttgggcaccaaccgtcttgcctttaaaggaggcgatgctggtatacttggccttgttggtcttgctgatgacaaagtagtcggacttttcagcgtagtagatcttggagaagtcaatgctctttttccgttcggccgttggggtcatcccggaaatgatcacgtcgatcttgccagtttccagggcaaccaggagggagtcaaagtccatgttcttgatttccagcttgacccccaggtccttggcgatctgcttggccagttcaacatcaacgccgacatacttgtttctgccgttgacgttcttggtaaattccaatggcgggtagtcagcggacatgccgacaactaatttgccggacttcttgatcttcttcatgaccgtgccgctggccattttcttgctgctggcggcatcaactgctggaattgccgcggtaaagagcccggccaagaggaggagggcggtcataattttaataagtttcttcatcttgcttcattcttcctttgctagctaggcttccaaaatttttgccaaaaagtccttggcccggtcactttgcgggtggtcaaagacctggtcggggctgccctgttccaaaagataaccgtcagccatgaaccagacctcatcagcgacttttcgcgcgaagcccatttcgtgggtgaccacaaccatggtcatcccagtttgggctaaatcctgcatggtctttaagacttccccgaccatttccgggtctaaggcactggtcggttcgtcaaaaagcatcatgtccggctgcatggctaaagcccgggcgatagcaacccgctgctgctggccgccggacaggctggccggggagtgatcagcaaagtcatccaggccaacttttgctaaaagttcatgggccaggtcgccggcctcctggtcgctcatccctttgaccttcatcggcgccagcttgacgttttcaatgacggacatgttagggaagaggttgaagctttggaagaccatgcccatcttctgccggagttggtccagctcttcttctttaaggtcggtcagttccgttccttcaaaaatgacctggccgctggttggcttttccagcaggttcagacagcgcaaaaaagtactcttgcctgaaccggatggaccaataaccgtgatgacttttcctttttcgatgacggcattgatgtccttgagaacttccttgtcgccgtaattcttcttcagatgcttaacttcgatgatcttgttcatgtttaatccttcgtctaaaaggacacaagcaatgaagagctgacaagcggcaaagttccgggcaagagtacttaaaattgatcaagttgacagtaattgaaatactggagccaatgagcgacttatgactatgacagcttctcattgccagtcctcgccttgcaatgaaacagcttcagtcaccatcgtggatggtgctatgttcggtggtggtaagtcctcgtcctcattatgatctgctcctttaaaaataaaagtaaagataaatctgaaattaaatctcttattgttttttaattttagcgtaaaagggaagctgatgcaagggaaaatgacaacttttatgaaaaagattgtaaaaataggtaaaatagccagatattcgtataaagctaagaaaagaagctttttgggggcaaatcgctaagatatttagaaatcactggcttcttgattgttttttctagccgcccttgctatgatagggggcacgtaaggagggacttttttgcaaaaaagaacagataaagggtctggcagaaggaccggatttctccaaaagctggctgccctcttgatcgccgtggtctttctggctggcgggatcatgatcggccagcatctgcccaagaaaagccgggagcaggtaacggtggccacggtttccgctaaattgaaggctattggggagctggcgactgagcagtacacctatactggcatttacaaactatctaacgggcagattccttttatcaccaagaagggcttcactatggtctatacggccaactttaaagccggggtcgaggtcaaggacatcaaggtccaagtcaatcaagaccaggtgaccgtgactttgccgcaaagccagctgctggacaagaagatcgacccgtcctcaatcaagttctatgaccagagctatgctctttttaactggaaccaaaaagaagacattaccaaggctgagcaggcggctttaaagaaggcaacaggcgtggccaaaaagtccggcctcttggcccggtcgcaaaaaaatgccaagaaactgatcaggcagctgctccagaggaccctggatggccgcaagctggtcatcaagacggaagaataaagcaaagaaatacgctcaaatcaagctgatctgagcgtattattttttgtcaaatggccagcagggctaaaagcgcggccaaaataatactcccattggcaaaaacagcttttgcccgctttttaactgcctcgtctggcaagttggtctgaactagtataaagagcaggggaaaagctgtcaattctccaggggaattttgcgtacaaaaaaagatccgcttatgcggatctttcttgagctaatcttttaatgattagtcttgagctgggaagaagtcgagacgttcgccgtcaccgagttgttcttcgattctcaacaattggttgtacttttcaacacgttctgaacgagctggggcaccagtcttcagttggccgccgttagtagcaacagcgaagtcagcgatgaaggtgtcaccagtttcacctgaacggtgagaaatcatggtgttgtagccgtgcttacgtgaaatccggatggtttccaaagtttcagttacagtaccgatttggttcagcttgatcaatgaagcgttacctgcgccttccttgatggccttttccagcaaacgtgggttggtgcagataaagtcgtcaagaacgatttgcagacggtccttgtggctttgagtgaacttaaccataccttcagtgtcgttttcgtcgtatgggtcttccattgagatcaattctgggaattctgcgagcaacttgtcgtagtattctgccaattggtcaccgtcaagaaccttgccttccaggtggtacttgccgtcttccttgttgtagtagtatgaagcggcacagtcacaagcgatggcaatgtcttcgccaggaacgtaaccagcacgttcaatagcttcgtgcaaagccttcaaagcttcttctgagtccttcatgttaggagcgaaaccaccttcgtcacccaagccagtttcgtaacccttttcttccaaaaccttcttcaaggtgtggtaagtgttaacgatcttttcgaagccgtcacggaatgaagtcttcttaactggagtgatcatgaattcttggatgtcgatgccgttgtcagcgtgttcaccaccgttgataacgttgtggaaagtttgaggcattgacaagtcagtaccgccaaggtaacggtaaagaggttggtgggtagccttagcagctgctacagcagtagccattgaagtacccaagatagcgttagcgcccaacttacccttgtttggagtaccgtcaagttcgatcatagccttgtcgatagctggttggttgaatgggtctgcgccttgcagttcgttgttgatggcagtgttaacattgttaacagccttcataacacccttgccgcccaaacgtgagccaccgtcacgcaattcaacagcttcgttttcaccagttgaagcaccagatggaacttcagcgcggccaactacaccgtttgacaaagtaacttcaacttcaacagttgggttaccacgtgagtcaaagatttctctagcatgaacgttttcaataacaaccttggtcattaaaaaatcctccttaaaatacgctggcggaggaattctccgacagcaagagcattcgctctgtaattatttacaagttcattatagtataagcttgtgaatccgtaaacagccagttttttgaaaacgattccaaaaaccgcttttttacaaattttactttttgctaagcaagcttggtcaaaatccaagtctgaaagcggttagtgaaaaaatcccccggttaaggaaaaaatgttaaaatagatttagaaacagacaaggcaggaaaagctgccagagacaatgtagaatcgggataatattatggaaaacgtgagactgatagttgattcaagcgccaatactttgaccgacccaagccgcggccttgaggtcgtgcccttgactttgaccatcggccaggaaaattggctggatgacgagcagctggacatgggcgcatttttgaacaagatggaggccagccaggaggcaggcaagactgccgcgccaagcatccagcgctggctggatagtttggagggctgcgagaaggcagtgatcgtgacgattaccagcggcttgtcggggacctactcttccgccttgcaggccagagacatctacttagagactcacccgcatgcccagatcgtggtcgttgactcccggtcagccggtccggaactggaagtaatcctggaagggatcgaaagcattcttaaagatgacaagctccgctttgctgacttggaagccagaattgccgagtaccggaccaagactcacttgcttttcgtcctccagtccctgcgaaacctgtccttaaacggccgggtgtcgccagccgtggccaaaattgcggggatgctgaagataaatttaatcgggacggccagcgttgacggtgacttgcagcctttgaccaaggccagaggaatgaagaaggccctgcgggaactggtcaagcagatgaaggaagagaagtaccagggcggccgggtcgtgattgaccactgcgaaaatgaagctgatgctgagaagctgaaggaactgctgctagcagaatatccggaggctgagattaccatccggccaatgcggggcctgtgctctttctacgcggaaagaggggggctcatggtcggctttcacaattaataagctgcaaaataaaaaatccagggttctgttaagttagaactctggattttttgctcctatatatcgttatcgtctctgttatgtattatgttctacttcaaaaagagggcagcatagattgtctgcacgactgtaaaacagaagaccgacaaggccacggctcccaggacgtctgacgggtagtgggcccggaggttaaggcgggagataaccacaaagagccagtagatcaaaagaattacggcaaagaactgatcaaattcccgtctgagcagggcgtaaaggatcaggcacatggtcgttgcccctaagacatggccgctagggaagctgtagccttcttcttcagacaggtgggcatgagggcggctccgcttgaccaggtgcttgacgataaaaccggctgcatcggtcacgcctaaggtagccaggacccaaaggccgagccggtaattgtcttcgtttaagagcaggccggcaatcaagacgtcccagacaatgaccagcttgggctcgttgatgaaggcgatgatcttccaaaaaatattcttctgcgtccgcaccagtttcttgtgcagcttccggtccaggcggttgaaggccggggaatagagaatgttgaggatcaagaccagcaggaccagccctgagattgtcagtgagataaggtcgacttgcaaattttcattttccttctagcaaaacttgacttgtccagatgaaaacaaccggacttttacggaaaatattctacacgtccccggctggaaaatcaaccaataccggaagcgcatacaaagttgataaaagtcggccggaatcgatgaaaccgcttgcttcacaaagacctttttgttaaattagaccaggagaaaaataacaacatataaacggtaaatagtgttaggagcttgtttaggagaaaatgagaacgagaaagaaaatttgcgatatgaatgtggcggtggttgaccggcagaatctgcctgccttactggctagcgggaaaatagctgcccaggccgacgaggactaccagataaaccagaagacggtagtggtctacgacttccagatggacctgcttttgggcaagtaccggacgatcatttatgacgccgatgccggttgggtcttgcttaaaaagaagacatgccgccgcctggttcatgaactgagaaagaaggagccggcccacgaactgaccattaaaaagcagctctgccggcagatcggaatgtcggaccagtatgtgcagtcctttggctcacatgcctatttctcttttttcatcatgcgccacaagccgcttgacctagtgggcctgcaccagatgaagctgtttgagtgccttgacaatcacggtctttttctgactttagaccagcagtattgcttcagtttggagatgcccagacaatctggccggggccagcagatcctgcaagactgcattacccacaacgctgcctttttgcacctggcaagcgcccgggcagccagctggggctgccagttaaagccggtcagccgcaagtctctcttaaacgacccggcttatattagggaaagccggctggcagaaatcaaggccatggatccccggcagattttggaagaagcagaggacaactacttaaactattgctcagaggaatttttgaaggaattccgggcttggaactggggcaagcaggacatgcggcagctgatcaactactgcaacaagtcctttaatgaaatcaaataactcaagtcgaaaaaacagcaatgaaaaatgctcatcagccgatgagcattttttctgtatatttattatcttagcccagcttttgtgccttgagccagttcatcaagtccaggacgtgttcgttgaggacgtccttgcaagtgaagagggtcaggtctgagctgaccttgacgtccaggggaacccgctttaggccgttgactttgcaattgtcgtcatcaagcgggccggtgtacggctggatagccaggccctgctgggtgtaaaccatcatggtttgcgccacgacattgttggcaaagaagatccggctttgcttgcagttcttttcaatccggtcctgcatcaaggtaatcagcggtgatgaacaagaaaggtccaggaagaccaggtccttgccgtccaggtccttttctgaaagcaggtccttttcagccagagggtggtcatttggcaccagggtgcaccacttcaacttgccgatcgtgtaggcggtgaagtccgggaatttcggcatggcttccggagttgacaagaccaggtcaagctcgtgggaggccagcttctcaaagagaaccgggctgctttcaacgaagaattcgatgttgacggtgtcgcggctcttgcggaactggcggatcaagccaggaaggatcagctgttcggctagaattccaattaagccgaccttcaaggtgatttgtccttctgacatggcgatccgcttggccttggaaacggcggtccggtagtcgttcaattcgctcttaatgctgttgtacaaagaccggccggctggggtcagcagcatcttgcggcgggagcggctgaacagctggtagcccagttgcttctcgattgaggatatggccagggaaaccgctggctgggacatgttcatattttgtgcagtcttggtaaagctctgcgtctgcgcggcgtttacaaagatctctaggtgttcgattctcacgggtttactaagctcctcataataaaaagattgaaatgtcagatatatatgctacgcgtatcaaacagttccgatataataatatatcaattcctcaagaaatgaaaacacttgttattaaaaaatcgaaacttttaaaaaaatttttacctaactatttctaattttcccggttaaaaagtgctgccaggcaaaagaaattgaggtattaacaatgaaaaagtgttcattcttagtatcatgactaaactttattgctaatcctgtaaaaaatcaagtggtaaactcggaaaaatgatcgatttagaataaatttagaaatttgtgcttgttgattttaataagaataaagtatgatagagtttcgaaacatcaaataaattaaggaagtggaacatgaaatacgtctttagctacctcaaagactataaaaaagaaagcgctctggccccgcttttcaagctgctggaagccctgtttgacctgttcgttcccctggtcgtggccaggattatcgattacgggatcaaagaaagaaaccaggcctatgttttccagcaggttggcctcttggcccttttggcccttttagggataacggccagcattactgcccagtggtttgccgccaaggccagcgtgggactggccagccagctgcggcaggcggcttttgacaaggtggaaaagttcagttttgccaacctggatcagctgccgcccagcaccttgatcacccgcttgaccagtgatatcaaccaggtgcagaccggcttcaacatggctttgcgcctcttattaagaagtccttttatcgtctttgggtcaatgatcgcggcctttacggtcaatgttaaagcggccttgatctttgccgtagtgattccgcttttgtccctggtcgtttttggcatcatgctggtcagcatccccctttaccggaaggtgcagaagcggctggatgaaattacccgcctaagcaatgaaaacctggccggagtccgggtcatccgggccttcagaaaagaaagagccgccgtggccaaatttgatgaaaaagtttccgccatgaccaagctgaacgagttcgttggccgcctgtcagccgctatgaacccggtgacttatgtcatgatcaacatcgcggccattgtcttgattcaagttggcgccgtccaggtaaataccggagcaatggctcaagggcaagtggtggctctttacaactacctggcccaaatgatcgtggaactgattaagctggccagcctgattatcaccatcaaccgggcctgggcctgcggagaccgggttggccaggttctggccacggaaaatgacttgacttatcctgaagcaggtccaaaggtcacaaacagccaggttgactttaaaaatgtttcctttacctatccggcagcctccgcgccggccgtttcaaacttgacctttacgatcaagccggccgcgaccgtcggcattatcggggggacgggcagcggcaagagcaccctcttgaatctgttgacccgcttttatgactgcggggaaggggagatcaaactgggcggcgtttccataaaggaactgacccaagaggaactattggaccagtatgccctggtgccgcaaaaggcccagctttttgccggcagcatccgggacaacctgctgatgggcaggctggaggccagtgatgaagaactctggcaggccctcagcctggcccaggcgaaagacgtagtcttggctaagcccggccagctggactttcagctcgagcaggaaggcagaaacctttccggcgggcaaaagcagcgtttgaccatcgcccgggccctggtcaagcaggctccgcttttgattttagatgacagcgacagcgccctggacctggcaacgggggcgcgtctgcggcaggctctggccagcttgaaggacgtaactaagattctggtttcccagcgggcttccagcatcatgcaggctgaccagattctggtcttagacgatggcaaactggtggctagcggcaagcacgaagagcttttggccaactgccaggtctaccaggaaatctattattcccagttcccgaaggaaaaagaagcaaaagaagataaggaggggaaccgatgaaaaagcaagacaagaaaatggccagctggcaggcgatgaagcagcttttgccaattatcggccgctaccgccttcttttattcatcagcataattctggcggcagtctccgttatctcccagctttatgtgccgatcatctttggccgggccattgaccagattgtcggccctggcaaagttaactttccagctattggccaggacctggtccagattttaatcttggtgattgtctcagccgccgccacctggctgatgggcctgatcaacaataaactgacctaccggaccgtccaggatatccgggaaaaggccatccggcagctgcagcttttgcccttgtcatatctggaccagcacccaagcggggacattgtttccagaatcattgccgacaccgaccagctctctgacggcctgctcctaggcttttcccagcttttctccggcttgatcactattgtggctaccctagccttcatgctcagccagtcggtggaaattaccctcctggttttggtcttgactcctttgagtttcatcgtggcccgctttattgccagccggtcctaccagatgttcagaaagcagagccagactcggggcgagcagaccagcttgattgaggaaatggtgagcggggtcaaggtggttaaggcttttggttatgaaaaaaccgcctcaagccgcttcgctgaaataaaccaccgcctgcaagaatacagccagcaggcgaccttttattccagcctgaccaacccggccacccgctttatcaattccctgatttatgccctggtcgccttggcgggtgcttttgccatcatgggcgggcgtcttacggttggggggctcagcgttttgctgaattactctaaccagtacatgaagccgtttaacgacatcagctcggtgattactgagctgcaaaacgcggctgcctgcgccggccgggtctttgaactgatcaatgaagagccggaagctgatccggttgacttgaacaaggctgatggcaatttgcctaaagtcaagaccggttcagtcgtctttgaccatgtcaacttctcctaccaggcggacaagcctctgatcaaggacttcaacttgactgccaagccggggatgcgggttgccctggtcgggccgaccggctgcgggaagacgaccaccatcaacctgctcatgcgcttttatgacgtggattctggcggaatctacttaggcggcagaaatatcaaggacatgtcccgccatgccttaagaaaaaatttcggcatggtcttgcaggacacttggctggaagaggggacagtccgggataacctggcttacggcaaggaagatgctactgacgaggaaatcatcgcagcggctaaagctgcccacagctggggctttatccgccgcctgccccagggcctggacacgcccctttccgctgacagcttaagcgccgggcaaaagcagctgctctgtatcaccagggtcatgctgctggacccgccaatgctgattttggatgaagcaaccagctctatcgacacccggacagaaatgctgattcaagctgcttttgacaagttgatgcagggccggaccagctttgtcgtggcccaccgtttgtccacggtcgttaatgctgacttgatcctggtgatgaaggacgggcagattattgaacgcggcaagcacgctgaccttttggcccggggcggcttttacagccagctttaccgcagccagttcgcgaaattgccatcataactgaatactttttacgtttttaaccgttctttaagtgagagcggttttaatttgcgaaataattgcaaaaatactattattttttagaaaaagatagaaggatttagtataattactttgtacaagtctctaatgacaaaaaatagctagatggaagctggtaatatgattgaaaaagatgatctgactgattttgcctgggaaaagctcttcccgctgactacaggtctaagcggtgatcatgccgaatttgaacacatgacagttgcagatgccaaggggcaagagcacctgcttaatgcttaggttcgcaaggctgaagttgctggccgggaattgcacctgtgctacattacgccgatcaacatcaaccggacccttttaaccggcctgctggacctgcgctctttccaagaagtcggccaaagccggacaagggactggatcaaggaaggcgagcgtgtttcgatcatttcctttgacctggtggggatgaaggattacaacaaccaatacgcagggggatgacctgctgcgctttgtgggagcttgtcttaaggacagttttggtgaccaggcctgcacccggtcgggtgaagaccgcttttatgcctactgccaggaatattatggcctgtgagtccttggaagatccttttaagtccggaatagtttactatgatgacaagctggaccaaagacaccgcctgcaagagtatgtgcttagccacattgacgaggccctggaaaagggctgtttcagccggttatccggactttgactgataaggtctgcaatctggaagctctgagccggtggattgacccgccggggcctgcgcagctgggtcaattactataccaaggcctcgaccatgccaaactgcgtggtgacggtctttgccctggatgaaggcggtgagtcggaatttaagcggatcgcagcaactgacgtggaattttcgaggtcaaccagcagctcctaaatgaccggagatacttcagttcgagaggctgactttgctgaacaaggggatttctgcgccaagaatgatattgaccgcatcctgctggttccggttaagaatgactttggtgagatccaagcctatttgcttctgactaatgtctatgacaagggcgaaattaatccggtcagcctcctgcagcacctggcgcctgtctttagcaagaagctgcgggacacggctctcaggattaagcaagattaaggcaagaaaaaaggagtcacgctggtgactccttttactttctgataaataagcttggcgacttagtcttgtagctgaagccttcgcccaaagcttcgttgacgtcaaagaagatgatgaaggcctgcgggtcttcttgcttgacgattttctttaattccgggatttcccttggcgacaggaccaggtagatcatgtggcggggttcgttggaatagccgccttcagcgttaatgtaggtgaagccccgctctaagcgcaggtcaatcagcttggcgatattccggtagttctgggaaatgataaaggcccccttggcctgggtcccgccttcagtaaccagggccatgaccttggataaaatgaagcaggagaccatggtgtagccgacatggaagaagtccaggtaagacagggagcaggccagggctaagaagtccagggccagaaggcccttgctgggcgtgatcccatatttttcctgcaagacccgggcggcaatatcgctgcccccggtggtcccgttaaagcggaagaccagtcccagtcccagccccgacaagcaaccggccgtgacagtggccaggaaggggtcgtgatggaggggaacttggtctataatagactgcagggtccacatgcttaagaagaaggacaggcaaagggttccccagacggtataaatcatggcccgcttgcccacatatttaaagcctagaaagatcaagggaatgttgatgatgaaggtgctgagaccggggttgaccccccagaagtggcggatgatcagggtgaaacccgacaatcccccgtcggccagcttgttgggaatcgacaccatgtccacgctgaaggcgtagatggccgagcccagggcaatcatcaggatatcgatcgtgtcactagtggtccatttgaattttggcttgttcatttcgatactcctttcttatttcttaaattattccccatacgtaatcaattttagcaaaaaacagtcgaggtggagaagaatatgactaatattcgtataacggaagtttttacccaggccatgccggtcctggaaaagttggaagaagcaggctttgaagcttacttcgtcggcggctgcgtccgcgacctgctcttagagcggccgattcatgacgtggatatcgcgaccagtgcctacccggaagaagtcaaggagacttttgccaaaagtatcgacactggcatccagcacgggacagtgaccgtcctttatgggggatccagttacgaaatcacgactttcagaacggaatccggctaccaggacttccgccggccagacaaggtcaccttcgtgcagaacctggacgaggacttaaagcggcgggactttactatcaatgccctggccatgaaccggcaaggggagatcattgacctttttgacggtttaggcgacttgaagcggcgggtgatcaaagctgttggcgtggctgaagaccgctttcatgaggatgccttgcggatgatgcgggcagtccgcttcatgagccagctctctttcagcctggaagaaaagaccaggcaggctattatcgacaaccacgagcttttaagcaagatttccgtggaaagaatcagggaagaatttgtcaagctggccctgggcaagaacagccggcaggcttttaaggactttttggccaccggcttaagcgaggaatgcccgggtctggccgggaaaaaggaccagctctctgtcttcactgaccttaaggctggtccggatgacgaagcagtcttttggagcttgatcgccgttttaatcaacctgccggctgacaagatttcgcctttcatgcgggcctggaagaactccaatgcaatgaaccagcaagtcagacagatcgtggccgcctttgacctcttgagccggggggaagagagcgattttgacctctttgaaatcggccaggagaacctggaggcggctttaaagctagcggggcttttgagccagcctctatccagccagatcctgttagaccgctataaccgtctgccaatcaaggcggcaggggagctggccattgacggccagtggctgatcaagcaggggattaagccttcaccggaactgggccagcttttgcgcaaagcccttgagggcgtggtcagcggccaggtagagaacagccaggcggcaatcgcggaatttttggcaatctaaaaggcgctggtcaccagcgccttttttatacataaaataaaactgaaaagaaaatcaagatggagcccagcaaaacgaagaagtgccagatgacgtggctatatggcaggccccgcatagagaagaagaggcagccgaaggtgtaggcaatcccgcctgagactaaaagccagaagccggtcggccccaggctgaaataaagctggctgccggccaggatcaccatccagcccatggcgatataaaggatggtgtcgccgataacgtgcttgccctggttgaagatataatagaggatcccaaagaccgtcagggcccagatgatgccgaacatgacccagcctttagccccgccgatcgtgaccagggtataaggggtataagagccggcaatcgcgataaagattgaagagtggtcgaagatctggaagaccttgttcgccttggtaaagaccaggctgtggtagagggtcgagaagaggtaaagcaggatcatgcaagccccgtagatggcaaaagttgtcactctgagggcgctgtggctgtgggcggcccggaccaccaaaataactaggccggcgattgagaggccgaagccgatcccgtgcacgacggatgagagaacattgtcaatgatataataagatttgggccggtctttgaccggctgccaaggattgaaagccatataaagtccctttcagttttgatcaattaattataatttttagccgaaaatttgctatactaaagtctgtattaagtctaattctatcacaactgagaagctgataggatgatttggaaattgaggtcagttaaattgtctaagatcaagatcatgacggattcctcagtacagctgagtccggaagaaattgaaaaatacggtattacggtggtgcccctgtcgctgacaatcgacggacatacctacacggatggcgttgacattacccgggccaactttatccaaaagatggatgaggcagagaagctgcccaagaccagccagcccccggtcggcctgttcgtggagagaatggaggaactgacggctgacggcagtgaagtcctggggattttcatggccaagaccctgtcggggacggttgattccgcccgccaggccgctgaaatggtagccggcaagatcacagtcatcgactgcggctatactgaccgctctcaaggctactactgcattgaggcggccaaggacgcggaagcgggcaaggaaatggatgaaatcctggctcacctggaccagatcggcaagaatatgtacctggaaatgatggtgcccaacctgcagaacattttagccggcggccgtttgggcaagtgggccggccgggtggtttcagctttgaacttccacgtcggcctaaccatgaaagagggcagcttgaatgtcccttaccggggccgggggaagaaattcatcaagaagtttgacgacatgcttgtcgaccagttgaaagaactgggcgacaaggtcaagtatgtcggcatctcctatgtcgacaccagagacaagatggaagagctcgcccagcgcttcaaggaggtcaacccggacctggagatcctggtccaggaaaccagcccaatcatcatcacccacgccggccatggggcctacgcggtcatgttttatacggagtaatatatggtctaccgacaaagtttttaccagtttttgatgactttgcgcgatccggattcaaatggcgacctggcccagtttgccaacaacgcccagtttgattctacctttcccagacaggaacaggaccggaccaggctgtcagaatatctggaggaaaatgccgcttacctacccagcatgacgatttttgacgatgcttaccaggcttatgaagagaaaatgcagtactaggataatttttaggattcagtgacaagcacgaaagggagccccggcttccttttctgctgtttttgggaggaaaaatgactaaaattcaatggtatccaggccacatgaacaaggctaggaatcagctggaagaaaaattaaacttaattgacgttgttattgaagttttggacgcccggattcccagcgcttccagaaacccgatgatcagtgaactggtcggcgacaagccccacctaatcgttttaaacaagaccgacctggctgacccggtgatgaccaagctctggcaaaagaaattgcagggcccgcgcaccttggtcatggctatggatgcccagcacaacactaatatgcaggccttgatcaccttgatcaagaaggcagccagcgaaaaggtcaagaagctggaagagagaggggcctccaacccgatcatccgcatctgcctagttggcgtgcctaactgcggcaagtccactatcatcaaccgcctggttggccgcaatgtcaccatgaccggggaccggccgggggtaaccaagggccaggcctggctgaagaccccatatggcatccagatcctggacacgccggggattctctggccaaagtttgaagaccaggacgtaggctacaagctggctgcttttggggccatcaaggacacgattttccacgctgacgacgttgccctttttgtcatccggcagctgcggcagtactacccggcttatctggccaagttcgccaactgcactaaggacaagctggaaaatatcggcgacactgacctgcttttggccatgactcaaaacaacgggatgcgggacgactatgaccgtttctccctcttcatgctgcagcggttaagaaagggcaagctaggcaggatcagcctggaccggccaagcgcgaataatgaaaattaatgaaattaaagacctgctgcaagcagattctatcgacccagctattctggcggaattagccaaagacgaccgcaagggggtccagaagctgctggtcagctaccaacgccggcaggaaaagctggctaagcaaaaggaagaattcttgggccgcttcagttacgagaaggatttttgggctaaagggcagctcgtagccggagtcgatgaagtcggccggggtcctttggctggcccggttgtagcggctgccgtcattttgccggaagatttttccttactggaagtcaacgactcaaagaaactgagtccgcaaaagcgcctggccctgtatcccaagatcctgcaagaggctgttgctgtcggcgtcggggtcatggacaacaaagtgattgaccaaatcaatatttacgaggctgaccgcctggccatgaagcaggccgtggaagctttgagcaccaggccagatgctttgctggtcgatgccatgaacgtgccggtggacttgccccagctagaattgatcaagggggatgctaagtctaactcgattgccgcggcctcgattgtggccaaggttttcagagactctttgatggacgattacgcccgtctttatccagactatgcctttgaccataatgccggctatggaaccaaggaccacctggaagcattaagaaaatacggcccaacgccgattcaccgtctgaccttcagtccggtgagcgagatggttggacttaaaaaggctgactagatcggtctttttctttttggtcaaaaaaggaaaattcccgctttttggcgtaatagtaagtggagggaaaaaatgaataaaaccgaattcttactgcgcctgaagctgcagaagggcctcagctatctcaaaatattgcaggtcatgcagcagatgcccccggatgaggacgtggaccatgaatggctgaactgcctggaactgcctgatgaaatcctctaccgggtggagcgggcctttttaagtgaccgctacgaaagtgccattgaaaacttgcaaaggaatttcaaaataattagtttctttgacgatgcttatccagtacgattaagagaaatttatcggccgccgattttgctttttgccaagggggacttgtcccttttggaaaaagaggtgacggtgatcgtggggtcaagaacgccaagtcaatattccggcaaggtgattgagaacctcatgccggttttgctaaagaaaaaacaggtgatcgccagtggcctggctaagggcgttgatgccctggcccaccagaataccttgaattttggcggcaagaccatcgcggttgtggctaatggcctgaactatttttacccccgggaaaatacgctcttgcagcagcaaattgccgcccggggtctcctgcttagcgaatacctgcccgacacgccgccaaggcccttccgctttccagagcgcaaccggattttggccgggatttgcaagaacgtgatcgtgactgaagccaaagcccattccggttcgttgattacggccaatttggccctgcaggaaaaccgaaacgtatttgccgtcccgggtgcaatcaccagccccttgtcggccggcaccaaccagctgatttcagccggggcaaccccggttatcgacaaggaaattgacctgtgaaagattaaattcttgcaaaaaatgcctgcctgctcccttaagttaattttcttttggttgacaattccggaaattatttctatattgaagaagatttaatttcgaatttagtgaaaggggcatttgatgcctgctacagcaaaagaagataaaagcaagagcagtaaaaagaccacggctgccaagaagagcagcccgaagcggaaaaagagcaaggtgaaaaaagacctggttatcgtggaatctccagccaaggcccacactgtcgagaagtacctgggccggaagtaccacgtaatcgcctctaaagggcacatccgggacttgcccaagtcccagatgggggtcgacattgaccacgactaccagccaaaatacatctccatccgggggaagggtgacaccatcaaggaactgaaggctgaagccaagaaggccaacaaagtctacctggcttccgaccccgaccgggaaggggaagctattgcctggcacgtggcccacgttttaggcctggacgaaaaagaagccaaccgggtaacctttaacgaagttaccaaagacgcggtcaaggatgccttcaaccacgcccggaccatcgatatggacacggtcaacgctcagcaggcccgccgggtcctggaccgcttggtcggctactctttgtcgccgattctctggtccaaggtcaagaagggcctgtcagccggccgggtgcagtctgttgccttgaagctggttatcgaccgggaaaaggaaattaaggccttcaagccggttgaatactggacgattgacgctgaatttgccaagggcaaggacaagttccaggctagcttttacggcgaagaaggcaaaaagacggaattgccaaataacgaggccgtccagaagctgctggctaagtttgacaagaagcagccgtttacggtcagtaaggtagttaaaagagaagtccgccggcagccagccgcgccgtttaccacttccaccatgcagcaggaagccaaccggcggctgaacttccggacttcaaagaccatgaacattgcccagcacctgtatgaagggatcagcctgggcaaggaaggcacggtcggtttgatcacctacatgcggactgactccaagcggatctcaccagttgcccgccaggaagcagctcagttcatcactgaggaatacggcagcgacttcgcggtcaagaaggagcgccacttcaagaatcaaggcgacgctcaggatgcccacgaagctgtccggccgaccagtgtctaccggacaccgaagtccctggaaaaggctttgaccaaggatgagctccgcctttacaccttaatttggagccgttttgtggctagtgaaatgactccggccgtctttgacacggtccgctatgacttgacccaaaatggggtgaccttcagagccagcgggtcagttatgaagtttgccggctacaccaaggtttatgacaaccggagtgaaaagaacgtggccctgccagccctggaagagggcgacgaggtcaagctgaccaagtcagacaacaagcagcacttcacccagccgccggcccgctatactgaagccagcctggtccgagctctggaagaaaacggggttggccggccgtcaacttacgcgccgaccatccagaacatccagtcccggaattatgtcaagctggaagggcgggcaatcgtgccaactgaactgggggaaatcgtcgacggcttggttgagcagttcttcccggacatcaccagcgttgactacacggccaagctggaagataaactcgatgaagtcgaagaaggcaagaaagactgggtcagtgtggttgaccagtactacaagccattctccaaagaactggagaaagccgacagcgagatccagaagatccagatcaaggaccagccagctggctttgattgtgaagtctgcggggccccgatgttggtcaagatgggccgctacggcaagttctacggctgttcccgtttcccggactgccgccacacccagaccatcgtcaagaaggtcggcgtgacttgtccgaagtgcggggaaggcgaagttttggaaaagaagtccaagcggggccggaaattctatggctgttcccgctatccagactgtgactttgtttcctgggacaagccgatcagccgggtctgcccgcacgacggccacttcctggtcgaaaagaagcgcaaggacggcatggtcgtcctctgcccgaatggcgactacaaggaagagccaatagaagaacaagacgaagcagccgaataagttgaaagttaaagcaaagatgtcaccaaggcccttggtggcattttttgctcagagcgtgcgattaggcagggagaagctttttcggtaaaatggtaagtagataatttttaagcgaaggattgaatcaaatgacagaaaaagttacggtaattggcgccgggttggccggcagcgaagcagcatggcagctggccaaaagagggatcaaggttgacttgtacgaaatgcggccaaagaaaatgactccggcccatgaaagcggcaattttgcggaattagtctgcaccaactccatgcggtccaaccagctttcaaacgctgttggcctcttgaaagaagaaatgcggcagatggactccttgatcatgcaagccgctgatgcctgccaggttccagccggcggggcgttagccgttgaccgggagcttttctccaagtatgtgaccgacaaattgaccagcctgccggaagtgaccattcacgatgaagaaatcactgacctgccaagtgaaggtatcaccgttatcgcgaccggtcctttgaccagcgatagcctggcagaaaagatccaggactttgaaggcaccgaaagcctccacttctttgatgcggccgctccaatcatcgcggctgactccattgacatggacatcgtttacaagaagagtcgttatgaccggggcgaagccgcctacctcaactgcccgatgaccaaggaagaatacgaccgctttgccaatgccctggttcacgcggaaactgctgaaatgcacggctttgaaaatagcgaggtctttgaaggctgcatgccgatcgaagtcatggcggcccggggggccaagaccatgctctttggtcctttaaagccagtcggcctggagaacccgaaggacggcaagactccttacgctgtcgttcagctccgccaggacaacgctgctgcctccatgtacaatatcgtgggcttccagacccacctcaagtacggggaacaaaagcgggtcttccaaatgatccctggcctggaaaacgcccgcttcgtccgctacggcaagatgcaccggaacacctacatggccagcccggaagttttaaaggccagctatgaagctaaaaagcggccaggcctcttctttgccggccagatgaccggggtggaaggctacgtggaaagtgccggcagcggcctggtcgccgggattaacgcggctagagaagccctggggcaagagacggttgaattcccggtaaccactgcccttggctctatggctcactacattacgaccactgatgccaagcactttcagccaatgaacgccagctttgccttgattccgggcctggagggcaagaagatcagaaacaagcgcgagcgccacgaaaagatcagtgaacggggcctggccgacctggccgcctttaaggcagagaagctggctgactaatgacacttgaagagcagtttctttcctacttgaaaaatgagcgctcttacagccccaaaaccgtcctggcctaccaaaaggacctggcagcagctaagaaattctggcaggaaaacgggggctttccaggctgggatcaaatatcccgccgggacctggaaatttacctgctggcaaccgggcaaaagctggcatccagcactttatcccgaaaattatccagccttaagtctttttaccgacttttgaccaggcggggtttggtcaaagctgacccgaccgtggccattcagcttaggcgagggaagaaaaagctgccggaatttttctaccaagatgaagtcggccaggtcatccgctcgctagacgatggcaaaccgttaacagtccgcaaccgggcaattgtggcgcttttttacgcgaccgggatgcggctgagcgaactgactgacttgaaaattaagcagcttgacctggaaaacggcatgattttggtgcacggcaagggcaataaggaccgttatgtcttttttgaccaagagagcaaaaagtacttggaggaatatctgcaggcagcccggccaagtttattgaaaaatgagccagataccggggcagtctttttaaacaagctcggtaggccaatttccagccgggggattgccaaagccgtccagcaaatttttcaaaaagcaggcttgacggctggtgcccacccccatgaactccgccatagcttcgccaccgccatgctcaacaacggggcagacctcaggagcgtgcaggagctcttgggccatgaggacttgtctacgacccagatctatactcatgtcagcatgcagcatcttacggcggaatatcgccagcattttccccgaaaatgaggaaaagtgttattatgaaaatgtttggaaagcggcaatcatttccgctttttatcaagatttttaaataacgcgatcaatagaaaagcaaacaaacggaggaagaaaatgacaacgatttgttcagtaaaatacaatggccagacggcgattgccggcgacggccaggtgaccctgggcaagagcatcatcgccaagaccacggccaagaagatccgccgcatttaccatgaccaagtggtgatcggctttgccggcggggtggcggatgccgtcagcctgcaggaaatgctggaaggaaagctggaaagctacagcggcgacttacgccgggcagccgtggaaatggcccagtcctggcggaaagacccgaccttgcagaaattggaagccatggttattgcttttaacgaccaggacctgctcttgatttccggcaacggggaagtgctcgaaccagacgaaagcgtggtggccatcggctcaggcggctactatgcccaggcagcggccgtggggatgctccggcatgccagcgggatgacggccagtgaaatcgccaaggaagcagtcaatatagctgcggacatcgatgtttttaccgaccacgagattgttacggatgaaatcgaggaaaaatagggatgagagagaaaacgccaaagcagatcgttgacctgctggacaagtacatcgtcgggcagaatgaggccaagaagtccgtggctatcgccctgtacaaccgctaccgccgggcccagctgccagaagacgtgcaaaaggacattacgccaaagaacattttgatggccgggccaaccggggtcgggaagacggaaatcgcccgccgcctggctgacatcgttgacgcgcctttcgtcaaggttgaggctaccaagtttaccgaagtcggctacgtgggccgggatgttgaatccatggtccgggacctggccaatgaagctgtccggatcgtggaaaaagaagaatttgtcaaggttgaaggccaggccatccgccaggccaacaagaccctggtccgcctgctggtgccgggcgttaagcgcaacaaccggcaaaaccagatgcagcagatgcaggaaatgatgcagagcctgctggctggcggcgggatgccggaagaaacagaagaagttactgacgagatcagaaaccaaagactcagcgtggctgaaaagctggaccgggggcttttggaaaacgaagaagtcaccatcgaagttgaacaagctccaaaggccaacccaatgggcgacatgatggggcagatggggatggacatgtccagcatgctgggtgacatgcttcctaagaagaaagtcaagcggaccctgccggtcggccaggccagaaagcttttggtccaagaagaagaaaagaagctggtcaactatgacgatatctaccaaaaggccatggaccgggccgggcagagcgggatcatcttcatcgacgaaatcgacaagattaccgcggctgataagcgcaactccgccggcgtctcaagagaaggggttcaaagagacatcctgccgatcgttgaaggctcaaccgtaagcactaagtacggtccgctttcaaccgaccatatcctctttatcgcggccggggcctttgctgaaagcaagccgagcgacctcattccggaactgcagggccggttcccgatcagagttgagctggccgccttgaccaaggatgacttcgtcagaatcttgaaggacccgcaaaactccctcttgaagcagtacattgccttgctgaaggctgacggggttgacctggtcttcacggctgaagcagtcgacaagattgctgaaattgcctttgaagtcaaccaggggacggacaatatcggtgcccgccgcctggctacgatcttggagaagctgctggaagaagttctctatgaagggccggacatggaaatggggcaaatcaccatcacccaggcctatgtcgaacagaaattgagcgatatcgtcaagaacaaggacctgaccaagttcatcctgtaaaggagggatttttggcaaattattcctgaattagtgtaaaaatgcgattgagtttagaaaaaataagagtattaagggacaaataatggattatactatcgaaaacgagattctgaaggttacggtatcaagccgcggggcagagctgcagagcgtcattggtaagcacatcggcaatgaatacatctggcaggctgacccggaagtctggggccggcatgctccagtcttgttcccgatcgtgggcaagctgaagaatgatgaatacagctaccagggccagacctaccacatgggacagcacggctttgcccgcaacatggaatttgccctggaagagcagactaaggaaaagctgaccttccttttgaccgacacagaagaaaccagagctgtctaccccttcaagtttgaattccgggtcagctatgagcttttgaacaacatgatcaaggaaagcttccacgtcactaacaagggtgaaggggacatgatcttcggcgtcggcggccacccgggctttgccttgccggttgaagacggggtcaagaaggatgacttctaccttcaggtcaacccggctaagccccgggtgcaggtgccgctggaaggcggcctgctcaactgggaaaagcggttcctggccccaactgaatccttgatcacgatcactgacgatctctttaaggatgatgccatggtgttggtgatgcggcacccggacaacaagttctccatcaagacggaaaccagccgcttccacatcaatgtcagaactgattcagctccttacgtgggcatctggtcccagtacccaaagacggctgattacgtctgcatcgaaccatggtgggggatcgctgaccttaccgatactgacggggacctggaagataagaaggggatgaaccggctggcaagcggggaagacttcgaagccagcttccgcatgtccttccacagcaaggtccagagcgaataagagttagaaagtaaagataattttttgcatgagctgccagattctggcagctttttttatgggaaaaagctggccaaacattctgaaagcggaaacaaaaataaaacgatttggactataatcaacttataaagtatgtgcttgcaaaaaagtgtttgaattgtgttttggaggaataaaaaatgacgaagctatatagcgtcctaacggccgccgcccttatgtccctttgccttttggccggctaggaaagccaagccagccaggtagatgaatataatccagaagttagaaacttttaggtacgggaaggcgaataccggattgcccaggagctggtcaagaatgctaaaagcctgccggctaatacggtttatgaattcgtgcccgagcccaatttcgccaaggcggggacatataagacctggatccgcctgctttatccggacaattcaatggagaccagccaggaagtaaccgtcagcgtttatgaccatacctggaaggcgaagaagacggtcaaaaagcataaaaagctaataagaagagcaagaagtccaagcgcctgatcaccaaccgggcaaaactgcctaagaagaccagtttccgctttgcccgagtgccaaacttcaagtgggccggcagctacaagacccagattaaggtcacatacccggacaagtcgacctggaccagttcagaattcatgattgaggttgccccggaagcagaaagcacgcagagcaactaagtttattaacatcattctttaaatcaaggccaaaattggtcttgattttttgttttttaatctgtgcttttcacaaacttttgctataatatcgactagtaagcggttacaagtcgccgataaattaagtcaacatggggaaatagccaatgagaaaaatcaagtgtgagctttgcgggcaaagagatttgttaaaagaaggcagccgttttgtctgccagacctgtggggcagcctattcagctgaccagttgcgccggcaatttgaccttgccgaccaggcggagatttatgctgaagccaagcaagcctaccgggccaagcgcttcaagcaggccaggcagctgtatctggccttagcggaagaaggggaccagcaggcggccttttacgccagcctttccagcagccagctcgacccggcggcggactttgtcccccttttgaatcagctgcgggcagctttagtggccagccgggaaaagggcggggaaggctactttgcttttgccagccgggccctgggcgaagtgatcgtttttgccctggcagtggaagaagaatgtgaagaagactttcaaaagcaggctcagcgcctggaactcagttcccggcagaccctggagaaggcccaccagaagatgcagaaagaagccggccgggcctggctcttgatgagccaggcagcccacctctgcgtaggggagagcgatgacttagccgctgtcagtccctatttctgggagctggtcgatgcgattatcgatgacttgagcatcaaccagaagcggggaacgattgccttgggcaacgtgaaagaagaacgggcttattttgaagccttgaaggctgagaaaaaggccaaaaagctggttaatggtcaactttttaaagtgaatcttggctaaggcaaattttttgtaaaaaaaggcttgccaagagttaaaaagctaagtatgatattacttggtcgggggatgcgaggagccgtcccttggttgaattgaagattgcgttatagccaagtggtaaggcaacggtttttggtaccgtcatgcgctggttcgaatccagctaacgcaattgtgaggaagacacctagtcgggtgtcttttttgttttttctatctttcttgcccttttcttttctcagcctgtctgccttgaccaggcaggtggagaaggctaaacttattagttaagttgattaaatttttcagaaaaaaagctgaggtaaaagcgtgaacggattaattaaagcaagcgatgtcaatcaagccggccacctgcagattgccggggtagatgccctggaactggcggccaagtaccagacccccctgcaggtttttaacgtggggaaaatccgccaggcaatccgggcctttaagcgggtctttgaagaagaaggggtagactatgaagtcagctatgcttcaaaggccttttcctgcctggccatctaccaggtcatcaatgaagaaggcggccacaccgacgtcgtctctggcggggaactctggacggccatgaaggcgggctttcctatggacaaggtgagtttccacggcaacaacaagagccgggcagaactggaaatggctgttgaccagggagtcggggtcattattttggacaacttccatgaaattgacttgctcagccagattttggaagaaaaagacgcaagcagcaaggtcatgctccgggttacccccggcatcagcgcccacaccaacgaatatatccagactggccaggtggactccaagtttggctttgatatggaaagcggccaggctgaccgggccctggaactggtcctggccaatccgcggatgaagatggccggcattcacgcccacattggctcgcaaatttttgacgtccggggcttcgtgggctgcgcagacaagctctgccagctggctagtgcctggaaagagaaatacggctatgaagcggacatcttgaatgtggggggcggctttggcattcactatactgaccaggaccagccgcttccggctgaagaattcgtccgggccattgttaaagaagtcaaaagcaagtgccaggaaaacaatttgaaattgccggccatctggattgaaccaggccggtcgatcgtcggccctgcgggctttagcctttatactgtcggctcaagaaaggacctgcctggctacccgagctatgtcgcccttgacggggggatgggggacaatatccgcccagctctttaccaggcagaatactcagccgttgttgctgaccgccctcaggcagaagatgaagaaagggtcaacctggtcggcaagtactgcgaaagcggggacatcttgatcaagtcttgtcctttaccaaaaaccgaaccaggtgacgtagttgccctcttaagtaccggcgcctatggctattccatggcctcaaactacaaccgcaatccgcgtccggccgtggtttttgctgaggacggagttgaccagctggtgatcaagcgggaaagctatgacgatttgattgccaacgacttaaaatatcaaaaataatctcgggccatttttaacaaaataaacttttgcctggtatataattaagaaaatcatttttcacttgagaaaaaatggacaaagttagctatatctgccgctttccttaacaagctatgctaaaataggcttaaatgttaagttattgttctttttgatttgaattaagaggtttttccaatgccaaaattagcgcaagatttactgccgattatcaaccacaagctcgatgccgtggttccttcagatatccgccgttttgacaagtatgtttcccagttcgatgatgttgtcaagctgaccctgggtgaaccggacttaaataccccggaacacatcaagcaggcagctatccgggacattgaaaacaatgacagccactacggcccgcagtcaggcaagccggaactgctccaggccatcagcaagtacgttaagggcgtgaccggggttgactatgacccggcgagtgaaatcaccgtcacggtcggggcaaccgaagccttgaactgcagcttgtccgcccttttgaacgatggcgacaaggtgatcgtgcctactccagtctggtccatgtacatgcagctggtctgcttgactggggctactccagttgaagtcgacacttcagacaccggctttattttgactccggaaaagctggaagaagtcattgaacgggaaggcaagggggttaaggctgttatgctgaacgacccgaccaacccgaccggggtaacctaccctaaggaagttatcgaaggcctggctgaagttatcaagaagcaccacatgtacgcgatcagtgatgaaatctactccgaactgatctacggggatgctaagcactactctttggcgacttacattccagacagaaccatctttatttccggtctgtccaagtcccacgccatgactggctggcggttgggctatatctgcgggccagatgaaatcatggccagcgtccgcaagatgaatgacttcatgatcacggtcgtgaccaacaacgtgcaagctgcggccattgaagccttgaccaacggcctggatgacccgaaggaattcagagacatctaccagcgccgggtcaacttcatggaaaagggcttgaagaagctgggttttgacatggctttgccgcgcggggccttctacatctttgccaagattcctgaaaagtatcagggtgacgacgtcggctttgccaaggccctggccaaggatgccagagtcggcgtgatcccgggcagttactttggggctggcggggccggctatgtccgcatgtcctacgcttccagcgatgaagtcttaaaagaggctctcaagcggattaccaagtttgtggaagcagaataataatttttatcaacttaaacttcccacttttgtaagtgggaagtttaagttacctataagagacgcaagcaagtcggtaaaaagcaagacatcttagattctctaccgggcgaggaggttcatcatcgtttggatgatcttacttgtccagactgccagcacgagctgaaagagatcggcagcttctgtgccagaaaagagctgctaaagcaggatgtaattcacgcagatgagacgccatatcgagtcttagacagtgaaagagctaaagactacgtctggaccttcttgtcaggcaagcatgccgagaagccgattgttctgtatcactatggatcacgaaaaggcgccgaagcatgggatttcctggcaggcttcagcggataccttcattgtgatcaatatcttgcctaaagacaaggctatagagtccgacgcgactttggtggctaatcaagggatcaactactgtagtcaaatgtttagcctggagcgcgcctgggaagacctttccgctgaagagagatacgaaaagcgccagtccgaattaaagcctctgctagagaagttttccgactggtgctccaagaaatcaatctccgtgttgccttccggtaagctggggacagccttcaagtattgcatgaagcacatggacaagttcatgaacgttctaaaagatagtcgccttgaactgtccaacaacagagcagaacgagcagtcaaagagatcgtcatgggacgcaagaactggctcttttcacagagtagtacaggcgccaaatccatggcaatcattatgagcatactcgaaaccgccaagcaaaatggcttggatcaattcaaatacatcaactatcttctagacaagctgcccaatgagctgtcattcagcgtctggaagcctatttacaatgggctgagaatgttcagctccactgtaagtaaaagtcccataaactgattaatcccatcttagcattgctaggatgggattttaatatactctgctattgggtacttacaaaaattgttgggaaagccccaatgatttatgaaaaagctgtatcataaataaggatattcatcgctttgtcttcttatataggcggggcaaggccagtagccaatagctgctgatcctgttacaacggaaaggaaagcagaaaaatgaagctgtttgatttaaatcgattttcacgcaattacggctttttggtaaaaatcgggacggcaattctatactcagttatggttgccgtagccctgaacttcttctggcatcccggccacatctattcttccgggatcaccggcttcgcgcagatcgtcaacactgtgaccagccgctacatgccatttaccatcccaacagaagtgatgtactttgccttgaacgtacccctctttatcctagcttggttcaagatcggccgtgagtttaccggctacaccatcttcgcggttgctatgtccgcgatcatgatgcgtttcatccaaccgacccaagttagcctggaccctatcctctgcgccattttcggggcagcagtcaacgggatcggcactggtatggctttgaagagcgggatctctacgggtggtttggacatcttaggtatcgtggtcaggaagaaaactggtatgaactacggcaagttcaatatcttgatcaacttgatcatcgttttgatcgctggttttctctttgactggtccagagccctctacacggccttgaacattttcatcaacggccgcttcatcgactcagtctacactcagcacaacaagctgcaggtaatgattgttactgaacatcccaatgctatcatcgaagggattcaagaaaagatgcaccgcgggatcactatcttccacgacgtggaaggggcctacgggcatactgaaaagaccgtccttttaaccattatcgacacttacgacctctacgacatccggaccacagtagaaaaatgtgacccctttgtcttcatgagtgtcacggaagtccagaaagtttatggcagatttagagaacaagaagtcgtttagctattgagaaatattaaagacaaattatacttgtgttatgaaagttaagtgaggtggtgaaatagatgccagatgaaagggacaatagccgctatcaaccaaaatatataggcttggatttggcgactgagatcgccactacttacgctaaacagcatggacaccacaatgtcaagctgctgatgactaagaccagtccagacaagcggtcagagtatttttacgtcttcagcgtaactgacagcttgcgcgagaacggttgtgactgaatatttcattttagttgatccagtttctggagaagtcttcagagtggatgaaagtccgctgaagtaaaagaaaaacgcgcgcttacgtttgttgtaagcagcgcgtttttttacgcaattatttgattaatcttcttcgtaacccaggtggttcataatcaaagccgcggtttcttcgattgaccgttcagccacgttgatcacgaagcagcccagcttcttgtataaggccatggcactgtccagttcggcattgatggagtccatgttggagtaggcagtatcggggtccatcccgtagctgatcattctttgccggcggatgcggttgagcacttgcggatcggtggtcaaaccaatgatcttcttcgggtcaatttggtagatttcctttggtatgtgggtctgcggtactagcggcaagttggccaccttaagccccttgttagccaaaagcaaggaaaggggagtcttggaagtccgggagacacctaacaagacaacgtctgcttccaaaaagccccgcggatccttgccgtcgtcgtacataaccgcgaattccatggcggaaatccgattgaagtacttgttggtcaattggtggttagccccaaccaggccggtcggcttcatatgggtcgtctggctgatagcctcaatgatcggagacaaaatgtcgatgtacctagccttgtgttcccgggcaaacttgatgatcggcaattgcagcttctcatccagcatgctgtagacgatgaccaggttagggtactgctcgatttcttccagggtagcggccagcttcttttcgttaaccatgaaaggatagcggcggtagttgacttcggcgtcagggaactggacggcagccgcctgggcgttgttaaaggccgtttccccagctgagtcggaaataataataatgttgacttccatcttttcagttttttctgtttgcttgttttctgctttattttcagtcatatagatcacctcatcaactctattataccggataatgcgctttctggatcttagcccaaaaaacttttcaaaaaatctatccaggctattgacgattagtcgatttttgctataatttagataaatgcttatggcagcaatgccaagaaatggaaggagggatcacacatggctaagactatcgttcacgaaaacgagtctattgatgatgctcttcgtcgtttcaagcgttccgtttctagaagtggtactttgcaagaataccgcaagcgtgaattctacgaaaagccaagcgttcgcagaaagttaaaatctgaggccgctcgcaagcgtagacattattaatcgactgaagctctcgtgaaaacgggagcttttttcttgcttattttccgtgttctcttttggcctaaatcgtgtatcattggtttagaagagtatagtctggcggacagagatgtgcttgcccgctggtttgaaaatgaaggagttcttttattggaaaagaagtttttgccccacagcagcgaaaatgtccagaagctggtgggcgtaaatgacagcaatttgaagctgatcgaagaaggctatgaggttatcgttactgacctgggtggtcagatcaatgttgctggacctgaagagcaggtggagaccgtcttgcgggttttaaaggccttggacggggtagccagcaacgggatcaatttaactccggccgatgtggtcagcgccatgaaaatggctgaccgggggacaactgaatactttggcgacctctataagcagatcttgatcagagatgctaagggccggccagtccgggtcaagaatatgacccagaagagctatgttgaagccatcaacaagagcgacgtggtctttgggatcggacccgccgggacagggaagaccttcctggctgtcgtctgcgcggttgctgcctttaagcggggagaggtctccaagatcatcttgacccggccggcagttgaagccggggaatccctgggctttttgccaggggaccttaaggaaaaggttgacccttacctgcggccaatctatgactccctttatgccatcttagggcagggaccaactgaccgcttgatggagcggggcgttatcgaaatcgctcctcttgcttacatgagagggcggaccttggaagaagctttcgtcattttagacgaagcgcagaacacgactgacgcccaaatgaagatgtttttaacccggctgggctttaactccaagatggtggtcaacggggacatgacccagatcgacctgcctggcaaggcccgcagcggtttgatcacggcccgcaatatcctgcaggggatcgaccagatcgagttcgtggaattcagtgcggctgacgttgtccggcacccagtcgtagcaaagattatcaaggcatacgaagaggaaggaaaataatgcagggaattgacgtaagctacagcgatgaagtcggctttttgactaagggagaccgggactgggaagactggatcatgcagctgctcctcatggcgaaaaaggaaatcggcaaggacaatgcccaggaaatgagcatcaatttcgttgacgaagaccggtcgcaggctatcaaccgggactaccgggataaagacaggccaaccgatgtgatttctttcgccattgaagacggcgacgacggcctggacctggctatgttcacccaggacccggactttaccgaagacattggcgacttgttcatgtgcccaagtgtcatcgagcgccacagcaaggaatatggcaccggctttgaccgggaatttggctacacgatcgtgcacggctatttgcacttaaatggctatgaccacatcgagccagacgaagccaaggaaatgtttggcatccagggcaagattttggaagaatatggcctgcccctttatccggaccaattagacgaaggaagaggaaaatagcatgaacgagttggaagaaaaactctttttgctggccaaggaccatttggcggatgcctatagcccttattcccactttcacgtggctagcgttttagtgacggacgcgggagaaatttttaccggggtcaatattgaaaactctgcttttggcttgaccaactgcgccgaacggacggcaatcttctcctgggtgaacgctggccggcagggcaagatcaagagcattttgatcatcggcaacactgaccggccaatctccccttgcggggcctgccggcaggtaatgagcgaatttatggctccggaaacggaagtaattctgaccgacagccagggggactatgagcgctttacagttgagcaattgataccataccatttcacagaaaaggacattcaagatggggcaaacaagtaaacacaagtcaggtttcgtagcattggttggacggccaaatgtcggcaagtcaaccttgatgaaccgtttaatcgggcagaaggtggcgatcacctccgccaagccgcaaactaccagaaacaagattttcggcatctacactgaagatgacatgcaagttgtctttgtcgacacgccggggattttcaagagccattccgacctggacgaatacatggacaaggccagcctgtcttctttaaaggacgttgacttagtcatgttcatggttgacgctaaagaagccggcaagggcgaggaatacgtggccggtcttttgaaggatttggatattccggtatttttggttatcaacaagatcgaccaggttcacccaaatgatcttttgccaatcatcgactcctaccaggccgtcggcaagttcgcggaatttttgccaatttccgcccggcagggcaacggggtcgacgacttgctcaagaccttgaaggactacctgccagaaggcccgcaatactacgcttcagatgaagtaaccgaccggccggaatacttcgtggtggctgagatgatcagagaacagatcctccgcttgaccgaccaggaagttccccactcaaccgctgtctgggttgaccagatgaaccagcggatcaatggcaaattgcagattgatgccacgatttttgtggaaaaagacgggcaaaagcggatcattatcgggcaaagagggtccatgattaagcagatcgggatgcggtccagaaaagaaatcgaaaatcttctgggcgagaaggttaacttgaagctctgggtcaaggtacggcgcgactggcggcaggacccggccttcctcaagtccatcggctatgacaagaaggaactttaatggctgctgacctgctcgatgtccacggcctgctttttaaaaggcagcagtataaagaggctgacctcttggccaagctctggaccaaggaactgggaatcgtcaccgtaattgccaaaggcgggatgcggcccaagtcccagctggccgccgcggttttgccctttacggaagggacttttggcatcttgacccgctacaaggggatcagccagctgcggacctataagaagctcagccagcacgatgagctttttaccgacctggacaaaaatgcctatctttcttatctttttgacttagctgaccatgccttcagcgagtaccagaaactggggggctactatgaccttttgctagtggcctttaaccggatcgtggctggccaggacccggaaattattgcccaaattgtccagctgcagctcctggatgccttcggggtagctcctcagctgggggcctgcgtgatctgcggcaaggaaaaaggaatttttgactattcaatcgccgccggcggggtggtctgcagcgaccatttccgctctgtcagccgcctgcacctgtcgccaaaggctactgccttaatcagaaccctggcccttttaccaatcagccgtttaggagagatccagatcggcgaagatttgaaaaaggaaagccggcgggccatcgcccagatctaccaggcaacagtggatttgcacctgcccagcctccgctttttaaatgaggtccggggcagctgattttcctaaaaaaacgtgaaaagaaaagggatttgtggtaaaattagcctgtatattggtaatgatgaggaaataaaaaagtaccgcggcagcgagtatcggttggtggaaggatacagcgggaaaaggcacctctagccaagctaattaagagcaggaggcaaataggcttcctgaattagggtggaaccgcgaatactttttcgtccctatgcaaaagtaaaattgcataggctttttctatggccttgcataggaggtaactatgacacaaaaattagatattcagaccatgatcttcaagcttgaacagttctgggcttcaaaaggctgcatgatcatgccatcatatgatgaaaacaagggtgcggggacgatgagcccatacaccttcttgcgggcagtcgggcctgaaccttggaaggcctgctacgttgagccttcccgccggccagctgacgggcgctacggggacaacccgaaccggctcttccagcaccaccagttccaagtcgttttaaagccggctccgctggaaatccagcaatactacctggactccttgaaggttcttggcattgaacctttggaacacgacatccgcttcgttgaagacaactgggaaaacccatccatgggctgtgccggtgttggctgggaagtctggctggacgggatggaagtttcccaatttacctacttccaaactgtcggcgaactggacgtcaagccaaccatgggcgaaatcacttacggggttgaacggctggcttcctacatccaggacgttaactcagtctttgacctggaatggggcgacggcgtcctttaccgggacattttcaaggaacctgaatacgaacactccaagtacgcctttgaagaaagcgaccagaagcaattgctggaattctttgacacttacgaaagaattgccaagcgccttttgggccagaacctggttcacccggcttacgactacatcttgaagtgttcccacaccttcaacctgctggacgcccggggggcagtctcagtaactgaacgggccggctacctgcaccgaatccgcaacatggctcacgaagtagcggttaagtttgtggaagaacgtgaaaagcgcggcttcccattgttgaagagtgcacaagcaaaggcggaggcaagcaatgactaaagactttttatttgaaatcggcgttgaagaaatgccagcccacgtggtcagcaaatcagtcaagcagctggctgacagaactggcaagttcttgaaggaaaatggcctgggctttaaggaaatcaagacctactcaactccccgccgcctgactgtcctggtcaaggaactggatgaaaagcaggctgacgtggatgaagtcaagaaggggccggccaagaagatcgcccaggacgctgacggcaactggaccaaggccgctgtcggctttgcccgcggccaggggatgagcgccgacgacatctactttgaagaactcaagggcgtggaatatgcctacgtgcacgtgcaaaaggccggcaaggaagctaaggaaatcctcttgggcctggatgaagtaatcaaggccatgaccttcccgaccaagatgcgctgggactcccaagactttgaatttgtccgcccaatccactggctcgttgccctttacggcagcgaagtcgtcccagttgagttcctggacatcactgccggccgcaagactgccggtcaccgcttcctgggcgacagcgtggttttggccaacgctgacgactacgtggaagctctgcgggaccaatacgtcatcgttgatgctgacgaacgcaaggccatgatcgtttcccagatcaacgacctggtaaacagccacaactggcaaatcaagctggatgccagcctcttggaagaagtcaacaacctggttgaatacccgactgttttttccggctcatttgaccaaaagtacttggaaatcccggacgaagtcctgatcacttccatgaaggacaaccagcgctactttgaagtctacgaccaggatggcaagctgatcaactacttcatctccgtgagaaacgggaacaaggaccacttggaaaacgtgatttccggtaatgaaaaggtcctggttgcccgcctagatgacgcggtattcttctacgacgaagaccgcaagtacccgctcagccactttgttgaccggatggacagcgtttccttccacgacaagatcggttctatggcagaaaagatgacccgggtccggatcatcggcgactacctggccaagagattcggcctgtcagctgaagaagtggctgactttgaccgggtaagcggcctgtacaagttcgacctggtaacccaaatggtcggcgaattcgctgaactgcaaggggttatggggatgcactatgcccgcctggctggcgaaaacgaaaacgtttctgtcgccatcaaggaacactacatgccaaccacggctgaaggcgacttgccgaagaccaaggtcggcgccctcttgtcagttgctgacaagctggacaccattatcgccttctttggtgccgggatgattccttcatcatcaaacgacccatacgctttgcgccgttacgcttacgggattgtccggatccttttgaatgaagactggtccctgccatttgaccaggttgttccggaaatcgtggaacttttgtctggcaagactccggccaagctgccgcaaggggtggaagaagacaagcaacttgctgacttcatccgtgaccggatcaagcagttcttgcaaaagaacaactaccaatacgacgttatcgacgccgttctggcttcaagcgaacaagacccaagccagatcctggccgctgccaaggttctgcagcagcaccatgacgacgaggccttcaagccagtcgttgaaagtctgactagaatcgccaacatcttgaagaaggctaagttcagccaggctagtccggttgacccaagcttatttgaagacagaagcgaacaagacctttataatggagttgaagctttggcaaatgtcaaggaccatgctgaactttacgaagccttcgttgctttgcaaggggtaatcgaccgctacttcgacgtcaacatgatcatggccaaggacgaagcagtcaagaacaaccgcttgagccagctggcagctgtcaatgacctggccaagcgcttgggcgacttgagcaagttggttatcaagtaagaagcaaatttttaataaaggatgaggcaaattggctggaagaatttcggaagattttatcaatgaagttcggggcagcgtaaatatcgttgacgtgatcagccagtatgtatcactggagaagagaggcaaagactatgttggtctttgcccttttcatcaagaaaagaccccctctttcagcgtcaacccggacaagcagttcttctactgctttggctgccataaaggcggcaatgtctacaagttcatcatggaaaaggaagaagttacttttccagaaagcgttgaaagagtagcggaattcgccaatatccccatgccccaggaataccaggagcagccggtcaagctgaatcctttgatgcagatgcacaaggaagcggcggacttttaccagcaggttctcatgactaccaagatcggggaaaggggcctggaatatgcaagaaaaagaggcttggacgatgacctgctcaagcactttaagatcggctatgccccaggtaagtccgacctgctcttgacctatttgcgaggcgaaggctatacggatgaccagctggcggaaagcggcttgtttgtcaagagccaggacggccgcctctttgaccgcttcagagaccgcttgatgttcccgatgagtgatgaaagcggccacccggtagccttttccggccggagaatcagcgatgacccggaagaacctaagtacttgaacagcccggaaaccagcatcttcaacaagtccgacctgctcttccacttttcagaagccaagaaacatgccagaaaagagggacacctggtcttgtttgaaggacatatggacgtgatttcggcctataagtccggggtcaagaccgggattgcctccatggggaccagtttgacccagcagcaggtctatatgatccgccggatcaccaagcaagtcgtcatcaactatgacggcgacgatccaggccagcacgcaactgaacgggcggtgggcctcttcaagcaggccggcaactttgacctgggcatcgtgatcctgcctgacaagctcgacccggacgaatatgtcaagcagtacggaccggacagctaccaggccgcgattagaggggctatttcgaccactgactttttcctgcagcgcttgaagaagaagtacaacttaaacaatgagcgcgagcaggtggcctatttaagcgaggcagtagcggaaatcgccgccttgcccaacccggttgaacaagacctttatgtaggccgcctggccaaggaaaccggagtctccctcgacgctttaaaggtcaacttgtccagggcccgccgcaagcaacgccgggtggaccagcataccagcagcgaagtcctgcccgagctggcccccttggctcccgccgcggatccgcagccggtcaccagggctctaaaggcccagcagcgcctgctttatgcctacatctattctgatgaggcccgggactacttgaccgtcaacggttttgtttttccaaacccggaatacgagcgcctggccaaactttggctcaattacattgaaactcatgaaaatgtttcattgagcggctttttggattttattcctgaagaacttcagagtataattgttagtactgatatgaccgggctgccaggggaaatcaccttggaagagctcgaggcgcaggttcgggtactcaacctgtgcaagatggatgatgagatcgaccgccacatgcaggcgattgcagacgcgcgtcggcgaaacgaccaaacggcaattttgctggaaacacaggcaattttgcagctaaggcaactgaagctgcaggtagaggaggcagttagtgacagaagaaaagcaaaccaaggctaatgagatgtccctggaaaaggcggtgaagctggttgttgaaggagtaaaggccagccaccaaatcactgaagctgctttcgaagaccgcttgatcaagccctacaaattagagggcaaggccgtcgaccagctggttcaggaatttgaagacaacgggatcagcattgttgatgaggacggcaagccttccaagctggctctgaccaagcagaaaaatgttgaaaaggcggaactgaacaatatggacgccccgaccgggatgaagatgaacgacccggtcagaatgtacttaaaggaaatcggccgggtcaaccttttgaccagtgaggaagaagtcgccctggccaagcggattgaggccggcgatgaagaggccaagcaggaactggctgaagccaacctgcgtttggttgtctcgattgccaagcgctatgtcggccgggggatgaacttcctggacttgatccaggaagggaacatgggcctcatgaaggcggtcgacaagtttgactaccggctgggctacaagttctccacttacgcgacctggtggatccggcaggccatcacccgggcaattgccgaccaggcccggacgatcagaatcccggtccacatggtggaaaccattaacaagctgatccggatccagcgccagctcctccaggatttaggcagagacccggaaccggaagaaatcggggcggaaatggacttgccggtcaagaaggttagggagatcttgaagatttgccaagagccggtttctttggagaccccaattggggaagaagacgactccaatttgggcgacttcatcgaagacaaggacgcgatgagtcccgaacagcacgcggccaatgagatgctgaaagagcagctggctgaggttttggataccttgagtgaccgggaagaagaagtcctccgtttgcgttttggcttagatgatggcaaggccaggactttggaagaagtcggccagcattttgaagtgacccgggaacggatccggcaaattgaggccaaggccctcagaaagctccgccacccgagccggagcagccagttgcgggatttcttagattaatgtgtagcgtgatgctgctgtgatagagtgaaggcaatcaaatgacagacaaagctaagcagacaggaaaggcagaccaggtatccctggctaaagccgttaagttagttgttaaggatgtcaagaagagcaagcaaatttctgaaaaggaatttaccgaccgcttgctgaagccttaccaaatcgaaggccgggcggtcgatcagctggtgcaggaatttgaagacaacgggatcagcattgtcgatgacaagggcgaaccgtccaaattggccctggccaagcagaaaaacgtggaaaaggcagagctggaacacttgtcagccccaggcagccggatgaatgacccggtccgccagtatttgaagcggatcggccgggtcagcctgctcagcggggatgaagaagtccagctggccaagcggattgaagccggcgaccaggaggccaaggatgaactgaccagtgccaacctgcgtctggtggtttccattgccaagcgctatgttggccgggggatgagctttttggacctgatccaggaagggaacatgggcctgatgaaggcggtcgacaagtttgactaccagctgggcttcaagttttctacttacgcgacctggtggatccgacaagcaatcacccgcgcgattgccgaccaggcccggacgatcagaattccggttcatatggtggaaaccattaacaagctgatccggattcagcggcagcttctccaggatctgggcagagacccggagccagaagaaattgccgcggaaatggacttgccggtcaagaagatccgggaggtcctcaaggtggcccaggagccagtttccttggagacaccgattggggaagaggatgactcccacttaggcgactttatcgaagacaaggacgcgaccagcccggaacagcacgcggccagtgaaatgctgaaagaccagctggcggaagtgcttgacactttgactgacagggaggagaatgtattgcgtctgcgttttggtctggatgacggaaatccccggactttggaagaagtcggccgggtctttggcgtgacccgggagcggatccggcagatcgaggccaaggccttgcgcaagctgcggcacccaagccggagcaaccagttgcgtgactttttagagtagtaaatttttagcagaataagaacagggcggattgaatggcaaaagaaaatgcttctaacgtaaatgattttccactggaaaaagcagttaaaatggtgattaccggtttaaagaagaccaagcagatccgcgaaaaggacttgaaggcccggctcttgctgccgtatggtctgaatgatgccgaaactgccaagctggtagaagagtttgcggacaatgggattagtatcgttgacgaccagggtgaaccgtctgctctggccctcaaggctgaagaagaagctgaaaagaaagaacaaaaagaactggtcgcttctagcgacaatgaccgggtttacgactcggttcggatgtatttaaaggaaatcggcaaggtcccgcttttgagccgggacgaagaagtagaagtagccaagcggattgaaaacggcgatgagtcagccaaggatgaactggccgccgccaacctccgtttggttgtctccattgccaagcgctatgccaagcacaatgggaagatggggatcctggacttgatccaggaaggcaatatcggcctgatgaaggcagttgacaagttcgactactccaagggctttaagttttcaacttatgctacctggtggatccggcaggccattacccgggccctggctgaccaggaccggatgatcagaatcccggttcacgtagtggaaagcataaacaagatgaaccggattcagcggactctgcagcaggacctggaccgggatgccaagccggaagagctggccgcggaaatgaatgaacctttgcagaaggtgcaggaaattatcacggtagccaagaaccaggaaactgactctttggacaagccggttggcgaagaaggggactcgcaattgggggaccttttggaagacaacaaggcaatcaacccggaagaatacactgcttttgaaatgctgaaggaccaactgtccagcatgatgggtgagttcctgactgacagagaagctaaggtcttgaagctgcgcttcggcctggaaaacgatgagccgcacactctggaagaagttggccgcagtctgggcgttacccgggaacgggtccggcagattgaagctaaggctgtcaagaagttgaagcaccactcagacctgctccaggactacttctcagcagaatagacagaagaaacatgtttccattttttggaagcatgtttttttgcttttgacagaaaaggggaaaagtcagataatttttcctaaagcaaaaagtaaagagaatggagaagaccgtgttagacaaaatccaagccttcgtatccctggccggcaacctgaatttttcccggacagccgatgagctgtataccagccaaagtacggtttccaagcatatcgctgccttagaaaaataggtcggcatgaagctgtttgaaagaagcagccgccgagttcgcctgacccgggagggggagtacctgctcccttatgcccagcgtctcttagcagacagccggcagtttgaccaggcagccgcggcctgccggcaagagcagaccaagaccctggacctgtacgcgatccccaccatgaccaattacgattttttcaaggccgtaaaccgcctttatgggccggcatccggagatcgacctgttttttcatgaaggcgagtcccaggacctggcccaaaagctccgccggccccaggacctgctcttcctgcgcaagtaggaaaaaaactgcatccggactttgattatctctttttcgaagatgatgaactggccctctttgttgcaagcaagtctccccctggctaaaaagcagcaggtgaaattggccgacctggctggagcccgttttttgaccttgggtgaacggacttattttgagaagaaaattgttgctgcctgccaaaaagctggttatgaacccaatttcgtctaccagggtgaacggatcgaggcaattttagaaatggtccgccagcagctgggcattgctcttttgatgaaaaaatctgtttctgatagccagctagctggtttaaagcgactggacttggcagagagctactaattagtaacaagtaatatagaactatatcgaaaaatatagcataatgttcttgcgaaagaaaacgaatctatttcaatagaatttaagtgtgttgcacctatgattttagtcaaaaaatgcaacgcattttttgattcctcttcaaacatacgtttggaaataaactggaatacgtgttaaaatatgcttgtcgaaaagaggtgaagacaaatggcaatcaaaagaactcacgtatatcgtttatatccagatgctactatggctcacgtcttggacaagtggtttgactatcgccgttattgctacaataaggctctagaactgtggaatgcgacctattcggaataccgtatgctagtcagtccagagattctggcggaattcaagaagccgaaagaagaacggcaatttactgaagagcagaagttatttatatctagatactatccaaccgcagcactgattcagaaaaagcttacagcaagcaaacagtcatgggaaaggcagatctcttctcgtatcctgcagcaagcatgtgctgacttaggcaaatcgttcaagaagtttgccaaagataaggcactcaaagttaaaagaggtgccggacgccctgtttttcaatccaagaaagccaaacgccaaggctttaagttgaatcaaggcgtggtgctcgcaagggaaggcaaccacggaaagctgaccttgcccgtcccagcaccttataagggtgagtggcataacataagattttctgaaatccccaaaaatgccgaatttgaaacaataagcttttaccgtgaacacggccattactacatggcggttccttacaagtatgagacgccaccatacattcacaagcatacgggtaagaagacagggattgacgtcaatgtcagccatttcaatgatgcagagggagaacactattttctgcacaaaggaaacaatggcgccgtcaatcttgggagagtctatgagaacatcaaacaccagcagcggatcctggcaagaaagctggaagaaaatggccagattgccgggaagcgctcaaaaagctatcaaaaagcgagaaccaagcttcagaagctttacgagcgtgctcaccgcatgcaggatgacgcgatgcactcaccttgtcagagaatatgatgcaatctgcattgaggatctggacgtcaagggcatgcttatgagccacgttgcttctaaaggcgtacaccgtgcgctgtttggacgctttcgcagctatctcgaatacaagtgcaagtcagccggagttaagctggtgattgccaaccgcttttatccaagcacccagcgctgtgcagtctgtggcaacatcaagaaaaatgacgaaaagatcaccctttctggcaataagaagcacggcaccaagcacaatgaatacgtgtgctacaacaaaaaatgcccgaactacaacaaggttgtagatcgggacatgaacgcgatgatgaattttacttttttgattgatcatccaagatacaataaagcattgtaaaaaattgaaggatccgcaaggatccatgcgggcaggctaatggccggaatgccatctgttgcttgagcagttgcgtaagtggctgtttcggtgcagccggctcaccggacgagaggccaatcagccgctttggcggcgaattggcttctgtgaccgcgcatgcaattcctcaaatggaagaacatgcgagaagcgagttcagaactcgtgagacagttcggttgctcatcttcggataaaggcattgcttgcggcttcggccgtacaggtgatgtgagcatatcgagtgcagagatcgcccacgctgtcaatgcgaaagcttggcagtgaacgctcgtgagagaaatggaagccggcagagtccaatgttatgtgctgggtatgttccagccaggcatgtcggtgctggaagtagagatatcgatgatgtgatagtcgcaaagttgcatatcttgaccataatgtgaaccagccggtatcaagcgcacattcttccacatttcttatagcacttggcaaggcaatgctcagcctggctcaaaggccaaaaggacttcaaagatccggtttacagcagccattttaagtagaaaaagaaaattagctaagcacaaaaaagcgaacaagatcatagcagatcttggtcgcttttcgcgttttcgttaagaggttaagtagcaataagaattagagaagattagtcgaggtcagtcccgttggatgcaatgactttcttgtaccagtagtaggagtcctttggggttctgctgaggtcgccgactccttggtcatttttgttgacgtagatgaaaccgtagcgcttgtccatttggccagtcccggcagaaaccaggtcgattggcccccatggcaggtagcccatcaggtcaacgccgtcgatcgcaactgccttttccatttcgctaatgtgtttcttcaggtagtcaacccggtatgggtcatgaatcttgccgtcttcgaccttgtcgtaggcccccaagccgttttcaacgatgaagaggggcaggtggtagcggtcagtcaagtggttcaaagccaggcggaggccaaccgggtcaatttcccagccccagtcgcttctttccaaagtcgggttaaccgcaaccgccttttccaggtcgctcagttcatcagctgagaccttttcgctggagacagtagttgactggtagtaagagaaggccacgtagtcaacggtcccttctttaaggacgactttgtcttcgtcagtgatgtctggccggtagccgtgcttttcaatataggcttcaattgccttcgggtattcgccgaagacttggacgtctgagaagaagtcccggtgctgttcgaacttgtcagccaagagggtgtcttctgagcttggcgtcagcgggcggactggtgagtagttgatcatcaggccgatcttgaagtcagggttgatcttgtggccgatcttgactgccagggcgctggccacgaattcatagtgggcagcctggtacatggcggcttctttttcttcatcagtcatgccttctttaaagaggataccagagttggtagccatcaagaagtcgttgttgaaggcactttggttgtcgatttcgttgaaggtcatccagtacttgaccttgtccttgtagcgtttgaagcagacttcagcgaagcggacgaagaagtcgatggtcttgcggttggtgaagccgccgtagttcttggccaggttgaatggcatttcaaagtggctcaaggtgatgacaggttcaatgccgtacttgtgcatttcgtcaaaaaggtcatcgtagaacttcaagcctgcttcactaggttcagcgtcgtcaccattagggaagattctggtccaggcaatggaggttctgaaagccttgaagcccatcccggccaagagtttgatgtcttctttatagtggtggtagaaatcgatggctgagtggttcgggtagttcttccccggcaatacgccgtcggtgatttcccgcggcttagtggctgaaccgacggtcatgacgtcagcaacggacacgcccttgccgcctacgtcccaggcaccttcaagttggtgggcagcaaccgcgccgccccataaaaatccttctggcatttttgcagaatacattgagcaaaacctccattttcatttgtgtatgttttcaacagttttcatcactcgacgattcattttcatattttcatcacttgcaagtaaccgttttcaagaatgattatagttggaatttataggcattgcaagagtgaaagggcagataattggtattttttagaaaaaagcatagaactgaaacttgtggaaataagaaaataagcttagcacagtaataataaggaacaagaagaagcaaagcaaaacgctaacgcttaattagtaatacattagcaaaaaagccgccagctggcggctttttttagtgctttataatattacaacaagtatagaaaaacctctttctcaaatttttccttgtgctacaatctaggaaacgtttgaagaaaacgaggtaattgaaatggaaaacaaaatgttggtagtaacgacggaaaatatcccaggccgcaagtatgaagtaatcggtgaagtctttggggtaaccacccagtcaaagaacttcgcgtcagtctttggggctggtcttaagagcatgattggcggggaaatcaaggccttcactaagatgctgacgacttcaagagaagtcgccctggaccgtttgcgtgaagaagcaggcaaacttgacgcggacgccgtagtcatgatgcgctttgactccggctcaatcgccggcgacatgcagtcagtcgtagcttacgggaccgccgttaagttcgtcgactagcaaaatgctaacaagaaaacgctgggttaattcccagcgtttttaatttgtctccagctttttggacttagtccttcgtggcgtttgaaggccttagaaaaggtaaaagagtcattatagccaacaaaatgggagatggcttgcacatttagatcgctgttagacagtaattctttagctcgttccatgcgtaatttggtcagaaactgctgaggcgagagatcggtcttgttcttaaagaggttatagacatagctgcgggacaagcctagatgttggcaaagctcgctgaccgagcaagctggatctccgaaattgtctcccagaaaggtcatggccgcgataaagtagtcatcagccagaccgctttgctgccgtttgccagtcggatagtcaactagcagctggtaaaaggtctggtagagcagggattccgtcagcatgttgctggccagggactcacgcatgtgcagggagtgaaaaagctggcacaggctcttgtaaaagccggaatcctggacctggcgcaggtagaacttgtctgccagcttggaattctgcaggatcttgccaatttgcatgccggacatgccaacccagaaatagctccacggatcgtcaaagtcagcctggtaaaagcaggccacccccttgggcagaataaagaggtcgcccgcctgcaggctgactggggcttgtcccgccggggcaaaggtcccccggccgcttagaatatagtgaatgacgtagttggagcggacattgttgccccgatagaagtagcctggcgtgcagctttcctgcccgtagaaaaggatgttggagtcaatattttgctttttcagctgccggtattcgacggtcattgatgttcacgctttcattttaacaacagttttttgccatctgaaccatggccaaaagtttttagcctcaaggatatagtcctattatatcagcatttatccaaatcatcatgtcaaaatgtccatcaactaaagcgacatcaaaacaaactgacttgctatatgaatccactttcaaaaagcccataatagtaatcgttaagaaatatgtaagcgaacacagatatagcttacagttggagtggaaggagataacgatgaacgaagattccaacaaaaaattaaccgtccgggagcggttagcttatagtttcggggctttagggaatgatgccttttacggtttgatgtccggttggctggtggtatttattacctcacacttgtttaatacaggtgataaagcaactgacgccaaaatggtcagcattgtcaccattttgatggcagttatcagaattattgaattgtttatcgacccctttatcgggaatgcgattgacaagactaagaccaagtggggtcacttccgtccatggattgtggctggtggttcagtttcagccattttcttgctgatcctgttttctacgatgggggacttgtacaagaagagtcctgtcggctatattattgtttttgcaattctgtacatcgtgatgcagctgttctacgcttttaaggacacgggtttctggtcaatgatgccatccttgaccttggattcacgggaccgggaaaagacggctacctgggccagagttggctcaaccttaggcggtggcttgctggggattctggtgatgcctgcggtcattgccttctcagcaactaagaccaccaacggggacacccgtggctggttcatctttgccgcgattgtctgcaccatcgccttcctgtctgcttgggcagttggcctgaacaaccgggaagtaaccagcgacatccggaagaacacggaagataccagcttaaagggcgtcttcaagatcctgtccggaaatgaccaattgttatcggtcgcaattgcctacctttgctacggcattgccgttaacgtaactggcagtctggaaatttactactttacttatatttctggtcaggcgcaggccttctccattatggcaactatcaacgtcattatgggggttattgcttcagcagtttttgcaccgatttctaagaaatacagccgcaaggcgatgtttgtcactgctttgtgcctaatgctcgttggtctgggcatcttcgccatcgccggcaagagcgtgccactggcaattctggcctgcgtagtcttcggtatgccacagcagctggtcttcctggtcgttttaatgacgatcaccgactcagttgaatacgggcaattgaagctgggtcaccgcgatgaaagtctgaccctgtcagttcgtccactgatcgacaagtttggcggcgccatctccaacggggtcgttggccaagttgccgttatcgccgggatgacgaccggtgctactgccgcctcaattaccgcggcagaccaagtcaagttcaagattgccatgctgcttctgccagccatcttcctgatcttgagcatgatcatcttcaccaagaaagtaatcctgactgaccaaaagcacacggaaatcgttgctgaactggaagccacttggggtcagcagtttgaaaacgaagattccgaaaccgaagtcgcggaagttaagggcaacggtacggttttgaccacgcctgtttccggtgagctgatgcagttaaaggacagcagcgatccaaactttgccagcggcaagatgggcaagggttttgccatcaagccaaatgacggccgcgtctacgcgccgtttgacggtgaagttgccgcagcctttgccacccgccacgcgatcggcttgaagagcaaggatggcttgacagtgctgattcacatcgggattgacacggccaagctgaacgggaccggcttcgtccaatacgtcgtgcaaggacaagaagtcaagaagggccaagaattgattgaattctgggacccaaccatcaagcaacacggcttggacgacacggttctggttaccgtcgtgaattcaaaggactaccagaagctggcagtgattgagaagttcggcaagacggttgccgccggcgatccaattatggaaatcgaataaagcatccttttgcaaaaaaagataagttcgacaagacgagaaataggaaagcataaacaatttaggagataaaaatgtctgagttgatcgaatttgatgaaaagcagcaggtcttccacctgcacaaccaggaaatttcttacatcttctctgtcgttaaaggcggcaccttgagccacttgtactttggcaagcgggtcagaggctaccacggggaattagcctacccagccattgaccgcggcttctctggcaacctgccaggcgacttggaccggactttttcccgggacaccttgcctaaggaatacagcggggctggggaaatggactaccactcaccagcaaccattgtccgtcaagccaacgggtcaaacgcggttttcctgcactacgccggctatgagatcgcgccaggcaagccaaaattgctaggcctgccagctgcctacgttgagaatgatgatgaagcagaaaccttgacggtcaagctggctgacgacttgactggccttgaatacgacttgctctatacgatttaccgtgaccgcgatgtgatcgcccgcagcgtccagatcgtcaacaagggtaaggaaagcgtccacctggaaaaggctgcttccatgcagatggacctggttggccgggacttggaagccatcaccttgcctggggcccacgtcaatgagcgccacccgcaaagaagccgcttgattcaaggccgccacgtctttgaatcccgccgcggcacttccagccaccagatgaacccattcgtcgctttggttgacccgaagacggatgagttcagcggggatgcctggggcttggccttggtctactcaggcaaccatgaatttgaactggaaaaggaccagctggaccaactgcacgtcacggttgggatcaacgagtacaacttctcttggaaactgaccccaggcgccagcttccaaactccagaagtcttgctggtctactcaaacgccggcttaaacgggatgagccagacctaccacagcttgattttggaccgggtaatccgcagcaaattcaagcggtctccgcggccaatcctggtcaacaactgggaagcaacctactttgacttcaatgaagacaagctgaagccaatcgttgatgaagctaaaaagttgggcattgaaatgttcgttctggacgatggctggtttggccaccgcgatgacgacaacagctccctgggcgactggcaggtctacgagaagaagttcccgcaaggcttgaagcactttgctgactatgtccatgaacagggcttgaagttcggcctgtggtttgagccggaaatgatctcctttgactccgacctttaccgggctcaccctgactacttgatgcaggtgccaggcagaaagccaagtccatctcggaaccaatatatactggatttgggccggaaggaagtccgtgacaatatctttgctcagatgaccaagattcttgatgatggtggtgtcgactatattaaatgggatatgaaccgtcacctgtctgacatctacgaaaatgatttgcctgctgaccaacaaggagaagtttaccaccgttatgttttgggcctgtacgacctatctgaacgtttggtcgaccgttatccggacatcttgctggaaggctgctcagggggcggtggccgctttgacatcggcatggcctactactgcccgcaaatctgggccagcgacaacagcgacgcgattgcccgcctggtcatccaatacggcaccagcctggtctacccgcagtcaatgatgacctcccacgtttccgtttcgccaaacgagcaaaacgggcggatcacgccatttgacaccagaggtgccgtagccatgtgcggggacttgggctatgaattggacttgaccaagatgtctgatgaggacaaggcagcggttaagcagcaagtggctgactacaagcagatccgcgggctgtcccaatatgggaagttctacactttgaaagctccgcttgatagtaatcaagctgcttggatgacggtcagtgatgaccagaatgaagccgtggttacgacggttaacatcatgtcctacgcccagccatacctgaccaagaccaagctggccgggctggacccagacaagaactatgaagatctggccaccggcaaagtctacggcggggatgagctgatgaatttgggcttctatgacccaacccagcctcataaagactttactgctaagatgtatcacttcaaagcaattgctgattagcagtaaccaacatcctataatatttcccaaaaactttcgtacaagcagaagcagtttccttcgggaagctgttttttgcgtggaaaaggtcaaaaatagagaacttgagctaaatagtagatagatcgataaaataaatagcgaattatgatggaaaagtcagaatcctgttgtcaaaataatcttttaggataataatggcttgtatagaataaaagacttatggatatgggatgtgttgcgcgaaatgaagaagagatggtggataaggccttttgtgctcctgtttgttttcctgagcggctctttggccatcgcgtttattgtcaagcgtgactggcagaacctcaacgagcgtcatcaggcacagactgaactgaatactcagctgtccagcgactacttcaaaaaggagctggcggaagcgcagaatgttacggaaagcatagaatccggcactgttggcaacagcggtgactcggccaaatttgctaaaacggccaagtacatggtgaaaaagtatccggacatttactctttacagctgattcatggctatcagagcattgacgtttatcataaaaaggcgactagagtgggcaaatccagtctgctgggggaggccagggtcaagaaagcttttgaatactgccggaaggagcggatcaacggaatcgttggccctctatgccgtgaaaatgaccgggaagggatcgatggcaggctatcacccggatatggtcaaggaaggacgggcgcaactgggctttaatctgcgcgacttagcagtcaacctgcctggtgccttcttcatctaccgggctgatgacgggaagatcctttttgccaacagggaactgctgcggattacggaatgctatagcatggaagtgtttatcgaatttatcggccggaaagtcaagggcttgatcgctccggaagactatgctgaagctgtagtagagagctgtgaccagcaggtgggggacagcgatgatgcagtggctcatatggactaccatgtcatcaccaaagagacccacaagcggatctacgtgcatgccgtggcccatatggccaaaaatccctactttggtgagatctattatgttattctcagccccaagccagagcaaaaataacaaacgaaacgaaaacgcgtccttttacaagggcgcgtttatttattgtagctactgctttaagtgctttctgaagaagttcagctcgtccaggttgcactgcttggcgatgtcgtctctttgattacagtggaagacgtggccgcgcgggttctccatatccccgtagatgtggagttcatgcgggatctccttggccaaaaggtagccgtccaagcggacagcagaatcgtgcaggaagtcctggttagccgtcatgataaagagcggtggcaagttttgcgtcagatacttttctgtgttcagcatctcttccttgccgctgactgcttctggggtaaagtaggcgcctggcgcgccatcagtaaagcccggggtgagcatgaagtagcccccgcagttaagcgcggctgctctgactgttagttttggcagttcgtagccaaaaagctggcggaacttgtcattggttaagatggccaggtactgttcttccatctgcccgccggctgagtcgccaactaagaagacattgcccgtgtccaggtcatattcagctccgtgttcagccacccagtgcatcaagcggttgacatcatccatttcgcctgggaactgaacgtctggagccaggcggtagttgaagttgacaaaggcgaagccttctttagccaggcccagcccgtagaactggtaggtttccttagtcccgtaaacccagccgccgccgtgaatgctgatgatgaccgggaccttgccggtccgcttcttaggcaagtaaatgtccagcaagttccactttgggtctggcccgtagcttaagtcattgattctttcgacttctggaatttcggttggcaagccttcatcgcgcttgtcgtcgtgcatcttggatccagtccgcatctcttcaacagcttgtaaaattttgccatcaagtgtcatgtttctctcctttcgcatgtaagcgttaaccaaattatagccgatatggtcaattttggcagaaaaataagttttattacaaaaaatccagattaagcgttaaattgaatttaatcctttaactttgctataatgaagtcacctaaatataagatgcaggaggaaaaggaacaatggaagcagttaaagcagaagatttgtatcaagtcgtcagcctgggcaacttgcaagcaaacggccaaagggcagtactggccagaaaccaggccaaagccgatggagaaggctactggaactggctggacgtctttgaaaatggtgagcttaagcgcttaacgactttggggcaggaaaagagctatgccttggtaaataatagtgtctactacaccgctcaagagggcaaaggcagcagcttgctctacaagcaggaacttgaccaggccagtccggcaaaagtcgctgcttttaaagaagccggctaccaggtgattaattccgttgccagccgctatctccttttgtccagacgagtggatttagctgagaaaaagtccaccgattaccaggtcctggatgaactaccatactacttcaacggccagggctacatcaacaagctccgcgaccgcctttatgtctgggacttggcagaagaaaagctgactgaactttttaaagacgatccgaacttcacggtcatggaaacctttgtagccaaggagaaagtctatgtggtgggcgtcagctaccagacccggcggccatttgacggggcagtctatgaagttgacccaagtacgggagaagctaagctccttttagcggcaggtaaggccgaagtctctgcaatttttgccttgaagggacaagtctactgcttcgctaacactcataaaaagaccggcttaaacgaaaatcccgaattctaccgcttgactgaaaagggcctggaattggcagctaacttcgacaattccggccagagcgcgattgccggggactgcggggtgattggcggcaatgcttttgacgcctatggcgacaagttctacttcgtgaccaccatcgttgaccacgatgaaatctacgtttttgacggtcaggaagtcaagccgttttttgccacggacggcatcatcaggggcttccgtttgactggggaaggggaatttttcctggaagcagcctttgccaatgaacttttggaattctacctggttaaacatgaccaggtggaaaaattgtccagctataacagccaggctttagcgggcaaatacgtagctaaagtcaatgaagtcgaatatgaatcaattgaagacgggatccagcacggctgggtgcttttgccaaaggattaccaggcgggcaaaaaatacccggcgatcctggacgttcacggcggtccccgcgctacctacagcaaggccttcttccatgaaatgcaggtttgggccggagccggctactttgtcttcttctgcaacatccacgggtcaaacgggcaggggaaccagtacggggacctgcggggccggtatggaacggttgactacgaggacttaatgaagtttaccgacgcagttttagcggcgtatccagacatcgaccagacccgtttaggcatcaccgggggttcatatggcggctttatgaccaactgggtgatcggccatactgaccgctttaaggcggcagcttcccagcggtccatctccaactggctcagctttgagcatatgtcagatattgccccagaattttgcgttgaccaggtggggaccagtgaagatgataatccggaaaaggtttggctgcactcaccgctcaagtacgtgaaaaatgtgaagacaccgactctgtttttgaattcagatgaggattac

SEQ ID NO: 2171 - DNA, 17695 bp, Unknown
  gut microbiota DNA sequence
aacgtgccaagccgtacttgtccttgatgaagccagttttaattttgttaagtacgtactgaatgggcttttggctaaatggcatagggcgtccgatatgcttagcgccataagttttaaagagatactttaatgcgtactgaaataaagcgttctgagttttcaacgccttctcatgctgaattttttgcttatcagtcagcagtacgtgatactgtctggtaaagccatacttttcttcattaggcacagatacacaccttcttttttgcctctttatgctataattataacactaagaaaggtggtatgagcaatgattgttcatgaaagaggctgcgtttataatttcaatttccatctggttttcgtgaccaagtatcggaaaaaagtctttgacagcccagaaaaggttgaagaaatgaaagagctgctccaaaaaagagcggatatgtcagaaatcgagatccagcaaatggaagtcatgcatgatcacgttcatatgctcatctcgttttcgccaaagcagaggcctgtagacatagttaaggggctgaagggctggacagctcggaaatggtttgagctgtacccggaaactaagcagatactatggggtggccatctctggtcgccaagctattttatgagcaccttgggtgatatgagcaaagaagtcgtgaaaaactacattgcttcgcagtacacggcagccatgaaaaaacaacagaatggcaaatatggcgaactggaaagaaaaaaaagaagaaacggaaactaaaaaagcgcccctttggggcgcttttgcgtgcttgactcatgtctaaagacacgagtttgtgcacgctttttaatcaaaaagatgccccgcgcaaggaggcatccctattgattattcagcgtctggccaaacttccttagccgtgtcgatgaccagcttgatcttggcccattgttcttcgtcagtcaagtggttgccttcttcagttgaggcaaagccgcattgagtgctgagagcggtagtagccaatgggtggtactggccggcttccttgatccgggccttcaaagcttctgggtcttccaattccggcttcttgctggttaccaggcccaaaacaactaccttgtcggctggcacttcagctaaaggagcgaagtcgcctgaccggtcgtcgtcaaattccaggtagaaggcctccacccctttttccttgaagacgtaaggagcagctgagccgtagccgccttctgaagcccaagttgagtcgtagttgccccggcagatgtgggtcgtgatccgcaagtcttctggcaggttaaccaaggcattttcattgatttccttgtaaagctgcaggatttcttcgcgcttgaggtggccttcgtcaaaagcatgccagaagctgtcgttgaccaagacgccccaagtacagtcgtccagcttgatgtcgcgggcaccgtgcttgtacaagtccaagatcaattcccggtagaccttggaaacgtccttggccagttctgcccggtcagggtaaacggcatcagtagccgcgatcaattcatcgttgcggcaaatcagttcacagtagagctgagctggggctgggatactctgccgggcttcaacgccagctgcatccgccaaaggcttgaggaagtcgaaagctgccacgtccgggtggccggcttcataagtcaatttgccaaccaacttggccgcgtctggacgggtttcttcatcatgaaagaagtagccatgatcagcccgtacatgttctaccccgccaaagccccagaaagtatccaagtgccaatagctgcggcggaattccccatcagaaactacctttaagccggcagcgacttctttttgcaccaggtccttgatttcctgatcttctacggccgtaagctcggcctgactgatttctccgcgggcaaatttttcccgggcttcctttaatgctgctggacgcaagaaactgccgacaatatcgtaacgtggaaatgacatctgaattacctccgaagtttttaaatcgtatttttaatttgctcttaatgcttgttattatagccagatctcgttatgattgaaaatagctatttttatcgtgtatcgatagatttaaactatggaggttcaaccatgcgcatccagcaactgctctatctgcaaaaagtcgtcgccctcggcaacatgaccgaggcagccaaagaacttttcatcgcccagcccaccctgtccagcgccatcaagcagctggaaaaagaaatggggatcaccatcctgatccggggcaaaaaaggggttagcttaaccgaagatggccgggagttcatgcaatacgcccagcagatcctggaccaggtccagttgcttgagcgccgctatggcgaccagtccagcgcgccgaagattttttccgtggcggcccagcactatgctttcgccgttgacgccttcgtccagctgttaaaagaaatcggccagagcgactaccaagccagcctcaaagagatgcggacctatgaagtcatcgaagacgtggccaacctccacagcgagatcggcattgtctacctcagccgctacaaccgccaggtcatggaaaatagcttccaggaaaaggaactcagctttacgcccctctttaaggcccacccccacgtctttttatacagaaaccatcccctagccggcaaaaaatctatctccttagcagacctcttgccctaccccaagctcagctacgaccagggccagcacaattccttctattactgggaagaaaccctggctgaccagcattccccaaaatccattattgtcagtgaccgggctaccctgtttaacctggcaatcggcttaaacggctataccatctcttcagggatcatcaacgctgacttaaacggggacgacatcatcgcccggcctttgatcagcgacgaatatattgaaatcggctacctgaccaaccgcctgcaccagctttcttccattgggcaaaaatacctgggctacttaagggaaagcattgaaaagaatgcctagcgctaacttaatttatttctaataaggatcagctgcttttttcttaaaaaccccgtctccgcttaattttaataactttgcggcctatacaaggtttgccaaacggctattttgtagtaaaattaaaagatataaacgggcttagcgcttagctttgaaccagataaattttaacttagcattaatcaagcattttttcagctcggaagaaatgcctatactggaggtttagacaactatgggttggatacttttattattggtcatcatcatctgcgtcggtacttacatcaactcccgcaatgaaaagaagaagcaatcccagctgtgggcacagcgtcaaaaggacagcaatgttccgccaatgccgatcaccattctggagaccgttgatggcgcaagcaagctggttgtcaagaacgactcaagcgtctactttacccaatatgaaaagggcaaggctccttggccaggtggcgttgaaaacttcagcgtatactacgacaaggatactaagcacttgttgattttgtcattggtacaagaaaacgacaacatcgactttggtgaagttgaccctgaagcaaccgaaaagttcctggctgtcttccaaagcgttggcggtcacctggctcagcactacgaattgctgaccttgaacgaggttgactctagcgacctcaacctggcagtcaagtccttcccggccaaggtttacttctacactgaaaagtcagtaactgacggcaagaagcgcctgtacttctcaccagacccgacttcaactgcctacaagcttttgggcgtggcagtcagcgatggcagcaatggtgaaaagagcatcgaacttagcctggaaaccttcaagggcgttaagtattcaatctacaccaccctgtcagaagccggcgtgaaggacctgcaggaaaacttcgcttaattaaagcagaatattatcaaccggtctccaacttatttggagaccgcttttttacgcatatcagattaaaggaaaattagatgactgaaatttttgaaaacagccaattgcaatttgcacaagtccttacccaagtagcgtcttacgccaagtcccccgaagccagaaacttgcttctgcaggcccagccattgaccaaaccggcagctgttacccacttgctcgatgaaacagaagaaggtacgcggctcttagagcggagcttgcagctgccgtttgtttcttcagattcccttttgccattgatcaatcgcgctcagaaggggctccttctatcagcagatgatttggaaaaagttgctgattatctccgggtctgtgaattgctgcaacgctttttgtacagagaaaaagatctggttccaatccttaattcctatggtgaagaactccagctttttccaaaactggttgaacagatttatcagtcaatagaacatggtcaagttgccgacagcgctgaccgcgacttaaggcggctgcggcggcaagaacaggaactaagccaggaaataaaagatacggctggtaagctgctgcaaagcaagaatgtcagccaaagcttgcaagaacagcgactggtagaaaaagatggtcacttgactctgcccgtcaaaagcagctttaaaaaggcaatcgctggacgaatcatcgcttattcagccaatggacagacggccttcattcttccgcgcaagctggaccagctgagcagcgaagagattgctgtcaagggacaaattgaagctattgaagcgatgatcctcgggcagctgaccgctaccgtctatgaagaaagccacggcctattacgtaacattgatgtcgtcgcggcaattgatcaaattatggcccgggcgcgatatagccgggagctgaatagcaagcgggccagattaaatcagacaaatcagctgcttttacgggggatgcggcatcccctgcttaaaaatcccgttccacttgacctggaaatcaagccaccagttcgcggcttgattattactggaccaaatgccggtggcaaaaccgccactttaaaaaactgcggcctggctatcatgatgacagagattgggctttttctgcccagccgggaaatctgtgatatccctgtcagccagcagattttcagccaaattggtgaccaacaggacctagataactccctgtcgaccttctcagcagaaatgaccaatattgccaaaattgtcactcacgctcaaagccgcagtctagttttgctcgatgaactgggtagtggcactgaccccgatgaaggagctgctattgctatttccgtcttgcaagccctgcaacttaaggggtgcttagttttagccacgacccactacagcagaattaaagattatgctgttaagcatccaaattaccggaccgcgtcaatggacttcaatgccgacaccctcaccccaacctaccgtctgctcttagaccaagtcggtcagagccgggctttttggattgctcaaaaagtagggatgccaaaagaaattatcgaccaggcgcaaaaagttttagccggtcaattgccactcagcagcagtacagtcgttttgaaagaaaaagctactagcaaaatagtcaaaacacatttttgcaaaggagacgtggtctacgcgggcaatctggaaagagagggtattttctacgccttagaagcaaaccaaaccttggcaaaaattttcgtcaacaaacaattttctgtcgttcccgttaaacggttaaaattacggcgaaaagctgccgacctttatccagagggctataacctggacctgctctttataagtgactggcaagaatataaatttaacaaggacttgaaccgcgggagcaaaaaagcttataagaaattagtaaagtatgagcaagaagcaaaaagtaaaaagcaataccagtaaaaatagttaatgttttctgcttataccggttgtttgcggctttatattaaattaagattataaaagtcacacaacaaagatgttatttacaagcccaagatcctttaggggaaaaagactacacgatttttgcccatgactttacgtaaactaatcaacagcaaccggggccgcttcgccattatctttgccctgctggtcatgacccaggtcatcgacgttgcttcaacttacctgttctcgccaatggtcaaccaagtttccgccggccgttttaacattttttgcagcctgcttctgattcagtttgccctggccttagtcctaaactttgctttcaacggggccaactacctcttcagcaagcagacccagcagtatctgcacggcgtcagagacagactggctgaccactattaccaagagcctgccggcctctccgagatgaccaaccattttagccaagaccttgacactttgacttacgattacgcgactgttctcttttacttgatctgtgacgttatcaacgcgcttatggttgccgccagcctcttgtcttttcactggctcctgctcctggccagcctcttaactaccgtgacttccttcgcgattgcccgcttactggaaaaatacagcaaccaggccaccgatcaattgtctgccgctagtcagcactttttagcgactatcgcccaatggactgccggcctggcagaacttcgccgctactttgccaaaggcccttatcaaaaagccctgcttaagtccggccaagagctggccgaccggcaagtcagccgccgcaagatcaacagccagatccagtgcctgcaaagccttagcaacgccttaggcacagtcagcatccccctcatcgccggcttcctcttctttaaaggacaaatgtccttaggtggcgttatcacgtctggttatttcgccagcagtattttttccgtcctggaaaacatcgccggcagctattcttatctaaattcgaccaaaagcctgcgccagcagcttagccgcctgcaggaaagcaagaaaaatgacaatctgcagccggtcaaccggatggcccaaatcgagatcaaacaagtctccctgacccacggcaagcagcttttgtcctaccccgatttgaccatccatgctggtgaaaaaatccttatcactggcgacagcggcagcggtaaaagcacccttttaaaactgcttttaggcaatttacaatctgaaaaaggccagatcatctttaaagacgctgctggccaggccttccagccggattcttactcaatcggctacctggctcaggacctggtcctgttccccgcgactttagcggaaaacgtgaccatgcatacccctggcctaagtgctaatccaaaagattacctggaaacagtcggcctccagcttgatccccagcgccagattactccagacgatttgaccctgtccggcggtcaaaagcaaaaactggctcttgcccggactttaagccatggctttcccctgcttttgctggatgagtcactgagcgcggttgaccgggccggccaggatcagatcttgcggaccctttgccaattgccagcaaccgtcattttcgttgcccacaatttaagccctgaacaaaaagcccgctttgaccgggaaatcagcttagctaagagggagcatgtatgacttttaaagaattttacctccgcaagccagtcaaaagcagcctgctcttcctggccgcggctttaagttccttgctgctggtcgggtcttcttacgccttaactttggaattcaatgctttaagaaaccggcagcccgtgctttttgcccaaatgctggccttgcagctggcctgcctggtcttcagtgccctgctcacctactatggcaacctgtctctggaacagctgatccaaagctacctgcagcagatccggcaagagcttgccctgcatatattcaatgatggccaagcacacgatccagcccaggcgcaaaaccagctgcttaaggaaggggacttgctgactgtcagctacctgcgcaatatttacagcagctttaaggccggcatgactgtcctggcttctggcggtgccctgctcagttttcactggagcctcttcatcgcctgcctcatctttgccttggtgcagatctcccttccccgcctgcttgaccgccagctcaaccacgccaatcaaagactggccacgcagaaccaggcctatctcaaggttcttggcgactggctgctcggccttggcgacttgcaccgctgcctgtccttggcctggtttaaggaaaaagccggcctggccgccaaagaactggaagatgcccatgtgcacaaaagcgccgtctctgctcgcttggattacctcaatcagctggcatattctcttggcagcagcctgatcctgctcttgactgcctttctggtcatccagcactggacggcttttggcctgctcagcagcatcgcttcttttaacagtgacttttttggcaatctgcaaaacgcggctgactacttaggcgaaatttccggcagccgccagctgcggcaagacctgcttaagcaaagagaagctgtcccggagaaaaaagagaccggccaagcgccagcggcttttgccagcagtcctttaaccgttgaatttaacggcctcagcctggcctacccggccatcaagctgcagcccggagaaaaagttctgctgaccggcgccagcggccgggggaaaagtacttttttcaagctgctcttgggtgaagtcaaggcagccagtggagaaattcactatctggaccagaagggacaggtcattcagcccaacttgagtcaaatcggctatctcccccaagatccccagcttttccccggcagcgttgctgaaaacatgaccatgttcaatccggctttaaacgatcaagacttgctccgccaaacagcagaccaggtgaacttaagtgaggacctgcgcctgtggccggctgggcttgatacaagagttgccgtagaagacagcaatatctctggcggtcagcggcaaaaaatcgttctggcccgcagctatctttaccacagccagctgcttttgatcgatgaaggaaccagtgccattgaccaggccgccacgcgggagattattgcccgcttgctcaagacggataaaacgatcatgtttgtcgcccataatctgaccgcggatagccgccagctttttgaccgcgaaattcaacttgattaaactataaaggttcacgcaagtgagccttttttattcctcctattgcacattgccactagtttgtgatagtatattaactataaaatcgttttctttatttcggctgtacgaaataaaaaacgttgcttctctatatgataaaagaatgataaggatactagcatgactaatgaaaccaaacttttgcaagccgttcagcaattggcagacaaggacgtagcgccttttgacctgcagatcgaccgccaggccaagctgccaaacggccttttccagaagatcgttgacctgggccttttgcgggcaaaaattcctaaggaatatggcggactggacgtttccgctcaaaccgccggcaagatcgtcaacatcctggccaaggccaacgccagtgtcggcgtaatgctggaaggccactacaagagctgtgaccagctggccaagtacggcactgacgccgctaagaagcgctactttgcctggggcgcccaagccatcctcggcttctccaacactgaaccagaaggcggctcagacccaagcaagcaccagtcctacgctgttgaaaaggacggccgctggatcatcaacggcgacaaggtcatgattaccaacgggaccctggctcaagtttactcagtcaacgtgaagactggtcctgacgaatactctgtctttatcgtggacaaggggatgccaggcttctccttcggctatgttgaaaagttcatcggcctgcggggaattccttgcggtgaagttgtcatgaatcagatcgaagttggtccggaaaacatgctgggcaagcgggggcaaggtttggaaattgccaacaacgcccacgatgatgcccgctatttgatgggggccgttttgaccgggatccaggaacacgcccttgatattgccaaaaactatgcggctaagcgcaagtcaggcaataccctgctcaaggacatgcaagttacccaatacaagatcagcaagattgcaaccaacaaggaactgacccgtttggtttacgaggaagctgcccgccgcaaggatgccggcctgccatacatggaacaatcagctatggctaagtgcttcggcagcaaggcagcggttgaatcctgcgacttgaccctgcagatcatgggcggctacggctacagcgctgaatttgctccagaacacctggtgagagatgccagagccatggaaatcgctgaaggcacgattgaaaagatgtacacggaaatcagcaacgctgaaatggctaatgtaccaagccaggaagtggcaagaaagcaggctgacttgactgaccttgaccaaatcctgccgcttttggaagcagccaagactccatccggcgcggttgacgcggtaagcagcccatcacaagcagccggcctgccaaaggccaagatcgttctggctctgggccgtggtgccaaccagccggaaactatcgctctggccaagcaagtagctgaaaagctgggtgctgaaatcggggttaccagaccaatggtcggctcagacttcaaccgtggccagcagctcggcgtcaacggccacaagatcaagccgcaagttttgatcaacctgggtattgccggcgcgccgcaatacacctttactgttgaccatgctgaaaacatcatctccgtcaacaccaacccgaacgctatcgtcttcgaaggttcagactaccgctacgtcggcagcacttacgacttcttgaaggaactgctcaaccgtttgggctaaaaattaataaccgccagccgctggtatttaaccgcggctggcggttttttctttacttcatcttcttcgtgattgcctactattttgccaagttcctagtaatcgaactgacccccttaatcctcaagatcaagcgcgaggacgaagccaagcagaaccgcggccaggacgattagccggcttggatattttccacttgtatgcgattagaaacagaactataattccaggtattaatactgtatttgttgttttctaggaaagtaaatttttgaggcattatcatgactcgtttgttaatcagctatttttcagctgggttaatgatcggctttgttttgaccgcgccctttgcgccgaggatgcaaaagattaccgacttcttccgttaccggattggctattggaacatgctgattcctatcggaattatcatagttaccaacgcggcggcctatagcatgctgaacatcgccggactggccctcttaggtccttttaacttgatcttcattggcgcgacgattgccgactatctgcgggaccggaaatttaattccagcaagcaaaagcaggacgattagccggcttggataatttttaccgcaaatggttgacaagtggctatcgttattatattatgattaaaaaatgaaaacacgttgacaaggaaaagataagtagctggtcaaatcttctttcagagaggcgcggtggctgaaaagcgctgaagaggccccggcgaacatggtctttgagtcatacgggaggcgagctccggcaagcttcccgcgggaggcgcccgataccgcgcccgagtataactccgcccaggcggagcgtacttaaaggcggcctcttttggccgtgaagatgggtggtaacacgctaatacgtccctgagcgaaagcattttcgttcagggactttttttgtcacgttttttcaagtaatttagttaagcagtatttttagaaataaggagattatcatcatggctaaagtagaaagttttgaattggaccacactaaagttaaggcaccttacgtccgcctaatcaccgttgaagaaggccctaagggcgacaagatctccaacttcgacctccgcctggtgcagcctaacgaaaacgccatcccaactggcggtctgcacaccattgaacacctcctggccagcctcctgcgcgaccgtttagacggcgtcatcgactgctccccattcggctgccggactggtttccacttgattacctggggtgaacacagcaccactgaagtagccaaggccctgcgcgactccctcaaggccatcagagacgacatcacttgggaagacgtgcctggtaccaccatcgaaagctgcggcaactaccgcgaccactccctcttcagcgcccaggaatggtgcaacgacatcttgaagaagggcatcagcgacgacccatttgaccgccacgtggttgaagactagtttttttaaacttttaggagcaaaaatcatgagaagaaagaaaaagcagcaacggctcatcgccgccgccatcgccctcgtcgtcatcattgccgccttcttcgccctgcgcctgacttcttcccggcaaacggccaagagccagacgactaccgtcactgtcggctctatcggccccgatgtccaagtctggcagcacatcgccaagagcagccaggccaaaaagctgggccttaagatcaaggtgaaggcttttaccgacgggccaagcctcctgcgggcaacctccgatggcagtatcaacgtcagtgccttcgcttcctgggcctacctggaagcctacaataagtccaagagcaacaccggccagcaagtagccctggccacgacctacctggaaccaatggggatctactcatccaagtacaagaagctctccgacctgcctaaaggcgcgaccatcgccctggccaacaatgccgccaacgaagccagagggctcctgcttttgcaaagcgccggcctgatcaagctgaagaagaactttgacgcagccagcggcaacaccaacgacattgtttccaaccccaagaagttcaagttcaagctgatcgatgacaccaccggcccgcggattatcaagtccgtcgacgccgtcctcatcggtaacaccatcgccctggccggcaacttgaacgtgctgaaggactctctttaccacgaaaagatcgaccagagcaccaagaacaacatcaacgtcctggccactgccaagaagaacaagaacaatgccgcttacaagaagctgggcaagctctaccataacaagcagatccaaaagtggatcgccaagaaatactccggcaccaaagtcgaagtcaacaagccggtctcctacctgaccgattaaaaaagctgagccgtttggcccagctttttgctttcctaccttattaaattaatttgcccttgcagtggtcgacctcatgctggatagtttccgccacaaagtccgtaaaggcctgctcatgctcttttaagtccatatcctggtatttgaccgtgatttcttcatagcggtcagccggccgctctccaggcaaagacaggcagccttcttctgccaggtattgaccggatcttttaacgatcttggggttgagcataactataggtaaaaagccggcgttgaccgcaataatcgccttgtttaccccaatcatgttggcggccaggccagcggcgggcggcaggccgtcaatgctttcccggtgggccagcagggtgtccagtaggtcctgggccgcttgccggtcactggccgccgctttagctgccggctggcttaaactgaggggatcgtggatgattttttgcactgtcattatcgtttcctcgattttgctttttacctaaagtttaccaggttaaagatattttggaacaaaaactatttatttgcaattgctgagcattggtgtatactaaactcacttactaattgttagtgataaaataacaagacactcattcgtggccgtaaaaatcactattgcttaaaaggggaatttaccatgggattgaatttttcagcctacaacacagacgaaataattgattttttgcaggaacaagtaaaggatgggatcgtcaaaactgataaagacagcttacaaaccgcatcctatagccaaaacctgcctggccagcacggcctggctctagccctggtcgaagcaggctcaatcgctgacgtccagggagtcatgcgggctgcccgccgcttccacctgccagttgtttcccagaaccgcttcaccagcaccgttgttggcgctgatgctgttgaccacgccatcattctttcaaccgccaagatgaacaagattctggaattgaacgctgaggatgcctatgccgtcgttcagccaggcgtcatcaacaatgaccttgaccaagccgcgagaaagcaagggctcttctacgctccagatccagcttcaaagaaaatgtcaggcatcggcggcaacgtcgcgaccaacgccggcggcttgagtggcgttcgctacggatcaacccgcgacaacgtcctgggcttgaaggtcgtcctagctgatggtcgcctccttgacctgggcggcaaaaccagcaagcaagcctttggctacgacttaactcaattgtttgtcggctcagaagggacgctgggtacgatcgtggaaattacggtcaagttgctgccgctgcctttgggcgaatccttgatgggcttggcctacttcaaggatatgcacactttggctgaagccaccaaagatctacggatgtcagggatctaccctgccatgttagaagccatggattcccacaccctgcaggcagtcagcgaattccgtgataacaaggagatggccggccgcggcgcagctttaattttccgcgtcgactccatttctgatgaaggcaaacagatcgtcaagaacattatggacaagtatcatgtgaccgacgtccagctggctactgacccagctgagcaagacaagattatcagtgtccgccaggacatgttaccagccatcttcactggtcgcagcgcagttatggaagacatggccgtgccaacttcacgcatggctgagttggttgacacgatccaggctttgagcgacaagtacccggaactggaaatcttcaccgccggacatgctggcgacggcaacctgcacccaaccgttacctggtccaaggatgccaaggaaatacctgaaagtgtcaatatcgtcttgcacgaaatgtttaccaaggccttggaactgggtggaaccatctctggcgaacatgccgtagggatgttgaagaaccagtggaacaatgttgaattgggtgaagacgttgactggatccaacaccagatcaagagcttgtttgacccaatgaacctgctcaatccaaagcgcaagattgattaagcggcagcaatcagcaaataacatagaagaaaagtggcataacattcttgtaagagaggatattatgccgctttttgcttaaaaaatccgttactataaactagctgcagtcaaaacattttcaactttgtgaaagatatttttttcacttcaaaaatcatcttgtccatattgatgtttagcgctttcatccaaattatattgttcacgtgactggtttttagtgttatctttcacctttttgtgttactattatcaatgtaagagcaagaataacggagggacaattaatgactaaaatttttgcttacgcaattcgtgaagatgaaaagccattcttaaaggaatgggaagacgctcacaaggacgtcgaagttgaatacactgacaagcttttgaccccagaaactgctgctttggcaaagggtgctgacggtgttgttgtttaccaacaacttgactacaccgctgaaactctgcaagctttggcagacaacggcatcactaagatgagcctgcgtaacgttggtgttgacaacatcgacatgactaaggctaaggaacttggcttccaaatcaccaacgttccagtttactcaccaaacgccatcgcagaacacgctgctatccaagctgcccgcatcctgcgtcaagccaaggctatggacgaaaaggttgcccgccacgacttgcgttgggcaccaactatcggccgtgaagttcgcgaccaagttgttggtgttgtaggtactggccacatcggtcaagtcttcatgcaaatcatggaaggcttcggcgctaaggttatcgcttacgacatcttccgcaacccagaattggaaaagaagggctactacgtagactcacttgatgacctgtacaagcaagctgacgttatttccctgcacgttcctgacgttccagctaacgttcacatgatcaacgacaagtcaatcgctaaaatgaagcaagacgtagttatcgttaacgtatcacgtggtccattggttgacactgacgcggttatccgtggtttggactcaggcaaggtcttcggttacgcaatggacgtttacgaaggtgaagttggcgtcttcaacgaagactgggaaggtaaggaattcccagacgcacgtttagctgacttgatcgctcgtccaaacgttctggtaactccacacactgctttctacactactcacgctgttcgcaacatggtagttaaggccttcgacaacaaccttaaattggttgaaggcaaggaagctgaaactccagttaaggttggctaatctagccgcttggaaatcccttttttaaaacttacagattttcttacaacaatctacttaaaaattacttacattactttacaaacacatacttttaaacttatccattaaaagctaaaacgaaaacccgcggggccttctcacccgcgggtttttgcttgcttatttttggagtagaatatactgaaagtaactgtaaaagaaaaagtgttggatgcttgctctcaaagtcatccaacacttttttaatttgctagcttattttttcggacgccgccgcggccgggcgggcttgctcttgacatcagccacgccctccaaaaggttggcgtagcgggccatgacgaacaggtagtctgacaggcggttcaggtacttgaggctgtcgctcttgacctccccgctttcctccgcgtacagcacgcagacccgctcgctggtccgggccagtgcccgggcatactggaggttggcgctggtctttgacccgcccggcaggatgaattccttcatttccggcaattcttccgtccaggcatcgatttgctcttccatgtaagtcacttcagccaaggtaatcgtatggtgccgcttgactaccaggtcagcctgcaattcatacatttcccgctccagcttgatcagcttttcttccaggccctggcaggccggagaaaggttggccaccgtaacccccagccaggactgcagctcatcgagagctcccagcgtctggatctgcgggtcgtatttggcgaccatcttgccggtcacctgcttggttttcccctggtcaccgactttagtgtagactttaagcattttgcttccaccctgctttctttttaaaccggtccaggcccaaaaccaatggcagataaaggataggataaaaggccaggttgccggcagcatgatacaagtcaaaggtcaggccactg

SEQ ID NO: 2172 - DNA, 9107 bp, Unknown
  gut microbiota DNA sequence
tgccagctggctcgcgctggccggctggtcgcttgtcttggccgccttcttggaaatgatggtcggcagctttgccttcttaacttcgctggcctttaagaagccattgtattgatatgaaaacctggccaatatcaagctgactaatgcccaagccagcgttttgcaaaaattccacggcgacctgaaggacttgttcgccctgtcccggaaaactgacgcggttttcagcgtgactggacccctgcagacggtcttgaccctggccagttttctcttgattctgctctacggcagccagcgcctacagctggcccgggcctacttgcgggatgcccccttgcctgatcctggatgaagccacggctaacctggaccccgagtcagaagccaaggtcagccaagctgttgaccggattgcccgggaaaagattatcatcatcatcgcccaccgtctgtcgacgatcgccaatgctgataaaatctactttttagaccaaggtcaagttcaagccgctggccggcatgaagaattgctcaagcagctgccaaagtaccgggcctatgttgaagaccagctgcgacctttggaaagcaggtgaaagtagattttacatgtccgcctaaaagggttatgcttttttatatacaaaaaaaggtgggtaaaaatcgtatggagagtgaagacagacaaacgcgcaaatccaacctgcgcttattattcgaagccctggccgtgggcctggtggcgggcatcgttgtcggcagcttccgctggctgatcgggcagaccctggccatgtggcaaaaaggctaccaggcagcgcacgctaacccagccatcttgtggctcttagccgggggcgttctggccagcgtgatcgtggccggcttcttagtcaagcagcagccccatgccggcgggtccgggattcctgaagtagagcttcagttgcagggcaagctgcaactggcctggtggccaatcttttggcggaagttcatcggcggggtcctgtcgatcgggtctggcctctttttaggccgggaaggtccgtcaatccaattgggctcaacggtcggccagggggtggcccagggcttcaaggcttcaaagagcgactcccgggtcctcctggcaaccggggcggccagtggcttgtccgcggccttcggggcacctttgggcggggccatgttcatcgttgaagaagtctttcacaacttttccccccgggtctggctgaatgccttggccggagccatcatggccaactttgtggtttccaatatctttggccagactccggtcttagcgatcgactacaagcacagtttccccatcctccagtactggcagctgctcttattggggactttcttgggcttgatcggccgcttctaccagtggggcctgctcaatttcagccatgtttatcaaaaaatccccgtcctgccgcgttggctgcacgggatcatcccggccctcatcttagtgccggtcatgtactacttcccaggctatgtcggcgggggcaacaacttgatcttgagcttgaaccaaattcacgccgtaaatgtcctggtcttgatcttcctcttgcggatcagtttttccatcgtgtcttacgattctggcctgccgggcgggatcttcctgccgatcttgaccatgggggccctcttgggggcggtttatggccagttcatggttgacctgggccttttggaccaaaaattggtcgtcaacttgatcatcttctctatggccgggcttttttcagccatcgtccgctcaccttttactgccatcatgctgatcgcggaaatggtcgggtcactgctgcacctcatgcctttagccgtggtctcagttgccgcttatgtcgtcaacgaactgctgggcggggtgccgatctatgaaagcctggctggccgtatgcagaccaaagaagacaacgactatgttggtgaagcagaccagctgactatttccatttatgaaggcagccagttggctgaccaccaggtcaaggacatcgcctggccggaccgcaccctggttagagttatccaccgggggcaaaaggatattatccctaatgggaataccaagctgttagccggtgaccttttagtcttggaaatcgatgaaaaccagcggggcctggtctatgataagatggccagactgcaagaagccaaagaataaagctgaaaatacataagaaaaaagccgcgaccgaagtcggggctttttagcttggcaaaaatgtatctatattgtttatttttgcttaaacctatacttagctattattttactgaggaaatagtttagttctccctcttcttctgcttttattccatatactctattgatagtcatatggatcaaactttgtattgcaaacagtttatctatattatttgtagaattaaagttatcaaagtaagccttgagtgctttaaaacgaggggcacttttcttttccacagatctatctgttaatggactatctgaaatattagctttgatgcgatcccaatcttctcgccatatatgcttattcttttttagaagtttattattcactaccggaatttcatcaagttgtgttgttgacgaagctgtaattatatctagtaacaacaataatgccacttgaagcttttcatctctagacatttcttctgcaagtacattttctactatctcacagctatcttgacaaaagaactcatgaattctctttagttgatttcctgccccataacgtgatgtttctgggatatacagcctaatcacaacatcacatatcacattatttctatagcattttaaaagccaaaaccacaatttttctttttgtcgctctgttgcctgaacacgtaatctaatatgagatcgctgatcaaaatattttatgaagaatgtcttccttatagataagctatttcttatcatgtcaaacgcactgcaaataaaagtatcttgatgcgttttaggaagatagatatcatattctgtccataccaaattttctgcaacaatttcatcatttgtaaacacatactgggaataagccttttcttcgcggccattatttgtagaattaactatattcaaaatgtattccgtcaaattggtactgttattgctttcgttctttgaggatatttctaagaacattggattgttctccagtgtgaatgctcctattttcttgtattctgaccatagttgacttattcctagttcgtttagggatactaagatatgctggtcaccagaaacgagcgctacttttttaggaatactatatttcttaataaagttttttatcttggacgtgaatgactttcggtcaagtccttcgccaatttcaataattggattccagttttcacacaacaataaaatatcttcaaagaaaactgcagggttatgtaccttttccttttgctctttgattatgatatctagcggaaacaagacatttctaaaatatctttcactccacaaaaacatcttttgtataataggcggatatatttttcgccaattcgccatattattcgcttcaacttttatcaactcaaaatctgactttctctttctaaaaataagaatttgtccattaattgcttgaacgtaaagttcatctagttttactacgtccctgcctgtgcctatcaaattgatcgataattctaaatcactgccatcgacaatatccgatgtcagagagaaaaaacgcggaacgtttagcaactttactgttactggtgtcacgccaagctctttaagatatttgttcttttgaataattatttctcgaaattcctttgggttaattcgagaaaatcttccttcaattgatcctatgccacgagtacctatcgttggtgataattgaagcgttccactctgactgatgttaaaacacagttggaatgttggatccaccaaactatctgtgtcggtattttcaacatccttaaaaagttctttgagtgggatgttattagtatttatatatttctgataattagatcgtatttttctactaatagcattagacgcgtttttgctaatatgctcattaagaaaagcatcttcaaatatcctttctcttaagctgcttaatggtatttttgcactcccatagtgatcaacaatccacatataatctgattcaaattctgcgcttggaataagtgcagaatgcttttttaggaaattgcaaaaccgcaatattttgttgtcgtattcagctgagtcatatctctgcgatgcatcagcttctaataaataagatactgcttttttggtgccaaactgactataaaaccactgatttacatcttctgcagccttcgttgagaactcctctaaagtcatttctttaaatgaaaagtagtctttaacaaatagcggcacctttatatctagcgagtcgatcttgttaatcaatacattcggatctgtatacgcctgctcatcttcaagctctgttaatacaaaatgagaatctatcagtatgcttattatcttggtcagtaagtattctgggaagatgccacgaaaatcggtaatcaaagagttaaaggtgattccatcatcccctattttctctaaaatttgttgtattaaaaaattatagtcaatagacttctcgataacatcttttcgtttgtccacgatagggaagacattaagcaaagtatcgccagatttctctaaaacgttatcattcttaaaaagttttagttccttgaagtgtgttttggacaaaagtgttgtgattttatatgttgcttctgactttataataggtttaaccaaatattgtactgcatgacactctttattagtttctgaatctctattatgaaattctactgcggaaaacaagccgaaaggtgttgttctatatattgatctagcgtaataattagctaacgtttttctttctaaagatgtatgctgttctttcttagccatttgatacacatccgcggatgctgcatacaacatatcattaaataccttctgactaacgggatttgatggtgaattaactgccgttcttgtcatgtaatgctttaaaatttttgtcatgatgtctcctaatgattatgttataaaatgtaattttccttaatttagtaatttgcagtctttttcataaaaaaggttgacttcaataaaaattgtagcataatgtgataaagatgagacgagttaatcaaaaattaacaaacggatcgtgaaaatttcaagaaagtgtatatattagtgaaaaagcagtttatctatcatgtaaaaaatactaagcttgtcgttctattgctgatactgtcggtttctgtaggatcagcaacatacatccaattcctaaaagggcaaatgttccagcaagccgtatctggcaaaagttcccatttgttagtcagcttcttattgttcgcgttggtaatgacaattgaggtttccttctactacgtagaatggcagtatgaaaacaaactggtttcagagaccttctttgagttaaagaagtctgttttaagtactgttactaaattcaagccatataagcaggctagttcagacaaagaggctactcagctcttaaccaattctatcgacagcctggagtatccatactataatgcgtggtttgataacctttacctatctcttagggttatttttgtctttgtagctgtagcctcaattaactggattatagccattatcattttggcgctcatgttcattcctctgggcgtaacccaagtgttcaaagagaatatttccaagctgaacaagaagtatatggatcaagtaggggtgaatttaaagaaatacgaagacattatttcaaacattcttccagttcacatttttaaccttcgctcttttgttctgaaaaatgctcaagcatcacttgaaactgaacgtaatttgaaaagaagctcaaaaggtaagcaatacgcgcttaatgcttcatactcctttatctcctatttttctagttttgtagttttagtcttctccttgctgctggtcagccatggaaaattaggactgtcatcagttatcaccttgcttggcctagttgatcagctcagcatgcctattctttccttatcccgcaacagttcttcaataaacagcaccaaggcggtaagaactgatatcgatcaatacgtgcttcagaatgccagtgctaaccgtaagtcaatttcattttccaagaaaatttctttggaaaatgtggcagttcaattatccaaccaagaagtctcataccgagatatgcaattcgacttcggtcatagctacatcatccgtggtaaaagcggggtcgggaaaactttgttcctacatttgctgactggcctgcagccttacgatagcggagacattgtatacgacaacgctccacttgggcaagccgccgataaaaacgtctttcaggacatccgttttgtgcaagcggagaacaccctattcaatggctcagttcttgaaaatatattttttgaccgcacaccttcagatgatgaattagcattatgtgccaaactattgaaaaagagcacattaaattcagctgatgctgcaagtatctcaacaggcgaaaagagaagagtccttctgcttagagggttactgtcaaacagcagaacccttatctttgatgaacctaccgcgaaccttgatgcaaataccagtgctgttttctgggatatgctctttgactggttcaatcaaggcaatcgaacgatgattatcgtgtcacacaccattgacgaaaccaacctcaatcgctttgacaagcagctagattttaactcactgatcaagtcatgaagaaatactcatatgttctaggcgatggtaaaatccctgattttttagctaaattcggcttaataacacgcataggggaggatgatgatcttattctgatcaactcttttccaaaaatgctacataaagtcactagaattatgaaggtaaacggtatgagccccataaaaaaggggagttggcatataggaatcaatactattcaaaatgaaaatggtgaaatatttaccatccctctcatgccattagatccaaaatctattgtttatcctcctttgataaataaccactttgtaatgatgcaaattctaacatttaacgtatcacaattcgcggagctatatggtgttatttcaaaaagaaggaccttaatattagacctaagatataactttggtggagagatatcagcaatgtctaaatgcttcgagtggttaaatgcccactgtattaatcaaaaagtagtgttactattcaacaacactactgccagcgcagcggaactttttatagaaaaatgccaacggtctaatttaagtacggtatcaatcggcagtgaaacatatggaaaaaagtgggcttacaaaaaggtcacagttggcaagtccaatttctttttacccatttatcaacttgctccacaaatagaaataaatgaatacataaatactgacacattctatgagagctcccgtagctctgatgtccaatcaaagcttgtatttccgtttgctttaaatatcgaaaatattctactagaaaggaggtgaagtacgctatgttaatctggacatatcctaaagcaacccttttgaaggttaagtcaacaaaagtaaaggaattatccttagagtcatctttatacgcaagtagtggtcatcgcggcgaactgacctggcgctaagcggaagtataccgaactcaatcattgagttcggttttttaggagaaaaaatatgaaacaagtagattttattcaaacttctgatagtggaatccttaccaaagagaaccatgatccaataatccttaacaaaaccggagtagaaatctatcaatattatgctgataataagcaaataaccgctgatgaactatacaatgtttttcagcgtaaatatgatctatcttcagaagacaaaacaactgtcataaacagtattgatgacgttttatctatgataaaaaaatatatattggaaccttaatgcgatgaattaccagcaatttttttcgttttggaatagcacattatccgtaagttctaataacaaacagatcattgaacaactgtcttatatatataagccggaaattgtatcaaatgtaggcgatagtgaggttacatactatatagatatccattcgagcactggagaaaatgcgttattatttggagaaaacatcgaaaatggtttaatagatgtatcatacggtaaatcaagaaatgatttaaagacttggaagagtaatacaaccattcttccgcctatctctttagcaccattagtcaatgattttactttcattcatggatgtgcactattattagatggaaaaacgcatattatatttggtcctagtagatcaggcaaaacaacatttattctatcaatgcttgataagggggcctcgcttatcagtgatgacattgttgccgttcgaaatagtgattggttcctaatgccatttcctaaagccgttgcggttagaaatactaatgatttctatttccaaccacaattaaataagctccgaatggctgctccagaaagtttaaggtccatatatatccctaaactaggactaaattcatatcttatccatattgactccgtacctggatggagatatagtcatgatccattaaaaatcgattatatatatttgatttcagataactttgaaagtgacgtagatttattaacttttattcaatatttgcttgcccaagcaaccttgtcagatagctcatacgttacgacacttgttcatatattcaacctgctacaagcaccaccatttttagtagacatccggaatcatgaaaaaatgttccaattactacatacacaccatttaccaacttactaaaaacactatagcttagtggccaataaaaaacatactaatctagtgttggatgattactcgacggagtagtcgttcaacactttttcttttactatgtaaagtggagatgaagccaatgccgtagact
